United States Patent Application Publication US 2004/0234960 A1 - sequence listing, part 6

SEQ ID NO: 16943 - DNA, 611 bp, Artificial Sequence
  chemically treated genomic DNA (Homo sapiens) CpG-island No: 16943
tgttgtagtatgcgaaagatatttaacgtacgattttgtcgtatattcgttttattattatggaacgtgagtaggatagtattattatggatgtcgcgacgcgtcgtaatttggaaattatttagaatttggcgggtggtgcggaaaatacgttggtttttgtgttcgattgtatcgttacgtcgatgggtagtcgtatgttgaaacgttggttgtatatgttagtgcgcgatattcgcgtgttgtttgagcgttagtaaattattggcgtattgtaggattttatcgtcgggttatagtcggtattgcgttaggtcggcgatttggaacgtattttggtacgtttggttttacgaattgttcgtttacgcgatttggttcgtatgcgttacgttttttagtaattgtcggagttgcgtgcgtagttagaaattgtcgatagtgtatcggtataggcgttacgtgagaagatgggcgagtttgtcgagttgcgcgatttgttggagcgagtaattatcgatatatcgtcggtgttggtacgcgacggtggtgttatcgtatcgggttataacgaagagttggatgagtggcgcgcgttggttgacggcgcg

SEQ ID NO: 16944 - DNA, 611 bp, Artificial Sequence
  chemically treated genomic DNA (Homo sapiens) CpG-island No: 16944
cgcgccgtcaaccaacgcgcgccactcatccaactcttcgttataacccgatacgataacaccaccgtcgcgtaccaacaccgacgatatatcgataattactcgctccaacaaatcgcgcaactcgacaaactcgcccatcttctcacgtaacgcctataccgatacactatcgacaatttctaactacgcacgcaactccgacaattactaaaaaacgtaacgcatacgaaccaaatcgcgtaaacgaacaattcgtaaaaccaaacgtaccaaaatacgttccaaatcgccgacctaacgcaataccgactataacccgacgataaaatcctacaatacgccaataatttactaacgctcaaacaacacgcgaatatcgcgcactaacatatacaaccaacgtttcaacatacgactacccatcgacgtaacgatacaatcgaacacaaaaaccaacgtattttccgcaccacccgccaaattctaaataatttccaaattacgacgcgtcgcgacatccataataatactatcctactcacgttccataataataaaacgaatatacgacaaaatcgtacgttaaatatctttcgcatactacaaca

SEQ ID NO: 16945 - DNA, 620 bp, Artificial Sequence
  chemically treated genomic DNA (Homo sapiens) CpG-island No: 16945
cggtagtataaagttcgcgcggcgcgttttcgacgttaaatcggattagatcgcggggttttaaatcgtagatttaattgttggcgcgcggtgtcgattttaaatttttatagcgggcgacggcgtaggtcgcgacggtttttaattaacgatattttagtaaaattttttgtatatagtagtttcgtaggattagtgcgttgtagttttgtcgttatcgtttcgcggttagtcggttcgtttaggcgaaaacgttcggaattgatatttagcgtcgcgtagtcgaaatttttgttgttttgttagatagtcgttagtaggttgttttgacgtttttgtaatagggttttatcgttgatggtgtttggcgtaacgatacgtataattttgcgtttaatcggatttttgttggtcgtcggatcgttaatttgttcgtagatggtaacggattttttttgatttattagtttggcgagatagttttttatcgtatggtagggaattttcgttatcgggatcggttttttcgtcgaagtatcgcgtttggttagtgaaatatttagtagttgcgacgcgcgttttgcgtcgttataaaatagtttataaaaattatttattcg

SEQ ID NO: 16946 - DNA, 620 bp, Artificial Sequence
  chemically treated genomic DNA (Homo sapiens) CpG-island No: 16946
cgaataaataatttttataaactattttataacgacgcaaaacgcgcgtcgcaactactaaatatttcactaaccaaacgcgatacttcgacgaaaaaaccgatcccgataacgaaaattccctaccatacgataaaaaactatctcgccaaactaataaatcaaaaaaaatccgttaccatctacgaacaaattaacgatccgacgaccaacaaaaatccgattaaacgcaaaattatacgtatcgttacgccaaacaccatcaacgataaaaccctattacaaaaacgtcaaaacaacctactaacgactatctaacaaaacaacaaaaatttcgactacgcgacgctaaatatcaattccgaacgttttcgcctaaacgaaccgactaaccgcgaaacgataacgacaaaactacaacgcactaatcctacgaaactactatatacaaaaaattttactaaaatatcgttaattaaaaaccgtcgcgacctacgccgtcgcccgctataaaaatttaaaatcgacaccgcgcgccaacaattaaatctacgatttaaaaccccgcgatctaatccgatttaacgtcgaaaacgcgccgcgcgaactttatactaccg

SEQ ID NO: 16947 - DNA, 620 bp, Artificial Sequence
  chemically treated genomic DNA (Homo sapiens) CpG-island No: 16947
cggatgggtgatttttatgaattgttttatgacgacgtaaaacgcgcgtcgtaattgttggatattttattgattaaacgcggtgtttcggcgggagagtcgatttcgatggcggggattttttattatgcggtggaaaattatttcgttaaattggtgaattagggagagttcgttgttatttgcgaataaattggcgattcggcgattagtaaaggttcggttgagcgtaaagttgtgcgtatcgttacgttaggtattattagcgatgaagttttgttgtaggagcgttaggataatttgttggcggttatttggtaggatagtaaaggtttcggttacgcgacgttggatattagtttcgggcgttttcgtttgagcgaatcggttgatcgcgaaacgatggcggtagaattgtaacgtattaattttgcggaattgttgtatgtagaagattttgttgaaatgtcgttaattgaaggtcgtcgcggtttgcgtcgtcgttcgttgtgggagtttgaaatcgatatcgcgcgttagtagttgaatttgcgatttgggatttcgcgatttggttcggtttggcgtcgagaacgcgtcgcgcggattttgtgttgtcg

SEQ ID NO: 16948 - DNA, 620 bp, Artificial Sequence
  chemically treated genomic DNA (Homo sapiens) CpG-island No: 16948
cgacaacacaaaatccgcgcgacgcgttctcgacgccaaaccgaaccaaatcgcgaaatcccaaatcgcaaattcaactactaacgcgcgatatcgatttcaaactcccacaacgaacgacgacgcaaaccgcgacgaccttcaattaacgacatttcaacaaaatcttctacatacaacaattccgcaaaattaatacgttacaattctaccgccatcgtttcgcgatcaaccgattcgctcaaacgaaaacgcccgaaactaatatccaacgtcgcgtaaccgaaacctttactatcctaccaaataaccgccaacaaattatcctaacgctcctacaacaaaacttcatcgctaataatacctaacgtaacgatacgcacaactttacgctcaaccgaacctttactaatcgccgaatcgccaatttattcgcaaataacaacgaactctccctaattcaccaatttaacgaaataattttccaccgcataataaaaaatccccgccatcgaaatcgactctcccgccgaaacaccgcgtttaatcaataaaatatccaacaattacgacgcgcgttttacgtcgtcataaaacaattcataaaaatcacccatccg

SEQ ID NO: 16949 - DNA, 539 bp, Artificial Sequence
  chemically treated genomic DNA (Homo sapiens) CpG-island No: 16949
gtcgttaattatataatcgatgttatcgtttagcgtaacgtagtttagtttttattgtgtagtttgtgttttacgcggatttttttgcgattggttacgtatttcgcgtagattaggttggcggaatagtgcgttgtcgttagcgtttagtttgtcgtcgaggtaaattagatcgttttgtttggtgatgattagcgggttgatttcgattaacgttaggtcgcgttttaggaaaatggtcgttaggtttatgaagattttggtgaattgttgaattagtttattttttagatttagtttgaacgttagttcgcgtttttgatacggtatcgggttagttagcggattaagcgtaattttatggattaggtgcggagtttttttcgttattttttcgatttttacgtcgttttcggtggaggttataaagattatacgacgggaattacggttaataacggtatcgagatatagttttttacgatatcggtcgttgttttaattagaatttggttaatcggttggttattggtatttgt

SEQ ID NO: 16950 - DNA, 539 bp, Artificial Sequence
  chemically treated genomic DNA (Homo sapiens) CpG-island No: 16950
acaaataccaataaccaaccgattaaccaaattctaattaaaacaacgaccgatatcgtaaaaaactatatctcgataccgttattaaccgtaattcccgtcgtataatctttataacctccaccgaaaacgacgtaaaaatcgaaaaaataacgaaaaaaactccgcacctaatccataaaattacgcttaatccgctaactaacccgataccgtatcaaaaacgcgaactaacgttcaaactaaatctaaaaaataaactaattcaacaattcaccaaaatcttcataaacctaacgaccattttcctaaaacgcgacctaacgttaatcgaaatcaacccgctaatcatcaccaaacaaaacgatctaatttacctcgacgacaaactaaacgctaacgacaacgcactattccgccaacctaatctacgcgaaatacgtaaccaatcgcaaaaaaatccgcgtaaaacacaaactacacaataaaaactaaactacgttacgctaaacgataacatcgattatataattaacgac

SEQ ID NO: 16951 - DNA, 539 bp, Artificial Sequence
  chemically treated genomic DNA (Homo sapiens) CpG-island No: 16951
atagatgttaatggttaatcggttaattagattttggttgaagtagcgatcgatatcgtaaagagttgtatttcggtgtcgttgttgatcgtagttttcgtcgtgtggtttttatggtttttatcgaaggcggcgtggaaatcgaaaaagtggcggaagaaatttcgtatttgatttataaagttgcgtttgattcgttgattggttcgatgtcgtattagggacgcgagttggcgtttaaattgggtttggaaggtaaattggtttagtagtttattaaaatttttatgggtttggcgattatttttttggagcgcgatttggcgttgatcgaaattaattcgttggttattattaaatagggcgatttgatttgtttcgacggtaaattgggcgttgacggtaacgtattgtttcgttagtttgatttgcgcgaaatgcgtgattagtcgtaggaagattcgcgtgaagtataggttgtatagtgggaattgaattacgttgcgttggacggtaatatcggttgtatggttaacggt

SEQ ID NO: 16952 - DNA, 539 bp, Artificial Sequence
  chemically treated genomic DNA (Homo sapiens) CpG-island No: 16952
accgttaaccatacaaccgatattaccgtccaacgcaacgtaattcaattcccactatacaacctatacttcacgcgaatcttcctacgactaatcacgcatttcgcgcaaatcaaactaacgaaacaatacgttaccgtcaacgcccaatttaccgtcgaaacaaatcaaatcgccctatttaataataaccaacgaattaatttcgatcaacgccaaatcgcgctccaaaaaaataatcgccaaacccataaaaattttaataaactactaaaccaatttaccttccaaacccaatttaaacgccaactcgcgtccctaatacgacatcgaaccaatcaacgaatcaaacgcaactttataaatcaaatacgaaatttcttccgccactttttcgatttccacgccgccttcgataaaaaccataaaaaccacacgacgaaaactacgatcaacaacgacaccgaaatacaactctttacgatatcgatcgctacttcaaccaaaatctaattaaccgattaaccattaacatctat

SEQ ID NO: 16953 - DNA, 699 bp, Artificial Sequence
  chemically treated genomic DNA (Homo sapiens) CpG-island No: 16953
gttcgttgttgtatagttttatcgatttgagcgtggaaacgcgttttgatgtagaagtgaaaagttggtttgttttcgttttataaaaatgttatgaattggtattgttgcgcgatgcgttgaatagtggtgatacggtagttttggtagagtggagcgtttcgatttaggtacgtcgttattttattcgcgtatataattcggcggtagaaaagcgtttggcggcgattatcgtttaggatagttagcgtgcgaatgtttatgaagtgcgtgttgaagtttagcgtgcgcgttttaaattgttagcgtggtcgattattacgattggttttttttcgtaaattacggaaattcgtattttgcgtttggattttaaaaagggtaatttcgacgttaataattatcgtacgggtattgcggaatatattaagtaggttattgttgagtaggaacgtttgggattggatgtgttggtatatggcgaggtcgagcgtatgatttggtggatattttggcgagtattcgacggattgttttacgtaaagcgtgggttcgattacggtttcgtgggtaattcgttgtttgtgtatacgacgacgatacgtatgggatttttttttattaacgtaagagaggggtaaattgggacgcgcgatatggttgaaattaaacgcgtaaaaaattagagagttatagagt

SEQ ID NO: 16954 - DNA, 699 bp, Artificial Sequence
  chemically treated genomic DNA (Homo sapiens) CpG-island No: 16954
actctataactctctaattttttacgcgtttaatttcaaccatatcgcgcgtcccaatttacccctctcttacgttaataaaaaaaaatcccatacgtatcgtcgtcgtatacacaaacaacgaattacccacgaaaccgtaatcgaacccacgctttacgtaaaacaatccgtcgaatactcgccaaaatatccaccaaatcatacgctcgacctcgccatataccaacacatccaatcccaaacgttcctactcaacaataacctacttaatatattccgcaatacccgtacgataattattaacgtcgaaattaccctttttaaaatccaaacgcaaaatacgaatttccgtaatttacgaaaaaaaaccaatcgtaataatcgaccacgctaacaatttaaaacgcgcacgctaaacttcaacacgcacttcataaacattcgcacgctaactatcctaaacgataatcgccgccaaacgcttttctaccgccgaattatatacgcgaataaaataacgacgtacctaaatcgaaacgctccactctaccaaaactaccgtatcaccactattcaacgcatcgcgcaacaataccaattcataacatttttataaaacgaaaacaaaccaacttttcacttctacatcaaaacgcgtttccacgctcaaatcgataaaactatacaacaacgaac

SEQ ID NO: 16955 - DNA, 699 bp, Artificial Sequence
  chemically treated genomic DNA (Homo sapiens) CpG-island No: 16955
gttttatgattttttgattttttacgcgtttggttttagttatatcgcgcgttttagtttgttttttttttacgttggtaggagggaattttatgcgtatcgtcgtcgtatgtataggtaacgggttatttacgggatcgtagtcggatttacgttttgcgtaaaataattcgtcgagtgttcgttaaagtatttattaggttatacgttcggtttcgttatgtattagtatatttagttttaaacgtttttgtttaataatggtttgtttgatatgtttcgtaatgttcgtgcggtagttgttggcgtcgagattgttttttttgaaatttagacgtagggtacgaattttcgtggtttgcgggaaggaattaatcgtggtggtcggttacgttggtagtttaaaacgcgtacgttgggttttagtacgtattttatagatattcgtacgttggttgttttgggcggtgatcgtcgttagacgtttttttatcgtcggattatgtacgcgggtagagtgacgacgtgtttgaatcggggcgttttattttgttagagttgtcgtgttattattgtttagcgtatcgcgtagtagtgttagtttatggtatttttgtagggcgaaggtaaattagttttttatttttgtattaagacgcgtttttacgtttaggtcgatggggttgtgtagtaacgagt

SEQ ID NO: 16956 - DNA, 699 bp, Artificial Sequence
  chemically treated genomic DNA (Homo sapiens) CpG-island No: 16956
actcgttactacacaaccccatcgacctaaacgtaaaaacgcgtcttaatacaaaaataaaaaactaatttaccttcgccctacaaaaataccataaactaacactactacgcgatacgctaaacaataataacacgacaactctaacaaaataaaacgccccgattcaaacacgtcgtcactctacccgcgtacataatccgacgataaaaaaacgtctaacgacgatcaccgcccaaaacaaccaacgtacgaatatctataaaatacgtactaaaacccaacgtacgcgttttaaactaccaacgtaaccgaccaccacgattaattccttcccgcaaaccacgaaaattcgtaccctacgtctaaatttcaaaaaaaacaatctcgacgccaacaactaccgcacgaacattacgaaacatatcaaacaaaccattattaaacaaaaacgtttaaaactaaatatactaatacataacgaaaccgaacgtataacctaataaatactttaacgaacactcgacgaattattttacgcaaaacgtaaatccgactacgatcccgtaaataacccgttacctatacatacgacgacgatacgcataaaattccctcctaccaacgtaaaaaaaaaacaaactaaaacgcgcgatataactaaaaccaaacgcgtaaaaaatcaaaaaatcataaaac

SEQ ID NO: 16957 - DNA, 512 bp, Artificial Sequence
  chemically treated genomic DNA (Homo sapiens) CpG-island No: 16957
gtattcgtttcgttatcgtaaacgcgtttagttggcggtagcgtagtaatttttacgtcgttgtattttaggcgagtcgtgttattagtatcgcggaaggcgagggtgtgtttgaggaagttgacgtcgttacgttcggtgtaattttcgtttagacgttggtgcgcgtcgcgggattttttacgtgttattgcggagtgcgttatatatttagtaacgtttagatcgtggttttagtttaatggtgtagagtaggtcggtgtcgaattatcgttgggaagtgtcggtgatgcgtacgcgtttgaagcgttttgtagttcgttagtttgttatggtttttggtttagttcgggtcgggaattcgggtttttttagtaggtttttgcgcggtttttttattgcgtatttgttatattcgtttgtatgttagcgtggtttgaggatgttcgaagaagggttattggtatattaagtacgtatgtaaagtatattcgcgaatataatagaggttt

SEQ ID NO: 16958 - DNA, 512 bp, Artificial Sequence
  chemically treated genomic DNA (Homo sapiens) CpG-island No: 16958
aaacctctattatattcgcgaatatactttacatacgtacttaatataccaataacccttcttcgaacatcctcaaaccacgctaacatacaaacgaatataacaaatacgcaataaaaaaaccgcgcaaaaacctactaaaaaaacccgaattcccgacccgaactaaaccaaaaaccataacaaactaacgaactacaaaacgcttcaaacgcgtacgcatcaccgacacttcccaacgataattcgacaccgacctactctacaccattaaactaaaaccacgatctaaacgttactaaatatataacgcactccgcaataacacgtaaaaaatcccgcgacgcgcaccaacgtctaaacgaaaattacaccgaacgtaacgacgtcaacttcctcaaacacaccctcgccttccgcgatactaataacacgactcgcctaaaatacaacgacgtaaaaattactacgctaccgccaactaaacgcgtttacgataacgaaacgaatac

SEQ ID NO: 16959 - DNA, 512 bp, Artificial Sequence
  chemically treated genomic DNA (Homo sapiens) CpG-island No: 16959
ggatttttattgtattcgcgagtgtgttttgtatgcgtatttagtatgttagtgattttttttcgagtatttttagattacgttggtatatagacgagtgtaataggtgcgtaatgggaaaatcgcgtaaaggtttgttaggaaagttcggattttcgattcggattgagttagaaattatgataagttggcgagttgtaggacgttttaagcgcgtgcgtattatcgatattttttagcggtggttcgatatcgatttgttttatattattgaattggggttacggtttgaacgttgttgaatgtatggcgtatttcgtaatggtacgtaaagagtttcgcggcgcgtattagcgtttggacgaaggttgtatcgagcgtgacgacgttaatttttttaaatatattttcgtttttcgcgatgttgatggtacgattcgtttggagtatagcgacgtgaagattattacgttgtcgttagttaaacgcgtttacggtggcgaagcggatgt

SEQ ID NO: 16960 - DNA, 512 bp, Artificial Sequence
  chemically treated genomic DNA (Homo sapiens) CpG-island No: 16960
acatccgcttcgccaccgtaaacgcgtttaactaacgacaacgtaataatcttcacgtcgctatactccaaacgaatcgtaccatcaacatcgcgaaaaacgaaaatatatttaaaaaaattaacgtcgtcacgctcgatacaaccttcgtccaaacgctaatacgcgccgcgaaactctttacgtaccattacgaaatacgccatacattcaacaacgttcaaaccgtaaccccaattcaataatataaaacaaatcgatatcgaaccaccgctaaaaaatatcgataatacgcacgcgcttaaaacgtcctacaactcgccaacttatcataatttctaactcaatccgaatcgaaaatccgaactttcctaacaaacctttacgcgattttcccattacgcacctattacactcgtctatataccaacgtaatctaaaaatactcgaaaaaaaatcactaacatactaaatacgcatacaaaacacactcgcgaatacaataaaaatcc

SEQ ID NO: 16961 - DNA, 576 bp, Artificial Sequence
  chemically treated genomic DNA (Homo sapiens) CpG-island No: 16961
  unsure (42..43, 45..46, 81, 112)
tttcgtgttgcgttttcgtttgttcgacggttgggtgttggnnnnngggaagaacgcgacggggacgagagaaacgggagnagtgaattcgggttgtgttttttttggcgtnttatgatgacgtttcggggtgataaattttttttgcgcgtaaggtgtggggttatatttttattacggttgtgttcggcgaggtcgacgtgagtttttgaatttttcgtttaatcgggaaatcgattagatcgttatttattttgcgggtacgttttagcggatcggagattcgtatgttggtgattcggaagcggtatgcgttaatgagttgtaggattttaatttgttttatattggtgttagggtcggagatcgttgaagagtaacgtgaagcgtttttcgttaggcggcggaaatatttacgcgtttgagagtggaattgattcggtttgattttcgtattaggtaattgttggaacgtcgaacgttagttagcgttaatcgagttaggatcggttaagaagtttttatagagttgttttatttagttttggtttgcgttagagaggtaagaagagttta

SEQ ID NO: 16962 - DNA, 576 bp, Artificial Sequence
  chemically treated genomic DNA (Homo sapiens) CpG-island No: 16962
  unsure (465, 496, 531..532, 534..)
taaactcttcttacctctctaacgcaaaccaaaactaaataaaacaactctataaaaacttcttaaccgatcctaactcgattaacgctaactaacgttcgacgttccaacaattacctaatacgaaaatcaaaccgaatcaattccactctcaaacgcgtaaatatttccgccgcctaacgaaaaacgcttcacgttactcttcaacgatctccgaccctaacaccaatataaaacaaattaaaatcctacaactcattaacgcataccgcttccgaatcaccaacatacgaatctccgatccgctaaaacgtacccgcaaaataaataacgatctaatcgatttcccgattaaacgaaaaattcaaaaactcacgtcgacctcgccgaacacaaccgtaataaaaatataaccccacaccttacgcgcaaaaaaaatttatcaccccgaaacgtcatcataanacgccaaaaaaaacacaacccgaattcactnctcccgtttctctcgtccccgtcgcgttcttcccnnnnnccaacacccaaccgtcgaacaaacgaaaacgcaacacgaaa

SEQ ID NO: 16963 - DNA, 576 bp, Artificial Sequence
  chemically treated genomic DNA (Homo sapiens) CpG-island No: 16963
  unsure (465, 496, 531..532, 534..)
tggattttttttatttttttggcgtaaattagagttggatagaatagttttatgaagattttttaatcgattttgattcggttgacgttaattggcgttcgacgttttagtagttatttggtacgggagttaaatcggattaattttatttttaaacgcgtgaatattttcgtcgtttggcgaaagacgttttacgttattttttaacgattttcgattttgatattaatgtgaagtaggttaaagttttgtagtttattaacgtatatcgttttcgggttattagtatgcgaattttcgattcgttgggacgtgttcgtaaaataagtggcgatttgatcggtttttcgattggacgagaaatttagggatttacgtcggtttcgtcgggtataatcgtaatgggagtgtgattttatattttgcgcgtagggggagtttattatttcgaaacgttattatggngcgttaaggagaatatagttcgagtttattnttttcgtttttttcgttttcgtcgcgttttttttnnnnnttaatatttaatcgtcggataaacgagagcgtagtacgaga

SEQ ID NO: 16964 - DNA, 576 bp, Artificial Sequence
  chemically treated genomic DNA (Homo sapiens) CpG-island No: 16964
  unsure (42..43, 45..46, 81, 112)
tctcgtactacgctctcgtttatccgacgattaaatattaannnnnaaaaaaaacgcgacgaaaacgaaaaaaacgaaaanaataaactcgaactatattctccttaacgcnccataataacgtttcgaaataataaactccccctacgcgcaaaatataaaatcacactcccattacgattatacccgacgaaaccgacgtaaatccctaaatttctcgtccaatcgaaaaaccgatcaaatcgccacttattttacgaacacgtcccaacgaatcgaaaattcgcatactaataacccgaaaacgatatacgttaataaactacaaaactttaacctacttcacattaatatcaaaatcgaaaatcgttaaaaaataacgtaaaacgtctttcgccaaacgacgaaaatattcacgcgtttaaaaataaaattaatccgatttaactcccgtaccaaataactactaaaacgtcgaacgccaattaacgtcaaccgaatcaaaatcgattaaaaaatcttcataaaactattctatccaactctaatttacgccaaaaaaataaaaaaaatcca

SEQ ID NO: 16965 - DNA, 577 bp, Artificial Sequence
  chemically treated genomic DNA (Homo sapiens) CpG-island No: 16965
agtacgtagcggatatgtacggtcgtgatgcggtatcgtagattattattttcggtataatggcggcgaaagcggtgattcgcgacgtaggtcgcgtgttggggtattcgtacggttttgtcgatcgtatttcgaaattgatttcgttcgattcggggatgacgttggcgaaagcgtagaagtcgagtcgagttgtcgatattacgaagcggagaagaagttacggttgatcgataatgggcgtaacggtagggttatcgtaagcgggaagtttcgtgggtggttatatttttaaataacgattggcgtttatggattatagcgtattcggttcggtgatacgataagtaatcgaaggaatatatttcggtggtatttttatagggtagtaaaacgcgggtaaaagaggtattaggtatagaggcggatatattttatatttagttcgtttttttgttttcgtcgtcgcgtttaatattgtggtaatagtaagtaatatttagaagaatacgtcgatatttattaacgcgatcgatattatagatatagatatatattatatattagtttatttaat

SEQ ID NO: 16966 - DNA, 577 bp, Artificial Sequence
  chemically treated genomic DNA (Homo sapiens) CpG-island No: 16966
attaaataaactaatatataatatatatctatatctataatatcgatcgcgttaataaatatcgacgtattcttctaaatattacttactattaccacaatattaaacgcgacgacgaaaacaaaaaaacgaactaaatataaaatatatccgcctctatacctaatacctcttttacccgcgttttactaccctataaaaataccaccgaaatatattccttcgattacttatcgtatcaccgaaccgaatacgctataatccataaacgccaatcgttatttaaaaatataaccacccacgaaacttcccgcttacgataaccctaccgttacgcccattatcgatcaaccgtaacttcttctccgcttcgtaatatcgacaactcgactcgacttctacgctttcgccaacgtcatccccgaatcgaacgaaatcaatttcgaaatacgatcgacaaaaccgtacgaataccccaacacgcgacctacgtcgcgaatcaccgctttcgccgccattataccgaaaataataatctacgataccgcatcacgaccgtacatatccgctacgtact

SEQ ID NO: 16967 - DNA, 577 bp, Artificial Sequence
  chemically treated genomic DNA (Homo sapiens) CpG-island No: 16967
gttgggtaggttggtgtgtggtgtgtgtttgtgtttgtagtgtcggtcgcgttggtgggtgtcggcgtgtttttttgggtgttgtttattgttgttatagtgttggacgcgacgacgagaatagaaaagcgaattgagtataggatgtgttcgtttttgtatttggtgttttttttgttcgcgttttgttgttttgtgggggtgttatcgagatgtgttttttcggttatttgtcgtgttatcgggtcggatgcgttgtggtttataggcgttaatcgttatttgggggtgtgattatttacggggtttttcgtttgcggtggttttgtcgttgcgtttattgtcggttagtcgtagtttttttttcgtttcgtagtgtcggtagttcggttcggtttttacgttttcgttagcgttattttcggatcgggcgggattagtttcgagatacgatcgataaagtcgtacggatgttttagtacgcggtttacgtcgcggattatcgttttcgtcgttattgtatcgaaggtgatgatttgcgatatcgtattacgatcgtatatgttcgttacgtgtt

SEQ ID NO: 16968 - DNA, 577 bp, Artificial Sequence
  chemically treated genomic DNA (Homo sapiens) CpG-island No: 16968
aacacgtaacgaacatatacgatcgtaatacgatatcgcaaatcatcaccttcgatacaataacgacgaaaacgataatccgcgacgtaaaccgcgtactaaaacatccgtacgactttatcgatcgtatctcgaaactaatcccgcccgatccgaaaataacgctaacgaaaacgtaaaaaccgaaccgaactaccgacactacgaaacgaaaaaaaaactacgactaaccgacaataaacgcaacgacaaaaccaccgcaaacgaaaaaccccgtaaataatcacacccccaaataacgattaacgcctataaaccacaacgcatccgacccgataacacgacaaataaccgaaaaaacacatctcgataacacccccacaaaacaacaaaacgcgaacaaaaaaaacaccaaatacaaaaacgaacacatcctatactcaattcgcttttctattctcgtcgtcgcgtccaacactataacaacaataaacaacacccaaaaaaacacgccgacacccaccaacgcgaccgacactacaaacacaaacacacaccacacaccaacctacccaac

SEQ ID NO: 16969 - DNA, 544 bp, Artificial Sequence
  chemically treated genomic DNA (Homo sapiens) CpG-island No: 16969
gttggtgcgattttagcgtttttacgtcgatgatgcgtatttacgaaggtaatcgttttggcgataattggtagtttgacggcgacgtagaaattatcgtttatttcgttcgtatgattatcgtttttattattttgaaattttatttgaaagaggtcgtcgcgttgaatgcgaagttcggtttgtcggttatgcgttcgttgtttttgtattacgaagacgatgcgtatatttatattttgaaatattagtatttgttaggtcgcgatattttggtcgtttcggtgtatgaagaaggtcgtagcgattggacgttttatttgtcggaggataattgggtttacgtttggacgggtgaagcgtttcggggcggggaagttatcgttaatgcgtttatcggtaagttcgtcggttttttatcgcgtcgatagcgaatgggcggtattgttcgcgtcgttaaaaagtatttaattatattcgttcgtggggaaatttatgggttaagggagaatatcgatgagttatattataacggaagatttag

SEQ ID NO: 16970 - DNA, 544 bp, Artificial Sequence
  chemically treated genomic DNA (Homo sapiens) CpG-island No: 16970
ctaaatcttccgttataatataactcatcgatattctcccttaacccataaatttccccacgaacgaatataattaaatactttttaacgacgcgaacaataccgcccattcgctatcgacgcgataaaaaaccgacgaacttaccgataaacgcattaacgataacttccccgccccgaaacgcttcacccgtccaaacgtaaacccaattatcctccgacaaataaaacgtccaatcgctacgaccttcttcatacaccgaaacgaccaaaatatcgcgacctaacaaatactaatatttcaaaatataaatatacgcatcgtcttcgtaatacaaaaacaacgaacgcataaccgacaaaccgaacttcgcattcaacgcgacgacctctttcaaataaaatttcaaaataataaaaacgataatcatacgaacgaaataaacgataatttctacgtcgccgtcaaactaccaattatcgccaaaacgattaccttcgtaaatacgcatcatcgacgtaaaaacgctaaaatcgcaccaac

SEQ ID NO: 16971 - DNA, 544 bp, Artificial Sequence
  chemically treated genomic DNA (Homo sapiens) CpG-island No: 16971
ttggatttttcgttgtgatgtgatttatcgatgtttttttttggtttatgagtttttttacgggcggatgtgattagatgttttttaacgacgcgaatagtgtcgtttattcgttatcggcgcgataaaagatcggcgggtttgtcgatgggcgtattaacggtaattttttcgtttcggaacgttttattcgtttaggcgtggatttagttatttttcggtagatagagcgtttagtcgttacggttttttttatgtatcggagcgattagaatgtcgcgatttaataggtattgatattttagggtgtaagtgtgcgtatcgttttcgtaatgtaggaatagcgggcgtataatcggtaggtcggatttcgtatttagcgcgacggttttttttaggtaaggttttagggtggtgaagacggtggttatacgggcgaaatgggcgatggtttttgcgtcgtcgttaaattgttagttgtcgttaggacggttattttcgtgggtgcgtattatcggcgtgaaggcgttgaaatcgtattagt

SEQ ID NO: 16972 - DNA, 544 bp, Artificial Sequence
  chemically treated genomic DNA (Homo sapiens) CpG-island No: 16972
actaatacgatttcaacgccttcacgccgataatacgcacccacgaaaataaccgtcctaacgacaactaacaatttaacgacgacgcaaaaaccatcgcccatttcgcccgtataaccaccgtcttcaccaccctaaaaccttacctaaaaaaaaccgtcgcgctaaatacgaaatccgacctaccgattatacgcccgctattcctacattacgaaaacgatacgcacacttacaccctaaaatatcaatacctattaaatcgcgacattctaatcgctccgatacataaaaaaaaccgtaacgactaaacgctctatctaccgaaaaataactaaatccacgcctaaacgaataaaacgttccgaaacgaaaaaattaccgttaatacgcccatcgacaaacccgccgatcttttatcgcgccgataacgaataaacgacactattcgcgtcgttaaaaaacatctaatcacatccgcccgtaaaaaaactcataaaccaaaaaaaaacatcgataaatcacatcacaacgaaaaatccaa

SEQ ID NO: 16973 - DNA, 540 bp, Artificial Sequence
  chemically treated genomic DNA (Homo sapiens) CpG-island No: 16973
ttcggacgatgatagcgtatttttgcgtatcgttaatacgtcgaagcgagagattggttcggttacgttgaaaaagttgggtgagtgggcgatgacgcgtaataaaagtatgtttatcgttagttttgatatgggtttgagttagacgtttagcggacgtggttatgaagtattgattcgttttatttattggttggtagaaatttagcgtttggcggagcgggagtcgattgtcgcggtgcgtgatttgatttatggtatggattatgaattttggttgtacgaaatatcgtttagttcgaaagtcgtcgaaatgcgtatgaagaacgttaattaattgtttagttggatgacggagatgttggaaggtagtgaattggatgagtcgatgacgtttatttaggtggtgacgcgttttattttgcgcgatatgatggagcgtggtgagagtgaagaagagttggattaggtgtaattgatgattttttacgcgtcgaaagggttggagtttttttatgtttatatggtcgggtatggaaa

SEQ ID NO: 16974 - DNA, 540 bp, Artificial Sequence
  chemically treated genomic DNA (Homo sapiens) CpG-island No: 16974
tttccatacccgaccatataaacataaaaaaactccaaccctttcgacgcgtaaaaaatcatcaattacacctaatccaactcttcttcactctcaccacgctccatcatatcgcgcaaaataaaacgcgtcaccacctaaataaacgtcatcgactcatccaattcactaccttccaacatctccgtcatccaactaaacaattaattaacgttcttcatacgcatttcgacgactttcgaactaaacgatatttcgtacaaccaaaattcataatccataccataaatcaaatcacgcaccgcgacaatcgactcccgctccgccaaacgctaaatttctaccaaccaataaataaaacgaatcaatacttcataaccacgtccgctaaacgtctaactcaaacccatatcaaaactaacgataaacatacttttattacgcgtcatcgcccactcacccaactttttcaacgtaaccgaaccaatctctcgcttcgacgtattaacgatacgcaaaaatacgctatcatcgtccgaa

SEQ ID NO: 16975 - DNA, 540 bp, Artificial Sequence
  chemically treated genomic DNA (Homo sapiens) CpG-island No: 16975
tttttatattcgattatgtagatataaggaaattttagttttttcgacgcgtggagagttattagttgtatttgatttagtttttttttatttttattacgttttattatgtcgcgtaaagtaaagcgcgttattatttgggtgagcgttatcggtttatttagtttattgttttttagtattttcgttatttagttaaatagttggttgacgttttttatgcgtatttcggcggttttcgggttgggcgatgtttcgtatagttaggatttataatttatgttatggattagattacgtatcgcggtaatcggttttcgtttcgttagacgttggatttttgttaattagtgagtgaagcgggttaatgttttataattacgttcgttaagcgtttgatttaggtttatattaaagttggcggtaaatatgtttttattgcgcgttatcgtttatttatttagtttttttagcgtagtcgggttaatttttcgtttcggcgtgttaacgatacgtagaaatgcgttgttatcgttcggg

SEQ ID NO: 16976 - DNA, 540 bp, Artificial Sequence
  chemically treated genomic DNA (Homo sapiens) CpG-island No: 16976
cccgaacgataacaacgcatttctacgtatcgttaacacgccgaaacgaaaaattaacccgactacgctaaaaaaactaaataaataaacgataacgcgcaataaaaacatatttaccgccaactttaatataaacctaaatcaaacgcttaacgaacgtaattataaaacattaacccgcttcactcactaattaacaaaaatccaacgtctaacgaaacgaaaaccgattaccgcgatacgtaatctaatccataacataaattataaatcctaactatacgaaacatcgcccaacccgaaaaccgccgaaatacgcataaaaaacgtcaaccaactatttaactaaataacgaaaatactaaaaaacaataaactaaataaaccgataacgctcacccaaataataacgcgctttactttacgcgacataataaaacgtaataaaaataaaaaaaaactaaatcaaatacaactaataactctccacgcgtcgaaaaaactaaaatttccttatatctacataatcgaatataaaaa

SEQ ID NO: 16977 - DNA, 819 bp, Artificial Sequence
  chemically treated genomic DNA (Homo sapiens) CpG-island No: 16977
agcgattggacgcgttggttaatgcggcgggaattttacgtatgggcgcgatcgattagtttagtaaagaggattggtagtagatttttgcggttaacgtcggcggtgcgtttaatttgttttagtaaattatgaattagtttcgtcgttagcggggcggggcgattgttattgtggcgttcgacgtcgcgtatacgtcgcgtattggtatgagtgtttatggcgtatcgaaagcggcgttgaaaagtttggcgttgagcgtcgggttggaattggcgggtagcggcgtgcgttgtaatgtggtttcgtttggttttatcgatatcgatatgtaacgtacgttgtgggtgagcgatgacgtcgaagaatagcgtattcgcggttttggcgagtagtttaaattcggtatttcgttggggaaaatcgttcgtttataagagatcgttaatacgattttgtttttcgtttttgatttcgttagttatattattttataggatattgtggtcgatggcggtttaacgttgggggtataagtatgatttggaaacgttatttaacgttcgacgaattgaacgttattagcgataatataatggtggcgtatttgggaattgtgtatattcgtttgggcgatgatgtgttggaagtcgaaatgtcggttgatattcgtatttattagtcgttcggtttattattggggggggtattggggggttggcggaacgcgggattaagggggattatgtaatcggaggaacgtgtgttgattaatttttttttatttttcgatataagaaagtatcgcgtttattcgtt

SEQ ID NO: 16978 - DNA, 819 bp, Artificial Sequence
  chemically treated genomic DNA (Homo sapiens) CpG-island No: 16978
aacgaataaacgcgatactttcttatatcgaaaaataaaaaaaaattaatcaacacacgttcctccgattacataatcccccttaatcccgcgttccgccaaccccccaataccccccccaataataaaccgaacgactaataaatacgaatatcaaccgacatttcgacttccaacacatcatcgcccaaacgaatatacacaattcccaaatacgccaccattatattatcgctaataacgttcaattcgtcgaacgttaaataacgtttccaaatcatacttatacccccaacgttaaaccgccatcgaccacaatatcctataaaataatataactaacgaaatcaaaaacgaaaaacaaaatcgtattaacgatctcttataaacgaacgattttccccaacgaaataccgaatttaaactactcgccaaaaccgcgaatacgctattcttcgacgtcatcgctcacccacaacgtacgttacatatcgatatcgataaaaccaaacgaaaccacattacaacgcacgccgctacccgccaattccaacccgacgctcaacgccaaacttttcaacgccgctttcgatacgccataaacactcataccaatacgcgacgtatacgcgacgtcgaacgccacaataacaatcgccccgccccgctaacgacgaaactaattcataatttactaaaacaaattaaacgcaccgccgacgttaaccgcaaaaatctactaccaatcctctttactaaactaatcgatcgcgcccatacgtaaaattcccgccgcattaaccaacgcgtccaatcgct

SEQ ID NO: 16979 - DNA, 819 bp, Artificial Sequence
  chemically treated genomic DNA (Homo sapiens) CpG-island No: 16979
gacgggtgaacgcgatatttttttatatcggagagtgagggaagattggttaatatacgttttttcgattatataattttttttgatttcgcgtttcgttagttttttaatgttttttttagtagtagatcgaacggttgatgagtacgggtattaatcggtatttcggtttttagtatattatcgtttagacgggtatatataatttttagatgcgttattattgtgttatcgttggtggcgtttagttcgtcgagcgttaaatggcgtttttagattatgtttatgtttttagcgttgagtcgttatcgattataatattttgtagggtaatatggttggcgaggttagaggcgaggaataaaatcgtgttggcgattttttgtggacgggcgattttttttagcggaatgtcgagtttaaattgttcgttaaagtcgcgaatacgttgtttttcggcgttatcgtttatttatagcgtgcgttgtatatcggtgtcggtggagttaggcgaaattatattatagcgtacgtcgttattcgttagttttagttcgacgtttaacgttaggttttttagcgtcgttttcgatgcgttataagtatttatgttaatacgcggcgtgtgcgcggcgtcggacgttatagtgataatcgtttcgtttcgttgacggcgaaattggtttatggtttgttggaataggttaaacgtatcgtcgacgttaatcgtaaaagtttgttgttagttttttttattgagttgatcggtcgcgtttatgcgtaaaattttcgtcgtattgattagcgcgtttagtcgtt

SEQ ID NO: 16980 - DNA, 819 bp, Artificial Sequence
  chemically treated genomic DNA (Homo sapiens) CpG-island No: 16980
aacgactaaacgcgctaatcaatacgacgaaaattttacgcataaacgcgaccgatcaactcaataaaaaaaactaacaacaaacttttacgattaacgtcgacgatacgtttaacctattccaacaaaccataaaccaatttcgccgtcaacgaaacgaaacgattatcactataacgtccgacgccgcgcacacgccgcgtattaacataaatacttataacgcatcgaaaacgacgctaaaaaacctaacgttaaacgtcgaactaaaactaacgaataacgacgtacgctataatataatttcgcctaactccaccgacaccgatatacaacgcacgctataaataaacgataacgccgaaaaacaacgtattcgcgactttaacgaacaatttaaactcgacattccgctaaaaaaaatcgcccgtccacaaaaaatcgccaacacgattttattcctcgcctctaacctcgccaaccatattaccctacaaaatattataatcgataacgactcaacgctaaaaacataaacataatctaaaaacgccatttaacgctcgacgaactaaacgccaccaacgataacacaataataacgcatctaaaaattatatatacccgtctaaacgataatatactaaaaaccgaaataccgattaatacccgtactcatcaaccgttcgatctactactaaaaaaaacattaaaaaactaacgaaacgcgaaatcaaaaaaaattatataatcgaaaaaacgtatattaaccaatcttccctcactctccgatataaaaaaatatcgcgttcacccgtc

SEQ ID NO: 16981 - DNA, 614 bp, Artificial Sequence
  chemically treated genomic DNA (Homo sapiens) CpG-island No: 16981
  unsure (610)
gttgtcgggtttttttcggtttaggttttgttggtaacgatatgtatggtgttgatcgggaagttataattcgtattattcggtagtttggtatcggcgtttttatcgttcggtagtgcggagaacggtatttgtaattagacgatatttttgttcggttttagttcgttatttatttagtacggcgtttaggtgtaataaaatatcggtttgttttttttgtagcgattgatggtgtcggttattatcgttgcgtagtttttttgattatgcgttacggtgttggttagtttatacgcggtaagttggtggttgatcgtattttcgtagatttagatagggttataatcggttaaatttcgtttttcgtcgtcgtggtatttattagttggggaattttcggatttttagtgtgttaggtggcgaattggacggtcggggaatatatcgttaggtatcgtttcggcgtataatttttcgttattttttttcgcgttttatttttataggtttattacggaggttcgaaagaggttcggatatcggtgagattatttaatcgaagtttgatagattttcgattttttttcgttttattatacgcgtgtanaaaa

SEQ ID NO: 16982 - DNA, 614 bp, Artificial Sequence
  chemically treated genomic DNA (Homo sapiens) CpG-island No: 16982
  unsure (5)
ttttntacacgcgtataataaaacgaaaaaaaatcgaaaatctatcaaacttcgattaaataatctcaccgatatccgaacctctttcgaacctccgtaataaacctataaaaataaaacgcgaaaaaaaataacgaaaaattatacgccgaaacgatacctaacgatatattccccgaccgtccaattcgccacctaacacactaaaaatccgaaaattccccaactaataaataccacgacgacgaaaaacgaaatttaaccgattataaccctatctaaatctacgaaaatacgatcaaccaccaacttaccgcgtataaactaaccaacaccgtaacgcataatcaaaaaaactacgcaacgataataaccgacaccatcaatcgctacaaaaaaaacaaaccgatattttattacacctaaacgccgtactaaataaataacgaactaaaaccgaacaaaaatatcgtctaattacaaataccgttctccgcactaccgaacgataaaaacgccgataccaaactaccgaataatacgaattataacttcccgatcaacaccatacatatcgttaccaacaaaacctaaaccgaaaaaaacccgacaac

SEQ ID NO: 16983 - DNA, 614 bp, Artificial Sequence
  chemically treated genomic DNA (Homo sapiens) CpG-island No: 16983
  unsure (5)
ttttntatacgcgtgtgataaaacggagagaagtcgagagtttattaggtttcggttgagtggttttatcgatgttcggatttttttcggattttcgtggtgggtttgtgaaaatgaaacgcgggaaaaaataacgaaggattgtacgtcggaacggtatttggcgatatgtttttcgatcgtttaattcgttatttggtatattgaagattcgaagattttttaattggtggatattacggcgacggaaaacgggatttaatcggttgtaattttgtttgggtttgcgaaggtgcgattaattattagtttgtcgcgtatgaattgattaatatcgtgacgtataattaggggaattacgtagcgatgatggtcgatattattagtcgttataaagagggtaaatcggtgttttattatatttggacgtcgtattgggtgagtaacgaattgaagtcgggtaaagatgtcgtttggttgtaggtgtcgtttttcgtattgtcgggcgataaaaacgtcgatattaaattgtcgaatggtgcgaattatggtttttcggttagtattatgtatatcgttgttaataaagtttgggtcgagaaaaattcggtagt

SEQ ID NO: 16984 - DNA, 614 bp, Artificial Sequence
  chemically treated genomic DNA (Homo sapiens) CpG-island No: 16984
  unsure (610)
actaccgaatttttctcgacccaaactttattaacaacgatatacataatactaaccgaaaaaccataattcgcaccattcgacaatttaatatcgacgtttttatcgcccgacaatacgaaaaacgacacctacaaccaaacgacatctttacccgacttcaattcgttactcacccaatacgacgtccaaatataataaaacaccgatttaccctctttataacgactaataatatcgaccatcatcgctacgtaattcccctaattatacgtcacgatattaatcaattcatacgcgacaaactaataattaatcgcaccttcgcaaacccaaacaaaattacaaccgattaaatcccgttttccgtcgccgtaatatccaccaattaaaaaatcttcgaatcttcaatataccaaataacgaattaaacgatcgaaaaacatatcgccaaataccgttccgacgtacaatccttcgttattttttcccgcgtttcattttcacaaacccaccacgaaaatccgaaaaaaatccgaacatcgataaaaccactcaaccgaaacctaataaactctcgacttctctccgttttatcacacgcgtatanaaaa

SEQ ID NO: 16985 - DNA, 806 bp, Artificial Sequence
  chemically treated genomic DNA (Homo sapiens) CpG-island No: 16985
ggtgcgttggatttcgcgggtggtatcgtggtgtatattaacgtcgtaatcgtcggtttggtgggcgcgtatttgataggaaaacgcgtgggtttcggtaaagaggcgtttaaatcgtataatttgtcgatggtttttatcgggattgttattttttatatcggttggtttggttttaacgtcgggttagcgggtacggcgaatgaaatcgcggtattggtatttgtgaatattgtggtcgtaacggcggcggtaatttttggttggattttcggtgaatgggcgttgcgtggtaagtttttattgttgggggcgtgttttggcgcgattgtcggtttggtcggcgtgacgttagtttgcggttatattggggttggcggcgcgttgattatcggcgtggtagttggtttggcgggtttgtggggcgttattatgtttaaacgtttgttgcgggtggatgatttttgcgatgttttcggtgtgtacggcgttcgtggtatagtcggttgtattatgatcgggatttttgtcgttagttcgttgggcggcgtgggtttcgttgaaggtgtgacgtatgggttattagttgttggtatagttggatagtatcgttattacgatcgtttggttcggtgttgtggtatttatcggttataaatggcggatttgacgggtggtttgggtgtatcgggacgagtaaggagcgagaaagggttggatgttaatagtttaggcgagaatggttataacgcgtaataagtattggaaaaatagcggcgaggttttattttcggtattttttaatg

SEQ ID NO: 16986 - DNA, 806 bp, Artificial Sequence
  chemically treated genomic DNA (Homo sapiens) CpG-island No: 16986
cattaaaaaataccgaaaataaaacctcgccgctatttttccaatacttattacgcgttataaccattctcgcctaaactattaacatccaaccctttctcgctccttactcgtcccgatacacccaaaccacccgtcaaatccgccatttataaccgataaataccacaacaccgaaccaaacgatcgtaataacgatactatccaactataccaacaactaataacccatacgtcacaccttcaacgaaacccacgccgcccaacgaactaacgacaaaaatcccgatcataatacaaccgactataccacgaacgccgtacacaccgaaaacatcgcaaaaatcatccacccgcaacaaacgtttaaacataataacgccccacaaacccgccaaaccaactaccacgccgataatcaacgcgccgccaaccccaatataaccgcaaactaacgtcacgccgaccaaaccgacaatcgcgccaaaacacgcccccaacaataaaaacttaccacgcaacgcccattcaccgaaaatccaaccaaaaattaccgccgccgttacgaccacaatattcacaaataccaataccgcgatttcattcgccgtacccgctaacccgacgttaaaaccaaaccaaccgatataaaaaataacaatcccgataaaaaccatcgacaaattatacgatttaaacgcctctttaccgaaacccacgcgttttcctatcaaatacgcgcccaccaaaccgacgattacgacgttaatatacaccacgataccacccgcgaaatccaacgcacc

SEQ ID NO: 16987 - DNA, 806 bp, Artificial Sequence
  chemically treated genomic DNA (Homo sapiens) CpG-island No: 16987
tattgaaaaatatcggaggtgaaatttcgtcgttgtttttttagtgtttgttacgcgttatagttattttcgtttgggttgttgatatttagttttttttcgttttttgttcgtttcggtatatttagattattcgttagattcgttatttgtagtcgataaatgttataatatcggattagacgatcgtaatggcgatgttgtttagttgtattagtaattgatggtttatgcgttatatttttagcgaagtttacgtcgtttagcgagttggcggtaaaaatttcggttatgatatagtcgattatgttacgaacgtcgtgtatatcgaagatatcgtagggattatttattcgtagtaagcgtttgagtatggtaacgttttataagttcgttagattagttattacgtcgataattaacgcgtcgttaattttaatgtagtcgtaggttggcgttacgtcgattagatcggtaatcgcgttagaatacgtttttagtagtgaaggtttattacgtagcgtttatttatcgaagatttagttaagaattgtcgtcgtcgttgcgattatagtatttataaatgttagtgtcgcgattttattcgtcgtgttcgttgattcggcgttaaagttaaattaatcgatatagagaatggtagtttcggtgaagattatcggtaggttgtgcggtttaaacgtttttttatcgaagtttacgcgtttttttattagatacgcgtttattagatcggcgattgcggcgttaatgtgtattacggtgttattcgcgaaatttagcgtatt

SEQ ID NO: 16988 - DNA, 806 bp, Artificial Sequence
  chemically treated genomic DNA (Homo sapiens) CpG-island No: 16988
aatacgctaaatttcgcgaataacaccgtaatacacattaacgccgcaatcgccgatctaataaacgcgtatctaataaaaaaacgcgtaaacttcgataaaaaaacgtttaaaccgcacaacctaccgataatcttcaccgaaactaccattctctatatcgattaatttaactttaacgccgaatcaacgaacacgacgaataaaatcgcgacactaacatttataaatactataatcgcaacgacgacgacaattcttaactaaatcttcgataaataaacgctacgtaataaaccttcactactaaaaacgtattctaacgcgattaccgatctaatcgacgtaacgccaacctacgactacattaaaattaacgacgcgttaattatcgacgtaataactaatctaacgaacttataaaacgttaccatactcaaacgcttactacgaataaataatccctacgatatcttcgatatacacgacgttcgtaacataatcgactatatcataaccgaaatttttaccgccaactcgctaaacgacgtaaacttcgctaaaaatataacgcataaaccatcaattactaatacaactaaacaacatcgccattacgatcgtctaatccgatattataacatttatcgactacaaataacgaatctaacgaataatctaaatataccgaaacgaacaaaaaacgaaaaaaaactaaatatcaacaacccaaacgaaaataactataacgcgtaacaaacactaaaaaaacaacgacgaaatttcacctccgatatttttcaata

SEQ ID NO: 16989 - DNA, 624 bp, Artificial Sequence
  chemically treated genomic DNA (Homo sapiens) CpG-island No: 16989
tgtcggatgcggcgtaatcgttttattcgatttacggggtggagtattttatagcggtgtaggtttgataagacgcgttagcgtcgtattaggtaatcggttcggacgttggatgtcggatgcggcgtaatcgttttatttaatttacggggtggagtattttatagcggtgtaggtttgataagacgcgtttagcgtcgtattaggtaatcggtttgggcgttagatgtcggatgcggcgtaatcgttttattcgatttacggggtggagtattttatagcggtgtaggtttgataagacgcgttagcgtcgtattaggtaatcggttcgggcgttggatgtcggatgcggcgtgatcgttttgtttgatttacggggtgtcgtattttatagcggtgtaggtttgataagacgcgttagcgtcgtattaggtaatcggttcgggcgttggatgtcggatgcggcgtgatcgttttgtttgatttacggggtgtcgtattttacggtagtttagcgaattatcgcgttgttaattttttttttcgttttttagacgcggtattttatatttatattgtttggcgtatatattacgatcggtagtttgttgttgtaacgtagta

SEQ ID NO: 16990 - DNA, 624 bp, Artificial Sequence
  chemically treated genomic DNA (Homo sapiens) CpG-island No: 16990
tactacgttacaacaacaaactaccgatcgtaatatatacgccaaacaatataaatataaaataccgcgtctaaaaaacgaaaaaaaaaattaacaacgcgataattcgctaaactaccgtaaaatacgacaccccgtaaatcaaacaaaacgatcacgccgcatccgacatccaacgcccgaaccgattacctaatacgacgctaacgcgtcttatcaaacctacaccgctataaaatacgacaccccgtaaatcaaacaaaacgatcacgccgcatccgacatccaacgcccgaaccgattacctaatacgacgctaacgcgtcttatcaaacctacaccgctataaaatactccaccccgtaaatcgaataaaacgattacgccgcatccgacatctaacgcccaaaccgattacctaatacgacgctaaacgcgtcttatcaaacctacaccgctataaaatactccaccccgtaaattaaataaaacgattacgccgcatccgacatccaacgtccgaaccgattacctaatacgacgctaacgcgtcttatcaaacctacaccgctataaaatactccaccccgtaaatcgaataaaacgattacgccgcatccgaca

SEQ ID NO: 16991 - DNA, 624 bp, Artificial Sequence
  chemically treated genomic DNA (Homo sapiens) CpG-island No: 16991
tgttgcgttataatagtaagttgtcgatcgtggtgtatacgttagataatgtagatgtgaagtatcgcgtttggaaggcggaagagaaaattgataacgcggtagttcgttaaattgtcgtgaagtgcggtatttcgtaggttagataaggcggttacgtcgtattcgatatttaacgttcgagtcggttgtttgatgcgacgttggcgcgttttattaggtttatatcgttgtgaagtgcggtatttcgtaggttagataaggcggttacgtcgtattcgatatttaacgttcgagtcggttgtttgatgcgacgttggcgcgttttattaggtttatatcgttgtgaagtgttttatttcgtaggtcggataaggcggttacgtcgtattcgatatttaacgtttaagtcggttgtttgatgcgacgttgggcgcgttttattaggtttatatcgttgtgaagtgttttatttcgtaggttggataaggcggttacgtcgtattcgatatttaacgttcgagtcggttgtttgatgcgacgttggcgcgttttattaggtttatatcgttgtgaagtgttttatttcgtaggtcggataaggcggttacgtcgtattcgata

SEQ ID NO: 16992 - DNA, 624 bp, Artificial Sequence
  chemically treated genomic DNA (Homo sapiens) CpG-island No: 16992
tatcgaatacgacgtaaccgccttatccgacctacgaaataaaacacttcacaacgatataaacctaataaaacgcgccaacgtcgcatcaaacaaccgactcgaacgttaaatatcgaatacgacgtaaccgccttatccaacctacgaaataaaacacttcacaacgatataaacctaataaaacgcgcccaacgtcgcatcaaacaaccgacttaaacgttaaatatcgaatacgacgtaaccgccttatccgacctacgaaataaaacacttcacaacgatataaacctaataaaacgcgccaacgtcgcatcaaacaaccgactcgaacgttaaatatcgaatacgacgtaaccgccttatctaacctacgaaataccgcacttcacaacgatataaacctaataaaacgcgccaacgtcgcatcaaacaaccgactcgaacgttaaatatcgaatacgacgtaaccgccttatctaacctacgaaataccgcacttcacgacaatttaacgaactaccgcgttatcaattttctcttccgccttccaaacgcgatacttcacatctacattatctaacgtatacaccacgatcgacaacttactattataacgcaaca

SEQ ID NO: 16993 - DNA, 608 bp, Artificial Sequence
  chemically treated genomic DNA (Homo sapiens) CpG-island No: 16993
tacggcgttagatatatttgtatcgttttaggttcgcgttttatatcgttaacgttagcggcggcggagaatttcgtatttatttattatatttatttcgatgagcgtgggttggggtatttggcgttggggttggcgaaagttagtaagtagtcggtggcggtgattgtgattttcggtacggcggtggtaaatttttattcggtattgattgaagtcgggttaatcggagaaaaattgatttttttaatcgtcgatcgttcgtcggagttaattgattgcggcgcgaattaggtaattcgttagtcgggaatgttcgttttttatttacgtatagtattttattgtcgcgttcgatttaggatatttcgtacgttggttggtttttattattcgattcgttttcggtaagtttaaagcgggggagttataataaagggtcgtggttgatatatgttttggtaaagtgttaaacggagttatatatataacggttcgggttatcgtgtcggagaaatacgggtggatgaaagttttttgaaggaaaaacgacggtttcgtgtaaacgagtgtgtgggttaaagaaagaataatttgggtatcgtgtg

SEQ ID NO: 16994 - DNA, 608 bp, Artificial Sequence
  chemically treated genomic DNA (Homo sapiens) CpG-island No: 16994
cacacgatacccaaattattctttctttaacccacacactcgtttacacgaaaccgtcgtttttccttcaaaaaactttcatccacccgtatttctccgacacgataacccgaaccgttatatatataactccgtttaacactttaccaaaacatatatcaaccacgaccctttattataactcccccgctttaaacttaccgaaaacgaatcgaataataaaaaccaaccaacgtacgaaatatcctaaatcgaacgcgacaataaaatactatacgtaaataaaaaacgaacattcccgactaacgaattacctaattcgcgccgcaatcaattaactccgacgaacgatcgacgattaaaaaaatcaatttttctccgattaacccgacttcaatcaataccgaataaaaatttaccaccgccgtaccgaaaatcacaatcaccgccaccgactacttactaactttcgccaaccccaacgccaaataccccaacccacgctcatcgaaataaatataataaataaatacgaaattctccgccgccgctaacgttaacgatataaaacgcgaacctaaaacgatacaaatatatctaacgccgta

SEQ ID NO: 16995 - DNA, 608 bp, Artificial Sequence
  chemically treated genomic DNA (Homo sapiens) CpG-island No: 16995
tatacggtgtttagattgttttttttttggtttatatattcgtttgtacgaaatcgtcgttttttttttaaggggtttttatttattcgtgttttttcgatacgatgattcggatcgttgtgtgtatgatttcgtttggtattttgttaaaatatgtgttaattacggttttttattgtgattttttcgttttgagtttatcgagagcgggtcgaatggtagaaattagttaacgtgcgggatattttgggtcgggcgcggtaatgaaatattgtgcgtgggtagagagcgaatattttcggttggcgaattgtttgattcgcgtcgtagttaattagtttcggcgggcgatcggcggttaagagaattagttttttttcggttaattcggttttaattagtgtcggatagagatttgttatcgtcgtgtcggaggttataattatcgttatcggttgtttgttgattttcgttagttttagcgttagatgttttaatttacgtttatcgaaatgggtgtggtgaatgaatgcggaatttttcgtcgtcgttaacgttaacggtgtagaacgcgagtttggggcgatatagatgtgtttgacgtcgtg

SEQ ID NO: 16996 - DNA, 608 bp, Artificial Sequence
  chemically treated genomic DNA (Homo sapiens) CpG-island No: 16996
cacgacgtcaaacacatctatatcgccccaaactcgcgttctacaccgttaacgttaacgacgacgaaaaattccgcattcattcaccacacccatttcgataaacgtaaattaaaacatctaacgctaaaactaacgaaaatcaacaaacaaccgataacgataattataacctccgacacgacgataacaaatctctatccgacactaattaaaaccgaattaaccgaaaaaaaactaattctcttaaccgccgatcgcccgccgaaactaattaactacgacgcgaatcaaacaattcgccaaccgaaaatattcgctctctacccacgcacaatatttcattaccgcgcccgacccaaaatatcccgcacgttaactaatttctaccattcgacccgctctcgataaactcaaaacgaaaaaatcacaataaaaaaccgtaattaacacatattttaacaaaataccaaacgaaatcatacacacaacgatccgaatcatcgtatcgaaaaaacacgaataaataaaaaccccttaaaaaaaaaacgacgatttcgtacaaacgaatatataaaccaaaaaaaaaacaatctaaacaccgtata

SEQ ID NO: 16997 - DNA, 512 bp, Artificial Sequence
  chemically treated genomic DNA (Homo sapiens) CpG-island No: 16997
ttgtagtgttaggattcgatcgtttagttgttcggtaagaagtacgttaaattattgacggcgttttgtcgcgtttaatgtgttttgttggcgtgttttattgtatagcgtatttgtttgggattattgttttaggtagattgttcgttgtagtagatcggttcgtagcgttttttttttcggcgatgtagtaaacgtcgtatcgtttagttgcgttttggcgataggtaattgtgttagtcgtagggtattttgttcgattttattgcgataacgtagggtcggcgtagtatcgtacgttttttgttgggtaagtagttttttaattgtcgtaacgttttttattttaatcggaatagtcgttagattgcgtttaagtcgggtattttttgggtgacgttttagttgatttttaagtaatagtcgcgttcggttattatgattaaaatggcgataggttttcgtaaggtataaagttagcggaatattattcggtatttgttggtgtatat

SEQ ID NO: 16998 - DNA, 512 bp, Artificial Sequence
  chemically treated genomic DNA (Homo sapiens) CpG-island No: 16998
atatacaccaacaaataccgaataatattccgctaactttataccttacgaaaacctatcgccattttaatcataataaccgaacgcgactattacttaaaaatcaactaaaacgtcacccaaaaaatacccgacttaaacgcaatctaacgactattccgattaaaataaaaaacgttacgacaattaaaaaactacttacccaacaaaaaacgtacgatactacgccgaccctacgttatcgcaataaaatcgaacaaaataccctacgactaacacaattacctatcgccaaaacgcaactaaacgatacgacgtttactacatcgccgaaaaaaaaaacgctacgaaccgatctactacaacgaacaatctacctaaaacaataatcccaaacaaatacgctatacaataaaacacgccaacaaaacacattaaacgcgacaaaacgccgtcaataatttaacgtacttcttaccgaacaactaaacgatcgaatcctaacactacaa

SEQ ID NO: 16999 - DNA, 512 bp, Artificial Sequence
  chemically treated genomic DNA (Homo sapiens) CpG-island No: 16999
atatatattagtaggtgtcggataatatttcgttgattttatattttgcggaagtttatcgttattttggttatgatgatcgggcgcggttgttgtttgaggattaattgaaacgttatttaggagatgttcgatttgagcgtagtttggcggttatttcggttgaagtgaaaagcgttacgatagttgaagaattgtttgtttagtaaaaagcgtgcgatgttgcgtcgattttgcgttgtcgtagtgaagtcgggtagaatgttttgcggttggtatagttatttgtcgttagagcgtaattgaacgatgcgacgtttgttgtatcgtcggaaggaaaaacgttgcgaatcgatttgttgtaacgggtaatttatttgaaataatggttttaggtagatacgttatataatgaagtacgttagtagaatatattaagcgcggtagaacgtcgttagtggtttgacgtgttttttgtcgggtagttggacgatcggattttggtattgtaa

SEQ ID NO: 17000 - DNA, 512 bp, Artificial Sequence
  chemically treated genomic DNA (Homo sapiens) CpG-island No: 17000
ttacaataccaaaatccgatcgtccaactacccgacaaaaaacacgtcaaaccactaacgacgttctaccgcgcttaatatattctactaacgtacttcattatataacgtatctacctaaaaccattatttcaaataaattacccgttacaacaaatcgattcgcaacgtttttccttccgacgatacaacaaacgtcgcatcgttcaattacgctctaacgacaaataactataccaaccgcaaaacattctacccgacttcactacgacaacgcaaaatcgacgcaacatcgcacgctttttactaaacaaacaattcttcaactatcgtaacgcttttcacttcaaccgaaataaccgccaaactacgctcaaatcgaacatctcctaaataacgtttcaattaatcctcaaacaacaaccgcgcccgatcatcataaccaaaataacgataaacttccgcaaaatataaaatcaacgaaatattatccgacacctactaatatatat

SEQ ID NO: 17001 - DNA, 1089 bp, Artificial Sequence
  chemically treated genomic DNA (Homo sapiens) CpG-island No: 17001
tttatatgataatgcgttagtaaaaattgttggaacgattcgggcgattagcgatcggcgagatcgtgtagttcggcgtcgattagggtgattgcgtcgttaaattttattacgtcgttgtacggttggcggcgatattgcggcgagcgtcgcgttttggcgtaggtcgtatattcgtagttttatgtcggaacgttttgtgcgtcgtcggtgtcggtgagcgtgagggttaggtttatgttatagcgttttggtgaagcggaagtggttttgttcgtagttttcgcgtagatagaaacggtgcgcgtcgtggcgttttacgttggtcgaaagttcggttatttcggtttcggtttggcgggtttttttttttgtttacgttagtaatttattgtcgacgtttagatcgcgcgtttgcggtattattattaatttttgaatttcgtcgatttagttgatatgatgtagatgaaattgtaaatgtaggtcgattatgtcgataatttcgttattaagtagcgttagatggtagcgtatgtttgggtcgcgtagattggcgttaaaatttacgcgaaacgcgtggtggttaaatttcgtttgttttagtttataaattagcgcgtaatcgcgtcggtgtcgtattgcgtggtcgggcgaagtttataagtaggtatggtgtttttttttttgatggattagcgttagtagcgtgtcgatcgattggcgtaggttgtcgttattgttgagcgtatggtaattttgtggagtatagcgggcggcgcgcgttaggcgggcgttaattttattggcgtttttacggttacggttttttaggcgttggcggaggattttcggcgaaatttgtaaatagacgggtagtagcgtcgattgatagcgcgttcgcgtttgcggtagatgggcgcgtgagtcgttgattagtacgtcgaattcggcgtgtagttagagattaatttcgacgtcgacgttataatatagatcgttagcgtgttagtttataggttaatagattttgtttcgcgcgggtaaaaatttttgttcgtttaggtcgatatggtttttattttcggg

SEQ ID NO: 17002 - DNA, 1089 bp, Artificial Sequence
  chemically treated genomic DNA (Homo sapiens) CpG-island No: 17002
cccgaaaataaaaaccatatcgacctaaacgaacaaaaatttttacccgcgcgaaacaaaatctattaacctataaactaacacgctaacgatctatattataacgtcgacgtcgaaattaatctctaactacacgccgaattcgacgtactaatcaacgactcacgcgcccatctaccgcaaacgcgaacgcgctatcaatcgacgctactacccgtctatttacaaatttcgccgaaaatcctccgccaacgcctaaaaaaccgtaaccgtaaaaacgccaataaaattaacgcccgcctaacgcgcgccgcccgctatactccacaaaattaccatacgctcaacaataacgacaacctacgccaatcgatcgacacgctactaacgctaatccatcaaaaaaaaaaacaccatacctacttataaacttcgcccgaccacgcaatacgacaccgacgcgattacgcgctaatttataaactaaaacaaacgaaatttaaccaccacgcgtttcgcgtaaattttaacgccaatctacgcgacccaaacatacgctaccatctaacgctacttaataacgaaattatcgacataatcgacctacatttacaatttcatctacatcatatcaactaaatcgacgaaattcaaaaattaataataataccgcaaacgcgcgatctaaacgtcgacaataaattactaacgtaaacaaaaaaaaaaacccgccaaaccgaaaccgaaataaccgaactttcgaccaacgtaaaacgccacgacgcgcaccgtttctatctacgcgaaaactacgaacaaaaccacttccgcttcaccaaaacgctataacataaacctaaccctcacgctcaccgacaccgacgacgcacaaaacgttccgacataaaactacgaatatacgacctacgccaaaacgcgacgctcgccgcaatatcgccgccaaccgtacaacgacgtaataaaatttaacgacgcaatcaccctaatcgacgccgaactacacgatctcgccgatcgctaatcgcccgaatcgttccaacaatttttactaacgcattatcatataaa

SEQ ID NO: 17003 - DNA, 1089 bp, Artificial Sequence
  chemically treated genomic DNA (Homo sapiens) CpG-island No: 17003
ttcggaagtgaaaattatatcggtttgagcgagtaggagtttttattcgcgcggggtaaaatttgttggtttgtaagttggtacgttaacggtttgtattatggcgtcggcgtcgagattgatttttggttgtacgtcggattcgacgtgttggttaacggtttacgcgtttatttgtcgtaggcgcgggcgcgttattaatcggcgttgttgttcgtttgtttataggtttcgtcggagatttttcgttagcgtttggaaaatcgtggtcgtgaaaacgttagtgaaattaacgttcgtttggcgcgcgtcgttcgttatattttataggattgttatacgtttaataatgacggtagtttgcgttagtcggtcgatacgttgttgacgttgatttattagaaggagaaatattatgtttgtttgtgagtttcgttcggttacgtagtacgatatcgacgcggttacgcgttgatttgtgagttaaaataggcggagtttgattattacgcgtttcgcgtgggttttaacgttaatttgcgcgatttaaatatgcgttattatttggcgttgtttgatggcgaagttgtcggtatgatcggtttgtatttgtagttttatttgtattatgttaattggatcggcgaaatttaggagttggtggtaatgtcgtaggcgcgcggtttgaacgtcggtagtaagttattggcgtgggtagaagaagaagttcgttaggtcggggtcgaaatgatcgaattttcgattaacgtgaagcgttacgacgcgtatcgtttttatttgcgcgaaggttacgagtagagttattttcgttttattaaggcgttgtaatatgagtttgatttttacgtttatcggtatcggcggcgtatagggcgtttcggtatggggttgcgagtgtgcggtttgcgttagagcgcggcgttcgtcgtagtatcgtcgttaatcgtgtagcggcgtagtgaagtttaacgacgtaattattttgatcgacgtcgggttgtacgatttcgtcgatcgttggtcgttcggatcgttttagtagtttttgttgacgtattattatatgga

SEQ ID NO: 17004 - DNA, 1089 bp, Artificial Sequence
  chemically treated genomic DNA (Homo sapiens) CpG-island No: 17004
tccatataataatacgtcaacaaaaactactaaaacgatccgaacgaccaacgatcgacgaaatcgtacaacccgacgtcgatcaaaataattacgtcgttaaacttcactacgccgctacacgattaacgacgatactacgacgaacgccgcgctctaacgcaaaccgcacactcgcaaccccataccgaaacgccctatacgccgccgataccgataaacgtaaaaatcaaactcatattacaacgccttaataaaacgaaaataactctactcgtaaccttcgcgcaaataaaaacgatacgcgtcgtaacgcttcacgttaatcgaaaattcgatcatttcgaccccgacctaacgaacttcttcttctacccacgccaataacttactaccgacgttcaaaccgcgcgcctacgacattaccaccaactcctaaatttcgccgatccaattaacataatacaaataaaactacaaatacaaaccgatcataccgacaacttcgccatcaaacaacgccaaataataacgcatatttaaatcgcgcaaattaacgttaaaacccacgcgaaacgcgtaataatcaaactccgcctattttaactcacaaatcaacgcgtaaccgcgtcgatatcgtactacgtaaccgaacgaaactcacaaacaaacataatatttctccttctaataaatcaacgtcaacaacgtatcgaccgactaacgcaaactaccgtcattattaaacgtataacaatcctataaaatataacgaacgacgcgcgccaaacgaacgttaatttcactaacgttttcacgaccacgattttccaaacgctaacgaaaaatctccgacgaaacctataaacaaacgaacaacaacgccgattaataacgcgcccgcgcctacgacaaataaacgcgtaaaccgttaaccaacacgtcgaatccgacgtacaaccaaaaatcaatctcgacgccgacgccataatacaaaccgttaacgtaccaacttacaaaccaacaaattttaccccgcgcgaataaaaactcctactcgctcaaaccgatataattttcacttccgaa

SEQ ID NO: 17005 - DNA, 617 bp, Artificial Sequence
  chemically treated genomic DNA (Homo sapiens) CpG-island No: 17005
agcggttaatcggcgattaatcgttattgattgcgttaaggttcgttagaatagtatttggaaggatttttgtttgatgagcgcgaaagtaaatttcggtattgttatcgttatcggtatttggttacgtaatcggtttattacgattttttatattttttgtacgtagtcgaaaggttgatcggcggattcggtagtaataattcggtttttagttttttttagttcgggagtaggttgtttaggacgtaatagtcgtcgggtatcgcgttaattagcgaattttagaatttacgaggagtattcgaaaattcgttttgtttgtttttttaggcgtcggtaaacgaatttaacgaataggattcggaatgtttggtacgtcgggtttgaagtttgatttaggtagtttttttcgaagtagtatagcgtatttagtagatttagcggtaaaacgacgattagaatcggttagaagaaggcgtatcgtcgttatagtattcggattttgaatttttatagagcggcgtagaaaattatgtaatttttcgatttattcgatagagaaagatcggatttgaaagggaagtagggggaatggtaagtagaaggaagattat

SEQ ID NO: 17006 - DNA, 617 bp, Artificial Sequence
  chemically treated genomic DNA (Homo sapiens) CpG-island No: 17006
ataatcttccttctacttaccattccccctacttccctttcaaatccgatctttctctatcgaataaatcgaaaaattacataattttctacgccgctctataaaaattcaaaatccgaatactataacgacgatacgccttcttctaaccgattctaatcgtcgttttaccgctaaatctactaaatacgctatactacttcgaaaaaaactacctaaatcaaacttcaaacccgacgtaccaaacattccgaatcctattcgttaaattcgtttaccgacgcctaaaaaaacaaacaaaacgaattttcgaatactcctcgtaaattctaaaattcgctaattaacgcgatacccgacgactattacgtcctaaacaacctactcccgaactaaaaaaaactaaaaaccgaattattactaccgaatccgccgatcaacctttcgactacgtacaaaaaatataaaaaatcgtaataaaccgattacgtaaccaaataccgataacgataacaataccgaaatttactttcgcgctcatcaaacaaaaatccttccaaatactattctaacgaaccttaacgcaatcaataacgattaatcgccgattaaccgct

SEQ ID NO: 17007 - DNA, 617 bp, Artificial Sequence
  chemically treated genomic DNA (Homo sapiens) CpG-island No: 17007
gtaattttttttttgtttgttattttttttgttttttttttaggttcggtttttttttgtcgggtaaatcggggagttatatagttttttacgtcgttttgtaggaatttaaggttcgagtgttgtagcgacggtacgtttttttttagtcggttttgatcgtcgttttgtcgttggatttgttggatgcgttgtattatttcggagagaattgtttgaattaggttttaaattcggcgtgttaggtatttcgagttttgttcgttgagttcgtttatcgacgtttgagggaataggtaaaacgggttttcgggtatttttcgtaggttttggaattcgttggttagcgcgatgttcgacggttgttacgttttaaatagtttattttcgggttgaaagaagttaggagtcgggttgttgttatcgaattcgtcggttagtttttcgattgcgtgtaggaagtataggaaatcgtgataagtcggttgcgtggttagatatcggtagcggtgataatatcgaggtttattttcgcgtttattaggtaggaatttttttagatattgttttagcgggttttagcgtaattagtagcggttaatcgtcgattggtcgtt

SEQ ID NO: 17008 - DNA, 617 bp, Artificial Sequence
  chemically treated genomic DNA (Homo sapiens) CpG-island No: 17008
aacgaccaatcgacgattaaccgctactaattacgctaaaacccgctaaaacaatatctaaaaaaattcctacctaataaacgcgaaaataaacctcgatattatcaccgctaccgatatctaaccacgcaaccgacttatcacgatttcctatacttcctacacgcaatcgaaaaactaaccgacgaattcgataacaacaacccgactcctaacttctttcaacccgaaaataaactatttaaaacgtaacaaccgtcgaacatcgcgctaaccaacgaattccaaaacctacgaaaaatacccgaaaacccgttttacctattccctcaaacgtcgataaacgaactcaacgaacaaaactcgaaatacctaacacgccgaatttaaaacctaattcaaacaattctctccgaaataatacaacgcatccaacaaatccaacgacaaaacgacgatcaaaaccgactaaaaaaaaacgtaccgtcgctacaacactcgaaccttaaattcctacaaaacgacgtaaaaaactatataactccccgatttacccgacaaaaaaaaaccgaacctaaaaaaaaaacaaaaaaaataacaaacaaaaaaaaaattac

SEQ ID NO: 17009 - DNA, 1504 bp, Artificial Sequence
  chemically treated genomic DNA (Homo sapiens) CpG-island No: 17009
gtggtgcgggtgtagacgtagaataagtggggacgttataggtgtggacgtggtgcgggtgtagacgtagaataagtggggacgttataggtgtggacgtggtgcgggtgtagacgtagaataagtggggacgttataggtgtggacgtggtgcgggtgtagacgtagaataagtggggacgttataggtgtggacgtggtgcgggtgtagacgtagaataagtggggacgttataggtgtggacgtggtgcgggtgtagacgtagaataagtggggacgttataggtgtggacgtggtgcgggtgtagacgtagaataagtggggacgttataggtgtggacgtggtgcgggtgtagacgtagaataagtggggacgttataggtgtggacgtggtgcgggtgtagacgtagaataagtggggacgttataggtgtggacgtggtgcgggtgtagacgtagaataagtggggacgttataggtgtggacgtggtgcgggtgtagacgtagaataagtggggacgttataggtgtggacgtggtgcgggtgtagacgtagaataagtggggacgttataggtgtggacgtggtgcgggtgtagacgtagaataagtggggacgttataggtgtggacgtggtgcgggtgtagacgtagaataagtggggacgttataggtgtggacgtggtgcgggtgtagacgtagaataagtggggacgttataggtgtggacgtggtgcgggtgtagacgtagaataagtggggacgttataggtgtggacgtggtgcgggtgtagacgtagaataagtggggacgttataggtgtggacgtggtgcgggtgtagacgtagaataagtggggacgttataggtgtggacgtggtgcgggtgtagacgtagaataagtggggacgttataggtgtggatataatgcgggtgtagacgtagaataagtggggacgttataggtgtggacgtggtgcgggtgtagacgtagaataagtggggacgttataggtgtggatataatgcgggtgtagacgtagaataagtggggacgttataggtgtggacgtggtgcgggtgtagacgtagaataagtggggacgttataggtgtggacgtggtgcgggtgtagacgtagaataagtggggacgttataggtgtggacgtggtgcgggtgtagacgtagaataagtggggacgttataggtgtggacgtggtgcgggtgtagacgtagaataagtggggacgttataggtgtggacgtggtgcgggtgtagacgtagaataagtggggacgttataggtgtggacgtggtgcgggtgtagacgtagaataagtggggacgttataggtgtggacgtggtgcgggtgtagacgtagaataagtggggacgttataggtgtggacgtggtgcgggtgtagacgtagaataagtggggacgttataggtgtggacgtggtgcgggtgtagacgtagaaaaaaaaaaaaa

SEQ ID NO: 17010 - DNA, 1504 bp, Artificial Sequence
  chemically treated genomic DNA (Homo sapiens) CpG-island No: 17010
tttttttttttttctacgtctacacccgcaccacgtccacacctataacgtccccacttattctacgtctacacccgcaccacgtccacacctataacgtccccacttattctacgtctacacccgcaccacgtccacacctataacgtccccacttattctacgtctacacccgcaccacgtccacacctataacgtccccacttattctacgtctacacccgcaccacgtccacacctataacgtccccacttattctacgtctacacccgcaccacgtccacacctataacgtccccacttattctacgtctacacccgcaccacgtccacacctataacgtccccacttattctacgtctacacccgcaccacgtccacacctataacgtccccacttattctacgtctacacccgcaccacgtccacacctataacgtccccacttattctacgtctacacccgcattatatccacacctataacgtccccacttattctacgtctacacccgcaccacgtccacacctataacgtccccacttattctacgtctacacccgcattatatccacacctataacgtccccacttattctacgtctacacccgcaccacgtccacacctataacgtccccacttattctacgtctacacccgcaccacgtccacacctataacgtccccacttattctacgtctacacccgcaccacgtccacacctataacgtccccacttattctacgtctacacccgcaccacgtccacacctataacgtccccacttattctacgtctacacccgcaccacgtccacacctataacgtccccacttattctacgtctacacccgcaccacgtccacacctataacgtccccacttattctacgtctacacccgcaccacgtccacacctataacgtccccacttattctacgtctacacccgcaccacgtccacacctataacgtccccacttattctacgtctacacccgcaccacgtccacacctataacgtccccacttattctacgtctacacccgcaccacgtccacacctataacgtccccacttattctacgtctacacccgcaccacgtccacacctataacgtccccacttattctacgtctacacccgcaccacgtccacacctataacgtccccacttattctacgtctacacccgcaccacgtccacacctataacgtccccacttattctacgtctacacccgcaccacgtccacacctataacgtccccacttattctacgtctacacccgcaccacgtccacacctataacgtccccacttattctacgtctacacccgcaccacgtccacacctataacgtccccacttattctacgtctacacccgcaccacgtccacacctataacgtccccacttattctacgtctacacccgcaccacgtccacacctataacgtccccacttattctacgtctacacccgcaccac

SEQ ID NO: 17011 - DNA, 1504 bp, Artificial Sequence
  chemically treated genomic DNA (Homo sapiens) CpG-island No: 17011
tttttttttttttttacgtttatattcgtattacgtttatatttgtgacgtttttatttgttttacgtttatattcgtattacgtttatatttgtgacgtttttatttgttttacgtttatattcgtattacgtttatatttgtgacgtttttatttgttttacgtttatattcgtattacgtttatatttgtgacgtttttatttgttttacgtttatattcgtattacgtttatatttgtgacgtttttatttgttttacgtttatattcgtattacgtttatatttgtgacgtttttatttgttttacgtttatattcgtattacgtttatatttgtgacgtttttatttgttttacgtttatattcgtattacgtttatatttgtgacgtttttatttgttttacgtttatattcgtattacgtttatatttgtgacgtttttatttgttttacgtttatattcgtattgtgtttatatttgtgacgtttttatttgttttacgtttatattcgtattacgtttatatttgtgacgtttttatttgttttacgtttatattcgtattgtgtttatatttgtgacgtttttatttgttttacgtttatattcgtattacgtttatatttgtgacgtttttatttgttttacgtttatattcgtattacgtttatatttgtgacgtttttatttgttttacgtttatattcgtattacgtttatatttgtgacgtttttatttgttttacgtttatattcgtattacgtttatatttgtgacgtttttatttgttttacgtttatattcgtattacgtttatatttgtgacgtttttatttgttttacgtttatattcgtattacgtttatatttgtgacgtttttatttgttttacgtttatattcgtattacgtttatatttgtgacgtttttatttgttttacgtttatattcgtattacgtttatatttgtgacgtttttatttgttttacgtttatattcgtattacgtttatatttgtgacgtttttatttgttttacgtttatattcgtattacgtttatatttgtgacgtttttatttgttttacgtttatattcgtattacgtttatatttgtgacgtttttatttgttttacgtttatattcgtattacgtttatatttgtgacgtttttatttgttttacgtttatattcgtattacgtttatatttgtgacgtttttatttgttttacgtttatattcgtattacgtttatatttgtgacgtttttatttgttttacgtttatattcgtattacgtttatatttgtgacgtttttatttgttttacgtttatattcgtattacgtttatatttgtgacgtttttatttgttttacgtttatattcgtattacgtttatatttgtgacgtttttatttgttttacgtttatattcgtattacgtttatatttgtgacgtttttatttgttttacgtttatattcgtattat

SEQ ID NO: 17012 - DNA, 1504 bp, Artificial Sequence
  chemically treated genomic DNA (Homo sapiens) CpG-island No: 17012
ataatacgaatataaacgtaaaacaaataaaaacgtcacaaatataaacgtaatacgaatataaacgtaaaacaaataaaaacgtcacaaatataaacgtaatacgaatataaacgtaaaacaaataaaaacgtcacaaatataaacgtaatacgaatataaacgtaaaacaaataaaaacgtcacaaatataaacgtaatacgaatataaacgtaaaacaaataaaaacgtcacaaatataaacgtaatacgaatataaacgtaaaacaaataaaaacgtcacaaatataaacgtaatacgaatataaacgtaaaacaaataaaaacgtcacaaatataaacgtaatacgaatataaacgtaaaacaaataaaaacgtcacaaatataaacgtaatacgaatataaacgtaaaacaaataaaaacgtcacaaatataaacgtaatacgaatataaacgtaaaacaaataaaaacgtcacaaatataaacgtaatacgaatataaacgtaaaacaaataaaaacgtcacaaatataaacgtaatacgaatataaacgtaaaacaaataaaaacgtcacaaatataaacgtaatacgaatataaacgtaaaacaaataaaaacgtcacaaatataaacgtaatacgaatataaacgtaaaacaaataaaaacgtcacaaatataaacgtaatacgaatataaacgtaaaacaaataaaaacgtcacaaatataaacgtaatacgaatataaacgtaaaacaaataaaaacgtcacaaatataaacgtaatacgaatataaacgtaaaacaaataaaaacgtcacaaatataaacgtaatacgaatataaacgtaaaacaaataaaaacgtcacaaatataaacgtaatacgaatataaacgtaaaacaaataaaaacgtcacaaatataaacacaatacgaatataaacgtaaaacaaataaaaacgtcacaaatataaacgtaatacgaatataaacgtaaaacaaataaaaacgtcacaaatataaacacaatacgaatataaacgtaaaacaaataaaaacgtcacaaatataaacgtaatacgaatataaacgtaaaacaaataaaaacgtcacaaatataaacgtaatacgaatataaacgtaaaacaaataaaaacgtcacaaatataaacgtaatacgaatataaacgtaaaacaaataaaaacgtcacaaatataaacgtaatacgaatataaacgtaaaacaaataaaaacgtcacaaatataaacgtaatacgaatataaacgtaaaacaaataaaaacgtcacaaatataaacgtaatacgaatataaacgtaaaacaaataaaaacgtcacaaatataaacgtaatacgaatataaacgtaaaacaaataaaaacgtcacaaatataaacgtaatacgaatataaacgtaaaacaaataaaaacgtcacaaatataaacgtaatacgaatataaacgtaaaaaaaaaaaaaaa

SEQ ID NO: 17013 - DNA, 607 bp, Artificial Sequence
  chemically treated genomic DNA (Homo sapiens) CpG-island No: 17013
tttattcgggtttcggttgttgatagttgcgagttcgcgcgtgtatattcgtttaacgttgggacgttatagttagggttaatgggtagagcgggattcgaggtttcgttttcgttttgtggcgttacggggacgtcgggggcgcgcgggttgtagggtcgcgtaggttttcgtttttagagtttggtttttcgcggttgttcgtttcgcgcgttttttttgttcgggttttttcgttgtcgtcgtcgttgttatattatggttttcgttattaggtagtttatgcgtttcgtgtttttttcgtttatcgtttcggtttcggttaagaagataatcgttaagtacgtgacggttatcggcggcgggttgatgggcgtcggtattgtttaggtgagcggttttttttgtacggtgtttacgcgtttggttcgttattttgaggtggaagttttggcgcgatcggtcgcgaggggttgtattcgttcgatattagggagtttttatttcgcgtttttcgggtgtagttgaaatatttcgcgtttgggtttgtgagggtttaagttttattttttttaaaatttagggttttgggtcgatttttagtttt

SEQ ID NO: 17014 - DNA, 607 bp, Artificial Sequence
  chemically treated genomic DNA (Homo sapiens) CpG-island No: 17014
aaaactaaaaatcgacccaaaaccctaaattttaaaaaaaataaaacttaaaccctcacaaacccaaacgcgaaatatttcaactacacccgaaaaacgcgaaataaaaactccctaatatcgaacgaatacaacccctcgcgaccgatcgcgccaaaacttccacctcaaaataacgaaccaaacgcgtaaacaccgtacaaaaaaaaccgctcacctaaacaataccgacgcccatcaacccgccgccgataaccgtcacgtacttaacgattatcttcttaaccgaaaccgaaacgataaacgaaaaaaacacgaaacgcataaactacctaataacgaaaaccataatataacaacgacgacgacaacgaaaaaacccgaacaaaaaaaacgcgcgaaacgaacaaccgcgaaaaaccaaactctaaaaacgaaaacctacgcgaccctacaacccgcgcgcccccgacgtccccgtaacgccacaaaacgaaaacgaaacctcgaatcccgctctacccattaaccctaactataacgtcccaacgttaaacgaatatacacgcgcgaactcgcaactatcaacaaccgaaacccgaataaa

SEQ ID NO: 17015 - DNA, 607 bp, Artificial Sequence
  chemically treated genomic DNA (Homo sapiens) CpG-island No: 17015
gaagttgaggatcggtttagaattttgaattttgaggggagtgagatttgggtttttataggtttagacgcgagatattttaattatattcgggaggcgcggggtgaaaattttttggtgtcgggcgggtgtagtttttcgcggtcggtcgcgttagagtttttattttagggtggcgggttaagcgcgtgggtatcgtgtagggagggtcgtttatttgggtaatgtcggcgtttattagttcgtcgtcgatgatcgttacgtgtttgacgattatttttttggtcgaggtcgaggcggtggacgaggaggatacggaacgtatgaattgtttggtgacgaaggttatggtgtggtagcggcggcgatagcgaggagattcgggtagggaagacgcgcgaggcgggtagtcgcggaaagttagattttgggggcggggatttacgcggttttgtagttcgcgcgttttcggcgttttcgtgacgttataaggcgggggcggggtttcgagtttcgttttgtttattggttttggttgtaacgttttagcgttgagcgggtatatacgcgcgggttcgtagttgttagtagtcggagttcgagtgag

SEQ ID NO: 17016 - DNA, 607 bp, Artificial Sequence
  chemically treated genomic DNA (Homo sapiens) CpG-island No: 17016
ctcactcgaactccgactactaacaactacgaacccgcgcgtatatacccgctcaacgctaaaacgttacaaccaaaaccaataaacaaaacgaaactcgaaaccccgcccccgccttataacgtcacgaaaacgccgaaaacgcgcgaactacaaaaccgcgtaaatccccgcccccaaaatctaactttccgcgactacccgcctcgcgcgtcttccctacccgaatctcctcgctatcgccgccgctaccacaccataaccttcgtcaccaaacaattcatacgttccgtatcctcctcgtccaccgcctcgacctcgaccaaaaaaataatcgtcaaacacgtaacgatcatcgacgacgaactaataaacgccgacattacccaaataaacgaccctccctacacgatacccacgcgcttaacccgccaccctaaaataaaaactctaacgcgaccgaccgcgaaaaactacacccgcccgacaccaaaaaattttcaccccgcgcctcccgaatataattaaaatatctcgcgtctaaacctataaaaacccaaatctcactcccctcaaaattcaaaattctaaaccgatcctcaacttc

SEQ ID NO: 17017 - DNA, 597 bp, Artificial Sequence
  chemically treated genomic DNA (Homo sapiens) CpG-island No: 17017
ttatttttcggcggttatgttttacgatcgcgcgacggcggcgtgtcggtttttgcgttacggcgcgttggtgacgttatgggcgttgcgtttcgttggtgcgtgcgtcgtgggtcgtgacgtatttgtattcgttgttgtatacgttgttttttttcgcgtttttttatttttattttattttcgtgcgtttttttttttgcgatatgacggtgatgttgagtttggcgatttcggatacgttcgtcgcggagacggttatttttttcgagggtttggtcgtggtgttggtttcgttgtttttcgtgtttttttttttacgcgcgtattttggtcgcggtgttcggtttgcgcgcggtcggcgtcgcgttttttttatttgcggggtttatttagtggcggtggcggtggcggtggcgtttttttttggttttgtttttttcgtgtatttttcgtcgtcgtttgtttatttagttcgttacgatcgtttggttagcgtggtttacgttgttattacgtcgattttgaatttttttattaatagttttcgtaataaagaggttaagggcgttttgaaaagggggtttagatggaggg

SEQ ID NO: 17018 - DNA, 597 bp, Artificial Sequence
  chemically treated genomic DNA (Homo sapiens) CpG-island No: 17018
ccctccatctaaacccccttttcaaaacgcccttaacctctttattacgaaaactattaataaaaaaattcaaaatcgacgtaataacaacgtaaaccacgctaaccaaacgatcgtaacgaactaaataaacaaacgacgacgaaaaatacacgaaaaaaacaaaaccaaaaaaaaacgccaccgccaccgccaccgccactaaataaaccccgcaaataaaaaaaacgcgacgccgaccgcgcgcaaaccgaacaccgcgaccaaaatacgcgcgtaaaaaaaaaaacacgaaaaacaacgaaaccaacaccacgaccaaaccctcgaaaaaaataaccgtctccgcgacgaacgtatccgaaatcgccaaactcaacatcaccgtcatatcgcaaaaaaaaaaacgcacgaaaataaaataaaaataaaaaaacgcgaaaaaaaacaacgtatacaacaacgaatacaaatacgtcacgacccacgacgcacgcaccaacgaaacgcaacgcccataacgtcaccaacgcgccgtaacgcaaaaaccgacacgccgccgtcgcgcgatcgtaaaacataaccgccgaaaaataa

SEQ ID NO: 17019 - DNA, 597 bp, Artificial Sequence
  chemically treated genomic DNA (Homo sapiens) CpG-island No: 17019
ttttttatttgagttttttttttagggcgtttttgatttttttgttgcgaaggttgttgatgaaagggtttaaggtcggcgtgatgatagcgtagattacgttggttaggcggtcgtagcgggttgagtaggtagacgacggcgggaaatatacggagaggatagagttaaagaaaagcgttatcgttatcgttatcgttattaggtgggtttcgtaggtggagaaggcgcggcgtcggtcgcgcgtaagtcgagtatcgcgattaggatgcgcgcgtaggaaaaggaatacgaggagtagcggggttaatattacggttaggttttcggagaagatggtcgttttcgcggcggacgtgttcgaggtcgttaagtttagtattatcgttatgtcgtaaaagaaggggcgtacgggggtggggtaggggtaggagagcgcggagaggagtagcgtgtgtagtagcgagtgtaggtgcgttacggtttacgacgtacgtattagcgaggcgtagcgtttatggcgttattagcgcgtcgtagcgtaggggtcggtacgtcgtcgtcgcgcggtcgtaggatatggtcgtcgggaggtag

SEQ ID NO: 17020 - DNA, 597 bp, Artificial Sequence
  chemically treated genomic DNA (Homo sapiens) CpG-island No: 17020
ctacctcccgacgaccatatcctacgaccgcgcgacgacgacgtaccgacccctacgctacgacgcgctaataacgccataaacgctacgcctcgctaatacgtacgtcgtaaaccgtaacgcacctacactcgctactacacacgctactcctctccgcgctctcctacccctaccccacccccgtacgccccttcttttacgacataacgataatactaaacttaacgacctcgaacacgtccgccgcgaaaacgaccatcttctccgaaaacctaaccgtaatattaaccccgctactcctcgtattccttttcctacgcgcgcatcctaatcgcgatactcgacttacgcgcgaccgacgccgcgccttctccacctacgaaacccacctaataacgataacgataacgataacgcttttctttaactctatcctctccgtatatttcccgccgtcgtctacctactcaacccgctacgaccgcctaaccaacgtaatctacgctatcatcacgccgaccttaaaccctttcatcaacaaccttcgcaacaaaaaaatcaaaaacgccctaaaaaaaaaactcaaataaaaaa

SEQ ID NO: 17021 - DNA, 574 bp, Artificial Sequence
  chemically treated genomic DNA (Homo sapiens) CpG-island No: 17021
tgttgggcgcgtggtttttttttttcgtttgttcgtggttttttcgggcggtcggtgcgcgggggtgttgcgtgtcgcgtgtgttgcgcgtttcgcgttttgtttgcggttgtgcgtgtcggtcgtcgtcggtcgacgtgggcgcgttgttcgttttcgttttcgtttttcgtcgtttttcgttcgttcgtcgtcgttttttgttgtggtttcgtttttttttgtttttcgtgtcgggcggtcgtcgtcgcggcggcgtggtttcgggggcgtgggcgtcgtgttttgggtgcggcgtttgttgcggttgcgttttttgttacgttttgttttcgtcgggtttgtgttcggcggtcgttttttttcgtttcggtcgtttagttgcgttatttttttttggatcgcgtttattttttttttttgtgtgttggtttgggggttttttggcgcggtttgtgttttcgttgggcgtcggtgttttttttgttttttggtttgtggtcggggttttttggattcgtttcggttcggggattgggttgtttcgtgtttgaagggtgttgttttttttggt

SEQ ID NO: 17022 - DNA, 574 bp, Artificial Sequence
  chemically treated genomic DNA (Homo sapiens) CpG-island No: 17022
accaaaaaaaacaacacccttcaaacacgaaacaacccaatccccgaaccgaaacgaatccaaaaaaccccgaccacaaaccaaaaaacaaaaaaaacaccgacgcccaacgaaaacacaaaccgcgccaaaaaacccccaaaccaacacacaaaaaaaaaaaataaacgcgatccaaaaaaaaataacgcaactaaacgaccgaaacgaaaaaaaacgaccgccgaacacaaacccgacgaaaacaaaacgtaacaaaaaacgcaaccgcaacaaacgccgcacccaaaacacgacgcccacgcccccgaaaccacgccgccgcgacgacgaccgcccgacacgaaaaacaaaaaaaaacgaaaccacaacaaaaaacgacgacgaacgaacgaaaaacgacgaaaaacgaaaacgaaaacgaacaacgcgcccacgtcgaccgacgacgaccgacacgcacaaccgcaaacaaaacgcgaaacgcgcaacacacgcgacacgcaacacccccgcgcaccgaccgcccgaaaaaaccacgaacaaacgaaaaaaaaaaaccacgcgcccaaca

SEQ ID NO: 17023 - DNA, 574 bp, Artificial Sequence
  chemically treated genomic DNA (Homo sapiens) CpG-island No: 17023
attaagaggagtagtattttttagatacgaagtaatttaattttcgaatcgagacgaatttagaagatttcgattatagattaaggaatagagagggtatcggcgtttaacgagagtataaatcgcgttaagagatttttaaattaatatataagagagagaaataggcgcgatttaaagaggagtggcgtagttgagcggtcggagcgaagggaggcggtcgtcggatatagattcgacgggagtagagcgtgatagagaacgtaatcgtagtagacgtcgtatttagaatacggcgtttacgttttcgaagttacgtcgtcgcgacgacgatcgttcggtacgggggatagggaagaacgaggttataatagaagacggcggcgagcgagcggggggcggcggagggcggaagcgggagcgggtaacgcgtttacgtcggtcgacgacggtcggtacgtatagtcgtaggtagagcgcgaggcgcgtaatatacgcggtacgtagtattttcgcgtatcgatcgttcgaagaagttacgaataagcggggggagagaattacgcgtttagta

SEQ ID NO: 17024 - DNA, 574 bp, Artificial Sequence
  chemically treated genomic DNA (Homo sapiens) CpG-island No: 17024
tactaaacgcgtaattctctccccccgcttattcgtaacttcttcgaacgatcgatacgcgaaaatactacgtaccgcgtatattacgcgcctcgcgctctacctacgactatacgtaccgaccgtcgtcgaccgacgtaaacgcgttacccgctcccgcttccgccctccgccgccccccgctcgctcgccgccgtcttctattataacctcgttcttccctatcccccgtaccgaacgatcgtcgtcgcgacgacgtaacttcgaaaacgtaaacgccgtattctaaatacgacgtctactacgattacgttctctatcacgctctactcccgtcgaatctatatccgacgaccgcctcccttcgctccgaccgctcaactacgccactcctctttaaatcgcgcctatttctctctcttatatattaatttaaaaatctcttaacgcgatttatactctcgttaaacgccgataccctctctattccttaatctataatcgaaatcttctaaattcgtctcgattcgaaaattaaattacttcgtatctaaaaaatactactcctcttaat

SEQ ID NO: 17025 - DNA, 1625 bp, Artificial Sequence
  chemically treated genomic DNA (Homo sapiens) CpG-island No: 17025
gcggaagatggtcggcggcgtggacggttttatcgggatttcgtttttcgattatagtagcgatattttgagtgggttgaacgagtagcggacgtagggtttgttgtgcgacgtggtgattttggtggagggtcgcgagttttttacgtatcgttcggtgttggtcgtttgtagttagtattttaagaagttgtttacgtcgggcgtcgtggtggattagtagaacgtgtacgagatcgatttcgttagcgtcgaggcgtttatcgcgtttatggatttcgtttatacggttacgtttatcgttagtatagttaacgtgggtgatatttttagcgtcgttcgtttgttggagattttcgtcgtgagttacgtgtgcgtcgattttttggatcggtagattttggcggtcgacgcgggcgtcgacgtcgggtagttggattttgtagattaaattgattagcgtaatttttttcgcgttaaggagtatttcgagtttttttagagtaattttatgaatagtttgtttttcgcggtcgtcgtcgtcgttgttagtttttcgtggttcgtttttggggcgttcgatgatgatttggatgttattaaggaggtcgtggtcgtcgttgtggtcgtcgtggtcgcgggcgattgtaacggtttagatttttatgggtcgggtttttcggtcgagcggttttcgacgggggacggggacgagggcgatagtaattcgggtttgtggttagagcgggatgaggacgtttttatcgggggttttttttcgtcgtcggtggtttcgtcggtcgttacgtagaacggttattacggtcgcggcggagaggaggaggtcgtttcgttgtcggaggcggttttcgagtcgggcgatttttcgggttttttgtcgggagcggtcgagggcgaggacggggacgggttcgacgtggacgggttggcggttagtacgttgttgtagtagatgatgttatcggtgggtcgggcgggggtcgcggcgggggatagcgacgaggagtcgcgggtcgacgataagggcgttatggattattatttgaagtattttagcggcgtttacgacggcgacgtttattcggtttggtcgtagaaggtggagaagaagattcgagttaaggttttttagaagtgttttatttgcgagaaggttatttagggcgtcggtaagttgtcgcgatatattcgtatttatacgggcgagaagttttacgagtgtaatatttgtaaggttcgttttattaggtgagttgttcgtcgcgggggaggcgtcgttttgttttttgttttagtattcgtcgtttacgatttttttcgtttttttttttgtatcgtacgtatatatgtacgtagacgtatatatatacgtacgtgtatatagatacgtatacgtatagatatatgtacgttatttatatatttatatatacgtagatatatatatacgtatttgtatatatatacgtatatgtatatatatgtatagacgcgtatgttacgtatatatgtatatatatagacgtatatacgtatacgtatattatatatatatatagatatgttatatagatatatgtagatatagatgtatattatatata

SEQ ID NO: 17026 - DNA, 1625 bp, Artificial Sequence
  chemically treated genomic DNA (Homo sapiens) CpG-island No: 17026
tatatataatatacatctatatctacatatatctatataacatatctatatatatatataatatacgtatacgtatatacgtctatatatatacatatatacgtaacatacgcgtctatacatatatatacatatacgtatatatatacaaatacgtatatatatatctacgtatatataaatatataaataacgtacatatatctatacgtatacgtatctatatacacgtacgtatatatatacgtctacgtacatatatacgtacgatacaaaaaaaaaaacgaaaaaaatcgtaaacgacgaatactaaaacaaaaaacaaaacgacgcctcccccgcgacgaacaactcacctaataaaacgaaccttacaaatattacactcgtaaaacttctcgcccgtataaatacgaatatatcgcgacaacttaccgacgccctaaataaccttctcgcaaataaaacacttctaaaaaaccttaactcgaatcttcttctccaccttctacgaccaaaccgaataaacgtcgccgtcgtaaacgccgctaaaatacttcaaataataatccataacgcccttatcgtcgacccgcgactcctcgtcgctatcccccgccgcgacccccgcccgacccaccgataacatcatctactacaacaacgtactaaccgccaacccgtccacgtcgaacccgtccccgtcctcgccctcgaccgctcccgacaaaaaacccgaaaaatcgcccgactcgaaaaccgcctccgacaacgaaacgacctcctcctctccgccgcgaccgtaataaccgttctacgtaacgaccgacgaaaccaccgacgacgaaaaaaaacccccgataaaaacgtcctcatcccgctctaaccacaaacccgaattactatcgccctcgtccccgtcccccgtcgaaaaccgctcgaccgaaaaacccgacccataaaaatctaaaccgttacaatcgcccgcgaccacgacgaccacaacgacgaccacgacctccttaataacatccaaatcatcatcgaacgccccaaaaacgaaccacgaaaaactaacaacgacgacgacgaccgcgaaaaacaaactattcataaaattactctaaaaaaactcgaaatactccttaacgcgaaaaaaattacgctaatcaatttaatctacaaaatccaactacccgacgtcgacgcccgcgtcgaccgccaaaatctaccgatccaaaaaatcgacgcacacgtaactcacgacgaaaatctccaacaaacgaacgacgctaaaaatatcacccacgttaactatactaacgataaacgtaaccgtataaacgaaatccataaacgcgataaacgcctcgacgctaacgaaatcgatctcgtacacgttctactaatccaccacgacgcccgacgtaaacaacttcttaaaatactaactacaaacgaccaacaccgaacgatacgtaaaaaactcgcgaccctccaccaaaatcaccacgtcgcacaacaaaccctacgtccgctactcgttcaacccactcaaaatatcgctactataatcgaaaaacgaaatcccgataaaaccgtccacgccgccgaccatcttccgc

SEQ ID NO: 17027 - DNA, 1625 bp, Artificial Sequence
  chemically treated genomic DNA (Homo sapiens) CpG-island No: 17027
tgtatgtggtgtgtatttgtgtttgtatgtgtttgtgtagtatgtttgtatgtgtatgtggtgtgcgtgtgcgtgtgtgcgtttgtgtgtgtgtatgtgtacgtggtatacgcgtttgtgtatgtgtgtgtatgtgcgtatatatgtgtaagtgcgtgtatgtgtgtttgcgtgtgtgtggatgtgtaggtgacgtgtatgtgtttgtgcgtgtacgtgtttgtgtgtacgtgcgtgtatgtgtgcgtttgcgtgtatgtgtgcgtgcggtgtagggagagaggcgggaggggtcgtgagcggcggatgttggggtagagagtaggacggcgtttttttcgcggcgggtagtttatttggtgaagcggattttgtagatgttgtattcgtagggtttttcgttcgtgtgggtgcggatgtgtcgcggtagtttgtcggcgttttggatgattttttcgtagatggggtatttttggaaggttttggttcggatttttttttttattttttgcgattaggtcgggtagacgtcgtcgtcgtgggcgtcgttgaagtattttaggtagtagtttatgacgtttttgtcgtcggttcgcgatttttcgtcgttgtttttcgtcgcggttttcgttcggtttatcgatgatattatttgttgtagtagcgtgttggtcgttagttcgtttacgtcgggttcgttttcgttttcgttttcggtcgttttcgataggaagttcggagagtcgttcggttcgggggtcgttttcgatagcgaggcggttttttttttttcgtcgcggtcgtagtggtcgttttgcgtggcggtcggcggggttatcggcggcggaaagagattttcggtgggggcgtttttatttcgttttggttatagattcgggttgttgtcgttttcgttttcgtttttcgtcgggggtcgttcggtcggggggttcggtttatagaagtttaagtcgttgtagtcgttcgcggttacggcggttatagcggcggttacggtttttttggtggtatttaggttattatcggacgttttaaaggcggattacgggaagttggtagcggcggcggcggtcgcggggggtaggttgtttatggggttgttttggaagaattcgaggtattttttggcgcggaggaggttgcgttgattaatttgatttataaggtttagttgttcggcgtcggcgttcgcgtcggtcgttaggatttgtcggtttaggaggtcggcgtatacgtggtttacggcggggatttttagtaggcgggcggcgttgaggatgttatttacgttggttgtgttgacggtgagcgtggtcgtgtaggcgaagtttatgagcgcggtgagcgtttcggcgttgacgaagtcgatttcgtatacgttttgttggtttattacggcgttcgacgtgaatagttttttgaagtattggttgtaggcggttagtatcgagcggtgcgtggggaattcgcggttttttattaggattattacgtcgtatagtaggttttgcgttcgttgttcgtttagtttatttaggatgtcgttgttgtggtcggggaacgggatttcgatggggtcgtttacgtcgtcggttatttttcgt

SEQ ID NO: 17028 - DNA, 1625 bp, Artificial Sequence
  chemically treated genomic DNA (Homo sapiens) CpG-island No: 17028
acgaaaaataaccgacgacgtaaacgaccccatcgaaatcccgttccccgaccacaacaacgacatcctaaataaactaaacgaacaacgaacgcaaaacctactatacgacgtaataatcctaataaaaaaccgcgaattccccacgcaccgctcgatactaaccgcctacaaccaatacttcaaaaaactattcacgtcgaacgccgtaataaaccaacaaaacgtatacgaaatcgacttcgtcaacgccgaaacgctcaccgcgctcataaacttcgcctacacgaccacgctcaccgtcaacacaaccaacgtaaataacatcctcaacgccgcccgcctactaaaaatccccgccgtaaaccacgtatacgccgacctcctaaaccgacaaatcctaacgaccgacgcgaacgccgacgccgaacaactaaaccttataaatcaaattaatcaacgcaacctcctccgcgccaaaaaatacctcgaattcttccaaaacaaccccataaacaacctaccccccgcgaccgccgccgccgctaccaacttcccgtaatccgcctttaaaacgtccgataataacctaaataccaccaaaaaaaccgtaaccgccgctataaccgccgtaaccgcgaacgactacaacgacttaaacttctataaaccgaaccccccgaccgaacgacccccgacgaaaaacgaaaacgaaaacgacaacaacccgaatctataaccaaaacgaaataaaaacgcccccaccgaaaatctctttccgccgccgataaccccgccgaccgccacgcaaaacgaccactacgaccgcgacgaaaaaaaaaaaaccgcctcgctatcgaaaacgacccccgaaccgaacgactctccgaacttcctatcgaaaacgaccgaaaacgaaaacgaaaacgaacccgacgtaaacgaactaacgaccaacacgctactacaacaaataatatcatcgataaaccgaacgaaaaccgcgacgaaaaacaacgacgaaaaatcgcgaaccgacgacaaaaacgtcataaactactacctaaaatacttcaacgacgcccacgacgacgacgtctacccgacctaatcgcaaaaaataaaaaaaaaaatccgaaccaaaaccttccaaaaataccccatctacgaaaaaatcatccaaaacgccgacaaactaccgcgacacatccgcacccacacgaacgaaaaaccctacgaatacaacatctacaaaatccgcttcaccaaataaactacccgccgcgaaaaaaacgccgtcctactctctaccccaacatccgccgctcacgacccctcccgcctctctccctacaccgcacgcacacatacacgcaaacgcacacatacacgcacgtacacacaaacacgtacacgcacaaacacatacacgtcacctacacatccacacacacgcaaacacacatacacgcacttacacatatatacgcacatacacacacatacacaaacgcgtataccacgtacacatacacacacacaaacgcacacacgcacacgcacaccacatacacatacaaacatactacacaaacacatacaaacacaaatacacaccacataca

SEQ ID NO: 17029 - DNA, 536 bp, Artificial Sequence
  chemically treated genomic DNA (Homo sapiens) CpG-island No: 17029
atcgttttcgagatgtttagtttttattttagagcgtcgcgtcggcgtcgaatgggttaacgggcggggggatacgttttcgtgcgtttgcgcggcgttttttcgtttcgttttcgtagcgtagttatatgattcgtttaatcggcgttcgtttataaaaagttgagtgttgacgttagcgttttttttcgtcgtcgtcgtcgttattttcggcgcgattcgtttttttcggttttatttgggagaatttatcgttattcgttattatggtgagtaattttgtttcgttggtgtttcggagcggcggcggggttttcgcggggtttacgttgtttagtttgggacgttggggtttttcgtgttaggaggagacgtagcggcggcggggtcggaggattcggggttggggaagcggtcgtcgttatgtttgtgcgtcgcgttgtttatcgagtttttttttcgttttcgagggcgttataattttgtttagatttggttggagttgggttgttagcggggatgggggtggggaatga

SEQ ID NO: 17030 - DNA, 536 bp, Artificial Sequence
  chemically treated genomic DNA (Homo sapiens) CpG-island No: 17030
tcattccccacccccatccccgctaacaacccaactccaaccaaatctaaacaaaattataacgccctcgaaaacgaaaaaaaaactcgataaacaacgcgacgcacaaacataacgacgaccgcttccccaaccccgaatcctccgaccccgccgccgctacgtctcctcctaacacgaaaaaccccaacgtcccaaactaaacaacgtaaaccccgcgaaaaccccgccgccgctccgaaacaccaacgaaacaaaattactcaccataataacgaataacgataaattctcccaaataaaaccgaaaaaaacgaatcgcgccgaaaataacgacgacgacgacgaaaaaaaacgctaacgtcaacactcaactttttataaacgaacgccgattaaacgaatcatataactacgctacgaaaacgaaacgaaaaaacgccgcgcaaacgcacgaaaacgtatccccccgcccgttaacccattcgacgccgacgcgacgctctaaaataaaaactaaacatctcgaaaacgat

SEQ ID NO: 17031 - DNA, 536 bp, Artificial Sequence
  chemically treated genomic DNA (Homo sapiens) CpG-island No: 17031
ttattttttatttttattttcgttaataatttagttttaattaggtttgggtaaggttatggcgttttcggaaacggagaaagggttcggtgaatagcgcggcgtatagatatggcggcggtcgtttttttagtttcgggtttttcggtttcgtcgtcgttacgtttttttttggtacggggggttttagcgttttaggttaggtagcgtaggtttcgcggaggtttcgtcgtcgtttcggggtattagcgaggtagggttatttattatggtggcggatggcggtggatttttttaggtagaatcgaaagaagcgagtcgcgtcgaggatggcggcgacgacggcggaagagaacgttgacgttaatatttagttttttataggcggacgtcggttgggcgggttatgtgattgcgttgcgaaggcggggcgaagggacgtcgcgtaagcgtacggaggcgtgttttttcgttcgttaatttattcggcgtcggcgcggcgttttagaatagaagttgggtatttcgggggcggt

SEQ ID NO: 17032 - DNA, 536 bp, Artificial Sequence
  chemically treated genomic DNA (Homo sapiens) CpG-island No: 17032
accgcccccgaaatacccaacttctattctaaaacgccgcgccgacgccgaataaattaacgaacgaaaaaacacgcctccgtacgcttacgcgacgtcccttcgccccgccttcgcaacgcaatcacataacccgcccaaccgacgtccgcctataaaaaactaaatattaacgtcaacgttctcttccgccgtcgtcgccgccatcctcgacgcgactcgcttctttcgattctacctaaaaaaatccaccgccatccgccaccataataaataaccctacctcgctaataccccgaaacgacgacgaaacctccgcgaaacctacgctacctaacctaaaacgctaaaaccccccgtaccaaaaaaaaacgtaacgacgacgaaaccgaaaaacccgaaactaaaaaaacgaccgccgccatatctatacgccgcgctattcaccgaaccctttctccgtttccgaaaacgccataaccttacccaaacctaattaaaactaaattattaacgaaaataaaaataaaaaataa

SEQ ID NO: 17033 - DNA, 558 bp, Artificial Sequence
  chemically treated genomic DNA (Homo sapiens) CpG-island No: 17033
tgcgtcgttcggggttcggtttgttgtgacgcgtgtcgtcgttcgttttttggtatcggtagttttcgtggtgtttaggtatgtttttgttcgggcgtcgtaggatgggttgttggggtgtatcgttgtgtcgttttgcgtatggtggtggttcgtatgtgtatttttggtgttattgcgatgcgtgattatttgtattcgcgcgcgatttttttggtcgttttgtgggtacgtttattgtcgcgtcgttagtattgttgttggcgtatttcggatatgtcgtgatttttatgagaaggattgtgttcgggttttggcgatgttttggcgatggtaggagttagtagtagggttcgtcggagtttgtgtcgggttgtgcgaggtggtattcgggtatcgcgagttgttttggggtgtggaaggtgtgtgggtgtgtggatggtgtgttggcgttattgtagtttgtcgtggggtgttcggagatgttttgcgggtgtgagacgtttttttttggttgtcgtgagttgtgggtatttagtattatatagagtttaggat

SEQ ID NO: 17034 - DNA, 558 bp, Artificial Sequence
  chemically treated genomic DNA (Homo sapiens) CpG-island No: 17034
atcctaaactctatataatactaaatacccacaactcacgacaaccaaaaaaaaacgtctcacacccgcaaaacatctccgaacaccccacgacaaactacaataacgccaacacaccatccacacacccacacaccttccacaccccaaaacaactcgcgatacccgaataccacctcgcacaacccgacacaaactccgacgaaccctactactaactcctaccatcgccaaaacatcgccaaaacccgaacacaatccttctcataaaaatcacgacatatccgaaatacgccaacaacaatactaacgacgcgacaataaacgtacccacaaaacgaccaaaaaaatcgcgcgcgaatacaaataatcacgcatcgcaataacaccaaaaatacacatacgaaccaccaccatacgcaaaacgacacaacgatacaccccaacaacccatcctacgacgcccgaacaaaaacatacctaaacaccacgaaaactaccgataccaaaaaacgaacgacgacacgcgtcacaacaaaccgaaccccgaacgacgca

SEQ ID NO: 17035 - DNA, 558 bp, Artificial Sequence
  chemically treated genomic DNA (Homo sapiens) CpG-island No: 17035
attttgggttttgtgtggtgttaaatatttatagtttacgataattaagagagagcgttttatattcgtaggatattttcgagtattttacgataaattgtagtagcgttagtatattatttatatatttatatattttttatattttaagataattcgcgatattcgggtattatttcgtatagttcgatataggtttcgacgaattttattattagtttttattatcgttagagtatcgttaagattcggatataattttttttatgagggttacgatatgttcgagatgcgttaataatagtgttagcggcgcggtaatgagcgtatttatagagcgattaggagggtcgcgcgcgagtgtagatgattacgtatcgtagtaatattaaggatatatatacggattattattatacgtaaagcggtataacgatgtattttaataatttattttgcgacgttcgggtaagagtatgtttggatattacgaggattatcggtgttaaaaagcgggcgacgatacgcgttataataagtcgggtttcgagcgacgta

SEQ ID NO: 17036 - DNA, 558 bp, Artificial Sequence
  chemically treated genomic DNA (Homo sapiens) CpG-island No: 17036
tacgtcgctcgaaacccgacttattataacgcgtatcgtcgcccgctttttaacaccgataatcctcgtaatatccaaacatactcttacccgaacgtcgcaaaataaattattaaaatacatcgttataccgctttacgtataataataatccgtatatatatccttaatattactacgatacgtaatcatctacactcgcgcgcgaccctcctaatcgctctataaatacgctcattaccgcgccgctaacactattattaacgcatctcgaacatatcgtaaccctcataaaaaaaattatatccgaatcttaacgatactctaacgataataaaaactaataataaaattcgtcgaaacctatatcgaactatacgaaataatacccgaatatcgcgaattatcttaaaatataaaaaatatataaatatataaataatatactaacgctactacaatttatcgtaaaatactcgaaaatatcctacgaatataaaacgctctctcttaattatcgtaaactataaatatttaacaccacacaaaacccaaaat

SEQ ID NO: 17037 - DNA, 694 bp, Artificial Sequence
  chemically treated genomic DNA (Homo sapiens) CpG-island No: 17037
ttttcgcgttgtgtcgttttcgggttttgttggggtcgtgttgttggggggtggtttggtgtcgtcgttttttgtttcgcgttttcggtcggtgttcgtttttgtttcggttttttcgttttttttttcgtttcgtttttgggtcgtgttttttcggttttgttttttcgtgtgttttttcgttttttgggtcgtgtttttttgtttgttttttttttcggtgcgtgtttcggttttgtttttgtttgcgtttcgtttttcgttttttgttgtgtttttttttttttttttttttttttttttttttttttttttttcgttcgtttttttttttcgcgtttttgttgtttttttgttttggttttttttgtttttgttttcgtgcgggcgcgcggttttcgtttttcgttttgttcgtttttcgttcgttttgcggttttcgtcgttgttgtttcgttcgtgtttttttttttgtttttttttttttttggtttcggttttcgtttttttttttttttttttttcgttcggtttcgtttttttttttttcgttttttttttttttcgttcgcgtttttttttgcgtttttttcgttcgttcgttgtttttcggtttttttttttttttttttttgcgtttgtttttttttttttttttttttttttttcggcgtttatgttgtgggggttattg

SEQ ID NO: 17038 - DNA, 694 bp, Artificial Sequence
  chemically treated genomic DNA (Homo sapiens) CpG-island No: 17038
caataacccccacaacataaacgccgaaaaaaaaaaaaaaaaaaaaaaaaaaacaaacgcaaaaaaaaaaaaaaaaaaaaaccgaaaaacaacgaacgaacgaaaaaaacgcaaaaaaaaacgcgaacgaaaaaaaaaaaaaacgaaaaaaaaaaaaacgaaaccgaacgaaaaaaaaaaaaaaaaaaaaacgaaaaccgaaaccaaaaaaaaaaaaaaacaaaaaaaaaaacacgaacgaaacaacaacgacgaaaaccgcaaaacgaacgaaaaacgaacaaaacgaaaaacgaaaaccgcgcgcccgcacgaaaacaaaaacaaaaaaaaccaaaacaaaaaaacaacaaaaacgcgaaaaaaaaaaacgaacgaaaaaaaaaaaaaaaaaaaaaaaaaaaaaaaaaaaaaaaaaaacacaacaaaaaacgaaaaacgaaacgcaaacaaaaacaaaaccgaaacacgcaccgaaaaaaaaaacaaacaaaaaaacacgacccaaaaaacgaaaaaacacacgaaaaaacaaaaccgaaaaaacacgacccaaaaacgaaacgaaaaaaaaaacgaaaaaaccgaaacaaaaacgaacaccgaccgaaaacgcgaaacaaaaaacgacgacaccaaaccaccccccaacaacacgaccccaacaaaacccgaaaacgacacaacgcgaaaa

SEQ ID NO: 17039 - DNA, 694 bp, Artificial Sequence
  chemically treated genomic DNA (Homo sapiens) CpG-island No: 17039
tagtaatttttataatatggacgtcgaggaaaagagagaaagaaagaaaaaagtagacgtagggggaggggaggaggggggtcggggggtaacgggcgggcgagagggacgtagggaggggcgcgggcgagggaggaagggggcgagaggggggggggcggaatcgagcgagagagagagaaaggaaggagcgagggtcggggttaggaggaagagagggtaaggagagagatacgagcgagatagtagcgacgaagatcgtaagacggacgaggagcggataggacggagggcggaggtcgcgcgttcgtacgaagataagggtagggagaattaggataaaaaagtaataagggcgcggagaggaaaagcgaacggagagggaaggaagaagaggaaggagggaaaggggggggaagatataataaggggcggaaaacgaaacgtaaataagggtagaatcgaaatacgtatcgaaagaaaagataggtaaaaggatacgatttagaggacgaggaagtatacgaaaaaatagagtcggagaggtacgatttaaaggcgaagcggagaaaggaacggggggatcgaggtaaaagcggatatcgatcgaaggcgcggaataaagagcggcgatattaagttattttttaataatacgattttaataaggttcgagggcgatatagcgcgagga

SEQ ID NO: 17040 - DNA, 694 bp, Artificial Sequence
  chemically treated genomic DNA (Homo sapiens) CpG-island No: 17040
tcctcgcgctatatcgccctcgaaccttattaaaatcgtattattaaaaaataacttaatatcgccgctctttattccgcgccttcgatcgatatccgcttttacctcgatccccccgttcctttctccgcttcgcctttaaatcgtacctctccgactctattttttcgtatacttcctcgtcctctaaatcgtatccttttacctatcttttctttcgatacgtatttcgattctacccttatttacgtttcgttttccgccccttattatatcttcccccccctttccctccttcctcttcttccttccctctccgttcgcttttcctctccgcgcccttattacttttttatcctaattctccctacccttatcttcgtacgaacgcgcgacctccgccctccgtcctatccgctcctcgtccgtcttacgatcttcgtcgctactatctcgctcgtatctctctccttaccctctcttcctcctaaccccgaccctcgctccttcctttctctctctctcgctcgattccgcccccccccctctcgcccccttcctccctcgcccgcgcccctccctacgtccctctcgcccgcccgttaccccccgacccccctcctcccctccccctacgtctacttttttctttctttctctcttttcctcgacgtccatattataaaaattacta

SEQ ID NO: 17041 - DNA, 545 bp, Artificial Sequence
  chemically treated genomic DNA (Homo sapiens) CpG-island No: 17041
  unsure (81, 181, 195, 360, 393, 407, 523)
gttttcgtattgtttttgagaagcgatattgatgagaatgggcgataacgtgaagttatttgtgaagtttcgtcgaagagnaaggggagtatcggggtgagttatttaacgaaggagtgcgatttattagttatcgcgtcgtatgcgagttaagtgtaatcgtagatcgatcgttgttagngataggggtcgaantttgagagcgtataggcgggggtaatttgcgcgacgtagtacgggtaaggagtgtttagttggatcgtgaggtaggtaagtggtatagatgtcggtgaggtttaagtggcgtatttttttcgttcgaaggtatgtaatagcgtatgtaaaaggggtgaagtgtgncgtgcgcgtttcgtgcgtaaaatatgtatttanttacgagcgaaggnattgtttcgcgtatacgtgttgtatcgtgtatcgtcgtgacgttatgcggtgtgttttgtgttatatttggatggagtgaatgtattgggttttcgttaatattaaggcgatattntgtgattagacgtgtattagat

SEQ ID NO: 17042 - DNA, 545 bp, Artificial Sequence
  chemically treated genomic DNA (Homo sapiens) CpG-island No: 17042
  unsure (23, 139, 153, 186, 351, 365, 465)
atctaatacacgtctaatcacanaatatcgccttaatattaacgaaaacccaatacattcactccatccaaatataacacaaaacacaccgcataacgtcacgacgatacacgatacaacacgtatacgcgaaacaatnccttcgctcgtaantaaatacatattttacgcacgaaacgcgcacgncacacttcaccccttttacatacgctattacataccttcgaacgaaaaaaatacgccacttaaacctcaccgacatctataccacttacctacctcacgatccaactaaacactccttacccgtactacgtcgcgcaaattacccccgcctatacgctctcaaanttcgacccctatcnctaacaacgatcgatctacgattacacttaactcgcatacgacgcgataactaataaatcgcactccttcgttaaataactcaccccgatactccccttnctcttcgacgaaacttcacaaataacttcacgttatcgcccattctcatcaatatcgcttctcaaaaacaatacgaaaac

SEQ ID NO: 17043 - DNA, 545 bp, Artificial Sequence
  chemically treated genomic DNA (Homo sapiens) CpG-island No: 17043
  unsure (23, 139, 153, 186, 351, 365, 465)
gtttgatgtacgtttggttatangatgtcgttttagtgttggcggaagtttaatgtatttattttatttaggtatgatataggatatatcgtatgacgttacgacggtatacgatgtagtacgtgtacgcggaataatnttttcgttcgtggntaggtatatgttttacgtacggaacgcgtacgntatattttattttttttgtatgcgttgttgtatattttcgagcgagaagagtacgttatttggattttatcgatatttatgttatttgtttattttacgatttaattgaatattttttgttcgtgttacgtcgcgtaggttattttcgtttatacgtttttaggnttcgatttttattnttgataacggtcgatttacggttatatttgattcgtatacggcgcgatgattagtgggtcgtattttttcgttgggtgatttatttcggtgttttttttntttttcgacggagttttataggtagttttacgttgtcgtttatttttattagtatcgttttttaggaatagtacgagagt

SEQ ID NO: 17044 - DNA, 545 bp, Artificial Sequence
  chemically treated genomic DNA (Homo sapiens) CpG-island No: 17044
  unsure (81, 181, 195, 360, 393, 407, 523)
actctcgtactattcctaaaaaacgatactaataaaaataaacgacaacgtaaaactacctataaaactccgtcgaaaaanaaaaaaaacaccgaaataaatcacccaacgaaaaaatacgacccactaatcatcgcgccgtatacgaatcaaatataaccgtaaatcgaccgttatcaanaataaaaatcgaancctaaaaacgtataaacgaaaataacctacgcgacgtaacacgaacaaaaaatattcaattaaatcgtaaaataaacaaataacataaatatcgataaaatccaaataacgtactcttctcgctcgaaaatatacaacaacgcatacaaaaaaaataaaatatancgtacgcgttccgtacgtaaaacatatacctanccacgaacgaaaanattattccgcgtacacgtactacatcgtataccgtcgtaacgtcatacgatatatcctatatcatacctaaataaaataaatacattaaacttccgccaacactaaaacgacatcntataaccaaacgtacatcaaac

SEQ ID NO: 17045 - DNA, 848 bp, Artificial Sequence
  chemically treated genomic DNA (Homo sapiens) CpG-island No: 17045
ggtatacgcgtcgtggtaaggtaagcgagggcgttcggtttcggtatcgtttcgcgtcggttttcgtttttttttttttcgaaaggcggttttgtgttgttgcgtaggcgcggcggttgggggtggggtttatcgcggttttcgatttcgttatcgcgagaagtcggttcgcgattttgtggtcgttttttttttttttttgtttttcggattcgggttgcggcgttagtttttttcgggtttcggtagcggtagcggttcgttcgttttagttttagcgtttttcggttattttcggtttaggttcgtagcgtcgttcgttttcggttagtttcgacgtcgtgtttgggtcgcggtcgtagttcgggttcgcgtaggcgtcgatcgttttcggttcgttttttatgggtttcgagtatagaaggtagtcgattcgttcgtcgcgttcgacggagttttagatgcgtggttcggacgaagtcggtgttgtcggcgtttattattaatttattatcgcgaggttatttttattagcgagggcgttttcgagtgagtgggtagggttagtcggagtttggggtgtacgggtaggagttttcggggaaggacggggcgaggggacgggttcgcgagagttcgagtaggggttacgggagacgggtagtgtgtacgggtaggggttttcgaggggaggatagggtagggattttcgggagcggtaggggtttcgggagcgggtagggttttcgagacggcgaaggttacggggtaggggggggtttttgagtagtgagattgggcgaggggaggtttttgtggtggaaaagatggggtgtggggtttttgaa

SEQ ID NO: 17046 - DNA, 848 bp, Artificial Sequence
  chemically treated genomic DNA (Homo sapiens) CpG-island No: 17046
ttcaaaaaccccacaccccatcttttccaccacaaaaacctcccctcgcccaatctcactactcaaaaacccccccctaccccgtaaccttcgccgtctcgaaaaccctacccgctcccgaaacccctaccgctcccgaaaatccctaccctatcctcccctcgaaaacccctacccgtacacactacccgtctcccgtaacccctactcgaactctcgcgaacccgtcccctcgccccgtccttccccgaaaactcctacccgtacaccccaaactccgactaaccctacccactcactcgaaaacgccctcgctaataaaaataacctcgcgataataaattaataataaacgccgacaacaccgacttcgtccgaaccacgcatctaaaactccgtcgaacgcgacgaacgaatcgactaccttctatactcgaaacccataaaaaacgaaccgaaaacgatcgacgcctacgcgaacccgaactacgaccgcgacccaaacacgacgtcgaaactaaccgaaaacgaacgacgctacgaacctaaaccgaaaataaccgaaaaacgctaaaactaaaacgaacgaaccgctaccgctaccgaaacccgaaaaaaactaacgccgcaacccgaatccgaaaaacaaaaaaaaaaaaaaaacgaccacaaaatcgcgaaccgacttctcgcgataacgaaatcgaaaaccgcgataaaccccacccccaaccgccgcgcctacgcaacaacacaaaaccgcctttcgaaaaaaaaaaaaacgaaaaccgacgcgaaacgataccgaaaccgaacgccctcgcttaccttaccacgacgcgtatacc

SEQ ID NO: 17047 - DNA, 848 bp, Artificial Sequence
  chemically treated genomic DNA (Homo sapiens) CpG-island No: 17047
tttaggaattttatattttattttttttattataaggattttttttcgtttaattttattgtttaaagatttttttttgtttcgtgattttcgtcgtttcgagggttttgttcgttttcgaggtttttgtcgttttcgagggtttttgttttgtttttttttcgagaatttttgttcgtgtatattattcgtttttcgtgatttttgttcggattttcgcgaattcgttttttcgtttcgttttttttcgagggtttttgttcgtgtattttaagtttcggttgattttgtttatttattcggaggcgttttcgttggtagggatggtttcgcgatggtaggttgatggtgagcgtcggtagtatcggtttcgttcgggttacgtatttggggtttcgtcgggcgcggcgggcgggtcggttgttttttatgttcggggtttatagggggcgggtcgggagcggtcggcgtttacgcgagttcgggttgcggtcgcggtttaggtacggcgtcggggttggtcgagggcgggcggcgttgcgggtttgggtcgagggtagtcgaggggcgttggggttgaggcgagcgagtcgttatcgttgtcgaggttcgaagaaggttgacgtcgtagttcgagttcgagaggtagggggaggggaggggcggttataagatcgcggatcggtttttcgcgataacgggatcgggagtcgcgatggattttatttttagtcgtcgcgtttgcgtagtagtataaggtcgtttttcggaggggaaaggggcggagatcgacgcgaggcggtgtcgggatcgggcgttttcgtttgttttattacggcgcgtgtgtt

SEQ ID NO: 17048 - DNA, 848 bp, Artificial Sequence
  chemically treated genomic DNA (Homo sapiens) CpG-island No: 17048
aacacacgcgccgtaataaaacaaacgaaaacgcccgatcccgacaccgcctcgcgtcgatctccgcccctttcccctccgaaaaacgaccttatactactacgcaaacgcgacgactaaaaataaaatccatcgcgactcccgatcccgttatcgcgaaaaaccgatccgcgatcttataaccgcccctcccctccccctacctctcgaactcgaactacgacgtcaaccttcttcgaacctcgacaacgataacgactcgctcgcctcaaccccaacgcccctcgactaccctcgacccaaacccgcaacgccgcccgccctcgaccaaccccgacgccgtacctaaaccgcgaccgcaacccgaactcgcgtaaacgccgaccgctcccgacccgccccctataaaccccgaacataaaaaacaaccgacccgcccgccgcgcccgacgaaaccccaaatacgtaacccgaacgaaaccgatactaccgacgctcaccatcaacctaccatcgcgaaaccatccctaccaacgaaaacgcctccgaataaataaacaaaatcaaccgaaacttaaaatacacgaacaaaaaccctcgaaaaaaaacgaaacgaaaaaacgaattcgcgaaaatccgaacaaaaatcacgaaaaacgaataatatacacgaacaaaaattctcgaaaaaaaaacaaaacaaaaaccctcgaaaacgacaaaaacctcgaaaacgaacaaaaccctcgaaacgacgaaaatcacgaaacaaaaaaaaatctttaaacaataaaattaaacgaaaaaaaatccttataataaaaaaaataaaatataaaattcctaaa

SEQ ID NO: 17049 - DNA, 574 bp, Artificial Sequence
  chemically treated genomic DNA (Homo sapiens) CpG-island No: 17049
tgtcgagtttacgttttatttgtatattaggattcggatgtgtagcgcgcggggtgtttgggttcgtggagtttgtatcgcgttgcgttgtaaggcgttttattgtacgtattggcggtcgttgcggcggagtaattattttttgttcgacgtcgtcgggagtttggagacgtatttggcggtcgtcgcgcgtaggaagttacggtatttagttgtattgttgtcgttgttatcgttttttttcgttttttttttttagaggaaatcgagtattcgtttttatttgcgtagggttagtattattttaaggagttaggcgtcgtcggggtaggcgtggtcgtcgcgagcgggggggggggcgttggtgtaggacggatttgattggtcggaggttcgggcggtggtcgcgcgcgtttgcgtaggaggtagtagcgcgtatcggcggcgggaggagcgcgcgcgggtgttaattggttcgggcggcggtttcgttcgcgagtggtgagcggttacgtgacgcgacggttgggggttttcggcgcgggggacgttggtgattaagatggcggcggag

SEQ ID NO: 17050 - DNA, 574 bp, Artificial Sequence
  chemically treated genomic DNA (Homo sapiens) CpG-island No: 17050
ctccgccgccatcttaatcaccaacgtcccccgcgccgaaaacccccaaccgtcgcgtcacgtaaccgctcaccactcgcgaacgaaaccgccgcccgaaccaattaacacccgcgcgcgctcctcccgccgccgatacgcgctactacctcctacgcaaacgcgcgcgaccaccgcccgaacctccgaccaatcaaatccgtcctacaccaacgcccccccccccgctcgcgacgaccacgcctaccccgacgacgcctaactccttaaaataatactaaccctacgcaaataaaaacgaatactcgatttcctctaaaaaaaaaaaacgaaaaaaaacgataacaacgacaacaatacaactaaataccgtaacttcctacgcgcgacgaccgccaaatacgtctccaaactcccgacgacgtcgaacaaaaaataattactccgccgcaacgaccgccaatacgtacaataaaacgccttacaacgcaacgcgatacaaactccacgaacccaaacaccccgcgcgctacacatccgaatcctaatatacaaataaaacgtaaactcgaca

SEQ ID NO: 17051 - DNA, 574 bp, Artificial Sequence
  chemically treated genomic DNA (Homo sapiens) CpG-island No: 17051
tttcgtcgttattttggttattagcgtttttcgcgtcgggagtttttagtcgtcgcgttacgtgatcgtttattattcgcgggcggggtcgtcgttcgggttaattagtattcgcgcgcgtttttttcgtcgtcggtgcgcgttgttgttttttgcgtaggcgcgcgcggttatcgttcgggttttcggttaattaggttcgttttatattagcgttttttttttcgttcgcggcgattacgtttatttcggcggcgtttgattttttaaagtggtattagttttgcgtaggtggggacgggtgttcggttttttttagggagggaaggcgagagggggcggtggtagcgataataatgtagttaggtgtcgtggttttttgcgcgcggcggtcgttaggtgcgtttttagattttcggcggcgtcgggtaggggatggttgtttcgtcgtaacggtcgttagtgcgtatagtgaggcgttttgtagcgtagcgcggtgtaggttttacgggtttagatatttcgcgcgttgtatattcgggttttggtgtgtagatggggcgtgggttcggta

SEQ ID NO: 17052 - DNA, 574 bp, Artificial Sequence
  chemically treated genomic DNA (Homo sapiens) CpG-island No: 17052
taccgaacccacgccccatctacacaccaaaacccgaatatacaacgcgcgaaatatctaaacccgtaaaacctacaccgcgctacgctacaaaacgcctcactatacgcactaacgaccgttacgacgaaacaaccatcccctacccgacgccgccgaaaatctaaaaacgcacctaacgaccgccgcgcgcaaaaaaccacgacacctaactacattattatcgctaccaccgccccctctcgccttccctccctaaaaaaaaccgaacacccgtccccacctacgcaaaactaataccactttaaaaaatcaaacgccgccgaaataaacgtaatcgccgcgaacgaaaaaaaaaacgctaatataaaacgaacctaattaaccgaaaacccgaacgataaccgcgcgcgcctacgcaaaaaacaacaacgcgcaccgacgacgaaaaaaacgcgcgcgaatactaattaacccgaacgacgaccccgcccgcgaataataaacgatcacgtaacgcgacgactaaaaactcccgacgcgaaaaacgctaataaccaaaataacgacgaaa

SEQ ID NO: 17053 - DNA, 548 bp, Artificial Sequence
  chemically treated genomic DNA (Homo sapiens) CpG-island No: 17053
gtaatgtggttcgcgtaggttcggagtttattaatttgttatttagtgtacgtattaggtatttgttgtatatgttattcgttgggttatttgtagcggtttagcgcgagatagttatagtgtcgtacgtgtagggtttatattcgttgggagttagtttcgagagtgtgtaattatttgtgttatcgcgtatgtttgtaatttcgttgatggttcgttgggtggtgataatatgttgtatgtcgtgtatttgagttaattagtcgagttacgtagagtatatagtaggcgtgatgttattttagtggtagtttacggttcgtaagtgttttatttttgagcggtgatattaacgttttgttagatatagttatgttcgtaaggtataagtgtggttgttttttgtcgtaagttttcggtcgttcgtagagatagtggaatcgtttcgcgagcgttagttgtaatttttttgtattgattatttaagtattttaatattttttagagcgttatatttatttgcggtagatatttgcggtattgttata

SEQ ID NO: 17054 - DNA, 548 bp, Artificial Sequence
  chemically treated genomic DNA (Homo sapiens) CpG-island No: 17054
tataacaataccgcaaatatctaccgcaaataaatataacgctctaaaaaatattaaaatacttaaataatcaatacaaaaaaattacaactaacgctcgcgaaacgattccactatctctacgaacgaccgaaaacttacgacaaaaaacaaccacacttataccttacgaacataactatatctaacaaaacgttaatatcaccgctcaaaaataaaacacttacgaaccgtaaactaccactaaaataacatcacgcctactatatactctacgtaactcgactaattaactcaaatacacgacatacaacatattatcaccacccaacgaaccatcaacgaaattacaaacatacgcgataacacaaataattacacactctcgaaactaactcccaacgaatataaaccctacacgtacgacactataactatctcgcgctaaaccgctacaaataacccaacgaataacatatacaacaaatacctaatacgtacactaaataacaaattaataaactccgaacctacgcgaaccacattac

SEQ ID NO: 17055 - DNA, 548 bp, Artificial Sequence
  chemically treated genomic DNA (Homo sapiens) CpG-island No: 17055
tgtaatagtgtcgtaaatgtttatcgtaagtgagtgtggcgttttaggaagtgttggagtgtttgggtagttaatgtagaggggttatagttgacgttcgcgaggcgattttattgtttttacgagcggtcggagatttacgataggagatagttatatttgtgttttacggatatgattatatttgatagaacgttagtgttatcgtttaagaatgaagtatttgcgagtcgtggattgttattggggtgatattacgtttgttgtatgttttgcgtgattcgattggttagtttaaatgtacgatatgtagtatattgttattatttagcggattattaacggagttataggtatacgcgatgatataggtgattgtatattttcggggttagtttttaacggatgtggattttgtacgtacgatattgtaattgtttcgcgttaggtcgttgtaggtagtttagcgagtaatatatgtagtaaatatttgatacgtgtattaaatggtaagttgatgaatttcggatttacgcgaattatattgt

SEQ ID NO: 17056 - DNA, 548 bp, Artificial Sequence
  chemically treated genomic DNA (Homo sapiens) CpG-island No: 17056
acaatataattcgcgtaaatccgaaattcatcaacttaccatttaatacacgtatcaaatatttactacatatattactcgctaaactacctacaacgacctaacgcgaaacaattacaatatcgtacgtacaaaatccacatccgttaaaaactaaccccgaaaatatacaatcacctatatcatcgcgtatacctataactccgttaataatccgctaaataataacaatatactacatatcgtacatttaaactaaccaatcgaatcacgcaaaacatacaacaaacgtaatatcaccccaataacaatccacgactcgcaaatacttcattcttaaacgataacactaacgttctatcaaatataatcatatccgtaaaacacaaatataactatctcctatcgtaaatctccgaccgctcgtaaaaacaataaaatcgcctcgcgaacgtcaactataacccctctacattaactacccaaacactccaacacttcctaaaacgccacactcacttacgataaacatttacgacactattaca

SEQ ID NO: 17057 - DNA, 618 bp, Artificial Sequence
  chemically treated genomic DNA (Homo sapiens) CpG-island No: 17057
  unsure (604)
ggatttaacggttattcgttatcgttaattgtacgttacgcgatgatttgtattgtattgtttattttggtgcgttcgcgtattgatatggttgggtgagggaagtttgtttatataatgtttaagggtttgtcgcgtcggtttattgtacgtttggcgattatttgtattttattgtttaattttcgtgcgttggtgtattatatatggggtgggtgggtgggtgggggaagcgttttttataatgtaagcggtttgtcgcgttcgtttattgtacgtttggagatgatttgtattttattgttttattcgacgtgcgcgtcgcgtatattatatggaggggcggagggagtttaaatatcgattgtttcgtatgacgttataggatttgtatgtaaagttcgattttggattattcgattatgtgtagcgttaaggttgtaatgtgcgttcggtttatttgtcggtagacgatcggtgcgtttgagtattagtggcggggtagtcggggtgattgtttatcgttgtatttaattattttagttattaggatttagtgtagtagattacgttttgacgttttcgtttacgtcgtgtcgttatngttgattaatttgt

SEQ ID NO: 17058 - DNA, 618 bp, Artificial Sequence
  chemically treated genomic DNA (Homo sapiens) CpG-island No: 17058
  unsure (15)
acaaattaatcaacnataacgacacgacgtaaacgaaaacgtcaaaacgtaatctactacactaaatcctaataactaaaataattaaatacaacgataaacaatcaccccgactaccccgccactaatactcaaacgcaccgatcgtctaccgacaaataaaccgaacgcacattacaaccttaacgctacacataatcgaataatccaaaatcgaactttacatacaaatcctataacgtcatacgaaacaatcgatatttaaactccctccgcccctccatataatatacgcgacgcgcacgtcgaataaaacaataaaatacaaatcatctccaaacgtacaataaacgaacgcgacaaaccgcttacattataaaaaacgcttcccccacccacccacccaccccatatataatacaccaacgcacgaaaattaaacaataaaatacaaataatcgccaaacgtacaataaaccgacgcgacaaacccttaaacattatataaacaaacttccctcacccaaccatatcaatacgcgaacgcaccaaaataaacaatacaatacaaatcatcgcgtaacgtacaattaacgataacgaataaccgttaaatcc

SEQ ID NO: 17059 - DNA, 618 bp, Artificial Sequence
  chemically treated genomic DNA (Homo sapiens) CpG-island No: 17059
  unsure (15)
gtaagttgattaatnatgacgatacgacgtgggcgaggacgttaggacgtggtttattatattaaattttggtaattagggtagttaggtatagcggtgagtaattatttcgattgtttcgttattgatatttaaacgtatcgatcgtttatcgataggtaagtcgaacgtatattgtagttttggcgttatatatagtcgggtggtttaaggtcgggttttatatgtaaattttgtaacgttatacggggtagtcggtatttgaatttttttcgtttttttatatagtatacgcgacgcgtacgtcgagtaaggtaataaagtataagttatttttaagcgtgtagtaggcggacgcggtaaatcgtttatattgtaaggaacgttttttttatttatttatttattttatatgtgatatattagcgtacgagggttaggtaataaagtataagtgatcgttaagcgtgtagtaggtcggcgcggtaaatttttgagtattgtgtgagtaagttttttttatttagttatattaatacgcgagcgtattagggtaagtaatatagtataagttatcgcgtagcgtgtagttagcggtggcgggtaatcgttaaattt

SEQ ID NO: 17060 - DNA, 618 bp, Artificial Sequence
  chemically treated genomic DNA (Homo sapiens) CpG-island No: 17060
  unsure (604)
aaatttaacgattacccgccaccgctaactacacgctacgcgataacttatactatattacttaccctaatacgctcgcgtattaatataactaaataaaaaaaacttactcacacaatactcaaaaatttaccgcgccgacctactacacgcttaacgatcacttatactttattacctaaccctcgtacgctaatatatcacatataaaataaataaataaataaaaaaaacgttccttacaatataaacgatttaccgcgtccgcctactacacgcttaaaaataacttatactttattaccttactcgacgtacgcgtcgcgtatactatataaaaaaacgaaaaaaattcaaataccgactaccccgtataacgttacaaaatttacatataaaacccgaccttaaaccacccgactatatataacgccaaaactacaatatacgttcgacttacctatcgataaacgatcgatacgtttaaatatcaataacgaaacaatcgaaataattactcaccgctatacctaactaccctaattaccaaaatttaatataataaaccacgtcctaacgtcctcgcccacgtcgtatcgtcatnattaatcaacttac

SEQ ID NO: 17061 - DNA, 612 bp, Artificial Sequence
  chemically treated genomic DNA (Homo sapiens) CpG-island No: 17061
ggaaatagcgtttttttcggtatattatttttcgttattatcgttgttggtacggcgaggagagtcgattttaatacgatcgatacgttgtaaatcgcgtattaacgtatcgcggcgtttacgttcgttagtgattttttgtaattttttcgggcgtagtttaattttgcgttttttaatatgaatggttagcgtgttttgcggcggtagaacgtataattgcgttagattattttttttacgcgcggtttttgtcgatggaatgttgataattttgttgtttttgtttttcgatagttgcggtagattatttatcgggaatattaatatacggtttgtttgagtgattgttagtagtatatcggaagtatttttaattattatcggcggtataatatgggtatttttcggtaaggtgattaaagttttatttgtacggttacgcgttattagatcgttaaaggtgtagacgaaatcgtaattcgtatcggaagttattagtagtttttgatcgtcgttttttattagtatatggttacggtcgttttaggcggtacgttatttgtcggtgagcggttcgtttgatacgcgtcgacgtagcgtaatcggtta

SEQ ID NO: 17062 - DNA, 612 bp, Artificial Sequence
  chemically treated genomic DNA (Homo sapiens) CpG-island No: 17062
taaccgattacgctacgtcgacgcgtatcaaacgaaccgctcaccgacaaataacgtaccgcctaaaacgaccgtaaccatatactaataaaaaacgacgatcaaaaactactaataacttccgatacgaattacgatttcgtctacacctttaacgatctaataacgcgtaaccgtacaaataaaactttaatcaccttaccgaaaaatacccatattataccgccgataataattaaaaatacttccgatatactactaacaatcactcaaacaaaccgtatattaatattcccgataaataatctaccgcaactatcgaaaaacaaaaacaacaaaattatcaacattccatcgacaaaaaccgcgcgtaaaaaaaataatctaacgcaattatacgttctaccgccgcaaaacacgctaaccattcatattaaaaaacgcaaaattaaactacgcccgaaaaaattacaaaaaatcactaacgaacgtaaacgccgcgatacgttaatacgcgatttacaacgtatcgatcgtattaaaatcgactctcctcgccgtaccaacaacgataataacgaaaaataatataccgaaaaaaacgctatttcc

SEQ ID NO: 17063 - DNA, 612 bp, Artificial Sequence
  chemically treated genomic DNA (Homo sapiens) CpG-island No: 17063
tgatcgattacgttgcgtcggcgcgtgttaggcgagtcgtttatcggtaaataacgtgtcgtttggggcgatcgtgattatatgttgatggaaagcgacgattagaaattgttgatggttttcgatgcgggttacggtttcgtttgtatttttaacgatttggtggcgcgtaatcgtgtaggtaaggttttgattattttatcggaaaatgtttatgttatgtcgtcggtggtgattgaagatgttttcgatatgttgttggtaattatttaggtaggtcgtatgttgatgttttcggtaagtgatttgtcgtagttgtcgaagggtaaaggtaataagattattaatattttatcggtagaagtcgcgcgtggagaagatggtttggcgtaattgtacgttttgtcgtcgtaaagtacgttgattatttatgttgggaaacgtaaaattaaattgcgttcggaagagttatagaaagttattggcgaacgtggacgtcgcggtacgttgatgcgcggtttgtagcgtatcgatcgtgttgagatcgatttttttcgtcgtgttagtagcggtgatagcgaagagtaatatgtcggggagggcgttgttttt

SEQ ID NO: 17064 - DNA, 612 bp, Artificial Sequence
  chemically treated genomic DNA (Homo sapiens) CpG-island No: 17064
aaaaacaacgccctccccgacatattactcttcgctatcaccgctactaacacgacgaaaaaaatcgatctcaacacgatcgatacgctacaaaccgcgcatcaacgtaccgcgacgtccacgttcgccaataactttctataactcttccgaacgcaatttaattttacgtttcccaacataaataatcaacgtactttacgacgacaaaacgtacaattacgccaaaccatcttctccacgcgcgacttctaccgataaaatattaataatcttattacctttacccttcgacaactacgacaaatcacttaccgaaaacatcaacatacgacctacctaaataattaccaacaacatatcgaaaacatcttcaatcaccaccgacgacataacataaacattttccgataaaataatcaaaaccttacctacacgattacgcgccaccaaatcgttaaaaatacaaacgaaaccgtaacccgcatcgaaaaccatcaacaatttctaatcgtcgctttccatcaacatataatcacgatcgccccaaacgacacgttatttaccgataaacgactcgcctaacacgcgccgacgcaacgtaatcgatca

SEQ ID NO: 17065 - DNA, 650 bp, Artificial Sequence
  chemically treated genomic DNA (Homo sapiens) CpG-island No: 17065
attatttgttcgtttcgtggcgagtattttcgttttgcgtcggagtataattagattgttaattatttgatttattttattttcgattcggtaatgtcgtttttgggcgtttattttattcgtatgatcgacggtagcgtgatcgtcgggttaaacgcggtgttggtttttaaacgcgaaggttatcgtaagcgcgattttttatttagcgatacgttggagattttgggttcgtcggggattcgtcgggtgttgtaaaattatttacgtttaggattgggcgagatgaaaaattcgttgtgtaaaagcggttatttgcggttggtgtaaaagtattgttttcggttttcgttaagcgatttttagttttggttcgtcggtgtgcgggcgtaggcggtatcgtcggacggtaagttgattgacgattttttgtttgttattatttcgcgtacgatttatatttgtaatgcgtttttttcggtagcgatattagtaatttttattggtgcgtatattgttagtaaggtataaacgttgttggtaagttagagtaatttcggacgtacgttgcgagcggtacgtagtgtggatgttttatacgtcgtatttaattaataatttttgaaaataggatgtagcgatgaaattta

SEQ ID NO: 17066 - DNA, 650 bp, Artificial Sequence
  chemically treated genomic DNA (Homo sapiens) CpG-island No: 17066
taaatttcatcgctacatcctattttcaaaaattattaattaaatacgacgtataaaacatccacactacgtaccgctcgcaacgtacgtccgaaattactctaacttaccaacaacgtttataccttactaacaatatacgcaccaataaaaattactaatatcgctaccgaaaaaaacgcattacaaatataaatcgtacgcgaaataataacaaacaaaaaatcgtcaatcaacttaccgtccgacgataccgcctacgcccgcacaccgacgaaccaaaactaaaaatcgcttaacgaaaaccgaaaacaatacttttacaccaaccgcaaataaccgcttttacacaacgaatttttcatctcgcccaatcctaaacgtaaataattttacaacacccgacgaatccccgacgaacccaaaatctccaacgtatcgctaaataaaaaatcgcgcttacgataaccttcgcgtttaaaaaccaacaccgcgtttaacccgacgatcacgctaccgtcgatcatacgaataaaataaacgcccaaaaacgacattaccgaatcgaaaataaaataaatcaaataattaacaatctaattatactccgacgcaaaacgaaaatactcgccacgaaacgaacaaataat

SEQ ID NO: 17067 - DNA, 650 bp, Artificial Sequence
  chemically treated genomic DNA (Homo sapiens) CpG-island No: 17067
taagttttatcgttatattttgtttttaaaggttattgattaaatgcggcgtgtaaggtatttatattacgtgtcgttcgtagcgtgcgttcggggttattttggtttgttaatagcgtttgtattttgttgataatatgcgtattaataggaattgttgatgtcgttgtcggggagggcgtattgtaggtgtggatcgtgcgcggggtggtgataaatagaaaatcgttaattagtttgtcgttcggcgatatcgtttgcgttcgtatatcggcgggttagggttggagatcgtttaacgaaagtcggggataatatttttgtattagtcgtagatagtcgtttttgtatagcgagttttttatttcgtttagttttgagcgtagatggttttgtagtattcggcgaattttcgacgagtttaaaatttttagcgtgtcgttaaatgagaagtcgcgtttgcgatagttttcgcgtttgaaagttagtatcgcgtttggttcgacggttacgttgtcgtcgattatgcgggtgagatgaacgtttaaaaacggtattgtcgggtcgggaatggggtaaattaggtggttaataatttggttatgtttcggcgtaaggcggaaatattcgttacggaacgggtagatgat

SEQ ID NO: 17068 - DNA, 650 bp, Artificial Sequence
  chemically treated genomic DNA (Homo sapiens) CpG-island No: 17068
atcatctacccgttccgtaacgaatatttccgccttacgccgaaacataaccaaattattaaccacctaatttaccccattcccgacccgacaataccgtttttaaacgttcatctcacccgcataatcgacgacaacgtaaccgtcgaaccaaacgcgatactaactttcaaacgcgaaaactatcgcaaacgcgacttctcatttaacgacacgctaaaaattttaaactcgtcgaaaattcgccgaatactacaaaaccatctacgctcaaaactaaacgaaataaaaaactcgctatacaaaaacgactatctacgactaatacaaaaatattatccccgactttcgttaaacgatctccaaccctaacccgccgatatacgaacgcaaacgatatcgccgaacgacaaactaattaacgattttctatttatcaccaccccgcgcacgatccacacctacaatacgccctccccgacaacgacatcaacaattcctattaatacgcatattatcaacaaaatacaaacgctattaacaaaccaaaataaccccgaacgcacgctacgaacgacacgtaatataaataccttacacgccgcatttaatcaataacctttaaaaacaaaatataacgataaaactta

SEQ ID NO: 17069 - DNA, 1008 bp, Artificial Sequence
  chemically treated genomic DNA (Homo sapiens) CpG-island No: 17069
acgcggcggggcgtagggcgttttgtcgttgatttcgtagatgttgatggaattttttagcggtaatttgttcggtatgacgtagaacgtcgggatgggttgggacgttaataagtttatcggtaaagaggtgttgattatcggtatttagggcggtattcgcgtcggagacggacgtttaatcgcgttgggttattatatcgggtattgggagatcggtatgtagatgtaggcggcggcgaaggagattattcgtaatggcgggatttcgttcgcggttttcgttagcgattcgtgcgacgggcgttcgtagggtacgtacggtatgttcgattttttgtcgtatcgtaacgacgcggcgatcgtgtttcgtcgtttgattcgttttttgtcgacgcggcgggcggtgatcggcgtagcgatttgcgataaagggttgttcgttattatgattgcgttggtcgcgatgtacgatttgtcgattattttggtgtcgggcggggcgacgttgtcgtcgatcgtcggggaagacgcgggtaaggtgtagattatcggcgcgcgtttcgttaattacgaattttttttgtaggaggtcgtcgaattgggttgtcgcgtttgcgtttcgtcgggcggcgggtgttagtttttcggtacggcgggtatttcgtaggtggtcgcgtattgacgaagtaattgatgcgtatatcgttttgcgtcgcgaagaagatgatcgcgtgcgtatgatttcgtattcggtagagtttgagttgtattatagcgtttaagtgttttagttgtcgtggaaatttttcgtttgtttttggtaggtttgggatcggtggtaagtatattacgtcggatgcgacgtaaatgcgttttattcggtttatacggtgatgatgtggtaggtcggagtaggtgagtcgttttttaacgtgaagtttgttagttatttgtagtttatttttgtatgggttttttttttcgttaattttttgatgtttcgcg

SEQ ID NO: 17070 - DNA, 1008 bp, Artificial Sequence
  chemically treated genomic DNA (Homo sapiens) CpG-island No: 17070
cgcgaaacatcaaaaaattaacgaaaaaaaaaacccatacaaaaataaactacaaataactaacaaacttcacgttaaaaaacgactcacctactccgacctaccacatcatcaccgtataaaccgaataaaacgcatttacgtcgcatccgacgtaatatacttaccaccgatcccaaacctaccaaaaacaaacgaaaaatttccacgacaactaaaacacttaaacgctataatacaactcaaactctaccgaatacgaaatcatacgcacgcgatcatcttcttcgcgacgcaaaacgatatacgcatcaattacttcgtcaatacgcgaccacctacgaaatacccgccgtaccgaaaaactaacacccgccgcccgacgaaacgcaaacgcgacaacccaattcgacgacctcctacaaaaaaaattcgtaattaacgaaacgcgcgccgataatctacaccttacccgcgtcttccccgacgatcgacgacaacgtcgccccgcccgacaccaaaataatcgacaaatcgtacatcgcgaccaacgcaatcataataacgaacaaccctttatcgcaaatcgctacgccgatcaccgcccgccgcgtcgacaaaaaacgaatcaaacgacgaaacacgatcgccgcgtcgttacgatacgacaaaaaatcgaacataccgtacgtaccctacgaacgcccgtcgcacgaatcgctaacgaaaaccgcgaacgaaatcccgccattacgaataatctccttcgccgccgcctacatctacataccgatctcccaatacccgatataataacccaacgcgattaaacgtccgtctccgacgcgaataccgccctaaataccgataatcaacacctctttaccgataaacttattaacgtcccaacccatcccgacgttctacgtcataccgaacaaattaccgctaaaaaattccatcaacatctacgaaatcaacgacaaaacgccctacgccccgccgcgt

SEQ ID NO: 17071 - DNA, 1008 bp, Artificial Sequence
  chemically treated genomic DNA (Homo sapiens) CpG-island No: 17071
cgcgaagtattagagaattgacggagaaaaaagtttatgtagagatgggttatagatagttgataaattttacgttggagagcgatttatttgtttcggtttattatattattatcgtgtaggtcggataagacgtatttgcgtcgtattcggcgtgatgtgtttgttatcgattttaggtttgttagagataggcgaaaagtttttacggtaattaaaatatttagacgttgtagtatagtttaaattttatcggatgcggagttatacgtacgcggttatttttttcgcgacgtagagcgatgtacgtattaattgtttcgttagtgcgcgattatttgcgaggtgttcgtcgtgtcgaggaattgatattcgtcgttcggcgaggcgtaggcgcgatagtttagttcggcggttttttgtagggagagttcgtggttggcgaaacgcgcgtcgatggtttgtattttgttcgcgtttttttcgacggtcggcggtagcgtcgtttcgttcggtattagaatagtcggtaggtcgtgtatcgcggttagcgtaattatggtggcgggtagttttttatcgtaggtcgttacgtcgattatcgttcgtcgcgtcggtagggagcggattaggcggcgaaatacgatcgtcgcgtcgttgcggtacggtagggaatcgaatatatcgtgcgtgttttgcgagcgttcgtcgtacggatcgttgacgaaggtcgcgaacgggatttcgttattgcgggtgatttttttcgtcgtcgtttgtatttgtatgtcgattttttaatgttcggtgtggtagtttagcgcgattgggcgttcgttttcggcgcggatgtcgttttgagtgtcgataattagtatttttttgtcggtgagtttgttggcgttttagtttatttcggcgttttgcgttatgtcgaataggttgtcgttgggagattttattagtatttgcggggttagcggtagagcgttttgcgtttcgtcgcgt

SEQ ID NO: 17072 - DNA, 1008 bp, Artificial Sequence
  chemically treated genomic DNA (Homo sapiens) CpG-island No: 17072
acgcgacgaaacgcaaaacgctctaccgctaaccccgcaaatactaataaaatctcccaacgacaacctattcgacataacgcaaaacgccgaaataaactaaaacgccaacaaactcaccgacaaaaaaatactaattatcgacactcaaaacgacatccgcgccgaaaacgaacgcccaatcgcgctaaactaccacaccgaacattaaaaaatcgacatacaaatacaaacgacgacgaaaaaaatcacccgcaataacgaaatcccgttcgcgaccttcgtcaacgatccgtacgacgaacgctcgcaaaacacgcacgatatattcgattccctaccgtaccgcaacgacgcgacgatcgtatttcgccgcctaatccgctccctaccgacgcgacgaacgataatcgacgtaacgacctacgataaaaaactacccgccaccataattacgctaaccgcgatacacgacctaccgactattctaataccgaacgaaacgacgctaccgccgaccgtcgaaaaaaacgcgaacaaaatacaaaccatcgacgcgcgtttcgccaaccacgaactctccctacaaaaaaccgccgaactaaactatcgcgcctacgcctcgccgaacgacgaatatcaattcctcgacacgacgaacacctcgcaaataatcgcgcactaacgaaacaattaatacgtacatcgctctacgtcgcgaaaaaaataaccgcgtacgtataactccgcatccgataaaatttaaactatactacaacgtctaaatattttaattaccgtaaaaacttttcgcctatctctaacaaacctaaaatcgataacaaacacatcacgccgaatacgacgcaaatacgtcttatccgacctacacgataataatataataaaccgaaacaaataaatcgctctccaacgtaaaatttatcaactatctataacccatctctacataaacttttttctccgtcaattctctaatacttcgcg

SEQ ID NO: 17073 - DNA, 770 bp, Artificial Sequence
  chemically treated genomic DNA (Homo sapiens) CpG-island No: 17073
ggcgttcgtatattttttttgtgacggtttagcgttatgtcggaggttgattttgtggagatgggtttatggataatcgcgcgggtaagttcggacggtttcggcgtttcgtagttggtgtcgtgttagtggcgattggtatggattaaattcgcgggggtacgggcgggggtttttaaagggtcgtttttttttttttttttacggttttttaggacgcgggattgttttcgtgggggtgtttttatgttagtatcgatacgcggtttaacggggtgttgattagcgattagttttttaggttacgggagtggtagatgcgtacgttcgggaattattcgaaggtcgaggtggcgatgtagtagttttcgttttggcggtataggacgggttcgggtttgaagtcggtgagtatcgggttagtgatttttatatgttttcggttaatgggatgcggttgtcgcggcgtcgggaacggtttcgttttgcgtcgcgcggtgtttaattagttgtcggttgatggtttttacgcgggtatcggtgagtttgtagagcgatagtatgatgaatatgttcgcgtagagtattatcggtattacgtagaatagaattttgatggtggtgagtattttaatcggttgtacgttgttgttggcggaatagttgacgtacgttaggatttagtttattatcgtttcgttaatcgttaggttaatttttaggttgaataggtaggtgtttagttatagaaataagatacgttgaaatgt

SEQ ID NO: 17074 - DNA, 770 bp, Artificial Sequence
  chemically treated genomic DNA (Homo sapiens) CpG-island No: 17074
acatttcaacgtatcttatttctataactaaacacctacctattcaacctaaaaattaacctaacgattaacgaaacgataataaactaaatcctaacgtacgtcaactattccgccaacaacaacgtacaaccgattaaaatactcaccaccatcaaaattctattctacgtaataccgataatactctacgcgaacatattcatcatactatcgctctacaaactcaccgatacccgcgtaaaaaccatcaaccgacaactaattaaacaccgcgcgacgcaaaacgaaaccgttcccgacgccgcgacaaccgcatcccattaaccgaaaacatataaaaatcactaacccgatactcaccgacttcaaacccgaacccgtcctataccgccaaaacgaaaactactacatcgccacctcgaccttcgaataattcccgaacgtacgcatctaccactcccgtaacctaaaaaactaatcgctaatcaacaccccgttaaaccgcgtatcgatactaacataaaaacacccccacgaaaacaatcccgcgtcctaaaaaaccgtaaaaaaaaaaaaaaaaacgaccctttaaaaacccccgcccgtacccccgcgaatttaatccataccaatcgccactaacacgacaccaactacgaaacgccgaaaccgtccgaacttacccgcgcgattatccataaacccatctccacaaaatcaacctccgacataacgctaaaccgtcacaaaaaaaatatacgaacgcc

SEQ ID NO: 17075 - DNA, 770 bp, Artificial Sequence
  chemically treated genomic DNA (Homo sapiens) CpG-island No: 17075
atattttagcgtgttttatttttatgattaagtatttatttgtttagtttgaagattggtttggcgattggcggggcggtggtgggttggattttggcgtacgttaattatttcgttagtagtagcgtgtagtcggttgaggtgtttattattattaaaattttgttttgcgtggtgtcggtggtgttttacgcgggtatgtttattatgttgtcgttttataagtttatcgatgttcgcgtggaggttattagtcggtagttgattaagtatcgcgcggcgtagggcgaggtcgttttcgacgtcgcgatagtcgtattttattaatcggaggtatatggaaattattaattcgatatttatcggttttaaattcggattcgttttgtgtcgttagggcgaggattattatatcgttatttcgattttcgagtggttttcgggcgtgcgtatttattattttcgtgatttgaaaaattggtcgttggttagtatttcgttggatcgcgtgtcgatgttgatatgaaggtatttttacgagaatagtttcgcgttttggaaaatcgtgggaaaagaagaggggacgattttttgaaaattttcgttcgtattttcgcggatttaatttatgttagtcgttattaatacggtattaattgcggggcgtcggaatcgttcggatttattcgcgcggttatttatggatttatttttataggattagttttcggtataacgttgggtcgttatagaaaggatatgcgagcgtt

SEQ ID NO: 17076 - DNA, 770 bp, Artificial Sequence
  chemically treated genomic DNA (Homo sapiens) CpG-island No: 17076
aacgctcgcatatcctttctataacgacccaacgttataccgaaaactaatcctataaaaataaatccataaataaccgcgcgaataaatccgaacgattccgacgccccgcaattaataccgtattaataacgactaacataaattaaatccgcgaaaatacgaacgaaaattttcaaaaaatcgtcccctcttcttttcccacgattttccaaaacgcgaaactattctcgtaaaaataccttcatatcaacatcgacacgcgatccaacgaaatactaaccaacgaccaatttttcaaatcacgaaaataataaatacgcacgcccgaaaaccactcgaaaatcgaaataacgatataataatcctcgccctaacgacacaaaacgaatccgaatttaaaaccgataaatatcgaattaataatttccatatacctccgattaataaaatacgactatcgcgacgtcgaaaacgacctcgccctacgccgcgcgatacttaatcaactaccgactaataacctccacgcgaacatcgataaacttataaaacgacaacataataaacatacccgcgtaaaacaccaccgacaccacgcaaaacaaaattttaataataataaacacctcaaccgactacacgctactactaacgaaataattaacgtacgccaaaatccaacccaccaccgccccgccaatcgccaaaccaatcttcaaactaaacaaataaatacttaatcataaaaataaaacacgctaaaatat

SEQ ID NO: 17077 - DNA, 556 bp, Artificial Sequence
  chemically treated genomic DNA (Homo sapiens) CpG-island No: 17077
tatatacgaattattatatttaagtatttaattagttagtttcgcgcgtagtttggtcgttttttttaatatagtagtttaaggttattggagagtttacgatcgtatatagtttttttcggtatttgttttcgtggcgtaggcgcgtagtggagggggtcgcggggttttttgggagatgtagtttaacgatgacggtcgtggcgtaaagcgttttggggttcgtggttcgcggggtttatggggaacgcggtgtcgttggtttagatttcgtagagtttagagttttgtatgttttagttttcgtttcgttttttttcgcggaggattttgggaggtgacgtcgcgggtttcggtcgcggggttcgtttgtagagttcgcggcgtcgggaggtgagtggggtcgggtttcgggcgggagcgggaagttaagggcgggtttcgggtggttcggtcgcgttagggatgggaattcggtaggagtcgttggggaggtcgtgtgtgttttattgtattattaattatgtgataggttgcgggtgtgatagaatgtgat

SEQ ID NO: 17078 - DNA, 556 bp, Artificial Sequence
  chemically treated genomic DNA (Homo sapiens) CpG-island No: 17078
atcacattctatcacacccgcaacctatcacataattaataatacaataaaacacacacgacctccccaacgactcctaccgaattcccatccctaacgcgaccgaaccacccgaaacccgcccttaacttcccgctcccgcccgaaacccgaccccactcacctcccgacgccgcgaactctacaaacgaaccccgcgaccgaaacccgcgacgtcacctcccaaaatcctccgcgaaaaaaaacgaaacgaaaactaaaacatacaaaactctaaactctacgaaatctaaaccaacgacaccgcgttccccataaaccccgcgaaccacgaaccccaaaacgctttacgccacgaccgtcatcgttaaactacatctcccaaaaaaccccgcgaccccctccactacgcgcctacgccacgaaaacaaataccgaaaaaaactatatacgatcgtaaactctccaataaccttaaactactatattaaaaaaaacgaccaaactacgcgcgaaactaactaattaaatacttaaatataataattcgtatata

SEQ ID NO: 17079 - DNA, 556 bp, Artificial Sequence
  chemically treated genomic DNA (Homo sapiens) CpG-island No: 17079
attatattttgttatattcgtagtttgttatatagttggtaatatagtgaaatatatacggtttttttagcgatttttgtcgggtttttatttttggcgcggtcgggttattcggagttcgtttttgatttttcgttttcgttcggggttcggttttatttatttttcggcgtcgcgggttttgtaaacgggtttcgcgatcgagattcgcgacgttattttttagaatttttcgcgaggaggagcgaggcgaggattgaggtatgtaggattttgagttttgcgagatttgaattagcgatatcgcgttttttatggatttcgcgaattacgagttttagaacgttttgcgttacggtcgttatcgttgaattatattttttagagaatttcgcggttttttttattgcgcgtttgcgttacgggggtaggtatcggagagggttgtgtgcggtcgtaggttttttagtgattttgagttgttgtgttggggaaagcggttaggttgcgcgcggggttgattggttgaatgtttgggtgtggtggttcgtgtgtg

SEQ ID NO: 17080 - DNA, 556 bp, Artificial Sequence
  chemically treated genomic DNA (Homo sapiens) CpG-island No: 17080
cacacacgaaccaccacacccaaacattcaaccaatcaaccccgcgcgcaacctaaccgctttccccaacacaacaactcaaaatcactaaaaaacctacgaccgcacacaaccctctccgatacctacccccgtaacgcaaacgcgcaataaaaaaaaccgcgaaattctctaaaaaatataattcaacgataacgaccgtaacgcaaaacgttctaaaactcgtaattcgcgaaatccataaaaaacgcgatatcgctaattcaaatctcgcaaaactcaaaatcctacatacctcaatcctcgcctcgctcctcctcgcgaaaaattctaaaaaataacgtcgcgaatctcgatcgcgaaacccgtttacaaaacccgcgacgccgaaaaataaataaaaccgaaccccgaacgaaaacgaaaaatcaaaaacgaactccgaataacccgaccgcgccaaaaataaaaacccgacaaaaatcgctaaaaaaaccgtatatatttcactatattaccaactatataacaaactacgaatataacaaaatataat

SEQ ID NO: 17081 - DNA, 565 bp, Artificial Sequence
  chemically treated genomic DNA (Homo sapiens) CpG-island No: 17081
attttatcgtgacgtgttagtatcgagtcgagacgagtaagatagtttaaacgacgttagacggcgatacggaaatattagatatcgattaaggatagcggaataggaagaaggaggtttttgattatgttgggtggggacggggtttggttgttcgtgacgtgtttggtcggtggtgggggggtggcgttgcgcgggcgttgtggtttttgcggggtggggtggtttgggtgagtgtgtcgtggggtgtgtgggtgtacgtgtggtggtgtggggggtcgtgtgtagttggtgtgtagttgtggggggtgtttggggtttcgggggggggtggttgttcggtggttaaggcggcgtgtcgttgggggtggggttcggggtgttgaagtttgttagggggtaagggtgggttcgaggtttcgggtgtttgagggtgggattggtcgtggtgggatgtttcgttttagcggtcgggagtgttagcggtgtgtgcgtgggtgtgttgtgtttgtgtgatgtgtgttgagttgggtttatgggaggaggagtatggaatggtaggatt

SEQ ID NO: 17082 - DNA, 565 bp, Artificial Sequence
  chemically treated genomic DNA (Homo sapiens) CpG-island No: 17082
aatcctaccattccatactcctcctcccataaacccaactcaacacacatcacacaaacacaacacacccacgcacacaccgctaacactcccgaccgctaaaacgaaacatcccaccacgaccaatcccaccctcaaacacccgaaacctcgaacccacccttaccccctaacaaacttcaacaccccgaaccccacccccaacgacacgccgccttaaccaccgaacaaccacccccccccgaaaccccaaacaccccccacaactacacaccaactacacacgaccccccacaccaccacacgtacacccacacaccccacgacacactcacccaaaccaccccaccccgcaaaaaccacaacgcccgcgcaacgccacccccccaccaccgaccaaacacgtcacgaacaaccaaaccccgtccccacccaacataatcaaaaacctccttcttcctattccgctatccttaatcgatatctaatatttccgtatcgccgtctaacgtcgtttaaactatcttactcgtctcgactcgatactaacacgtcacgataaaat

SEQ ID NO: 17083 - DNA, 565 bp, Artificial Sequence
  chemically treated genomic DNA (Homo sapiens) CpG-island No: 17083
agttttgttattttatatttttttttttatgggtttaatttagtatatattatataaatataatatatttacgtatatatcgttagtattttcggtcgttggagcgggatattttattacgattaattttatttttaggtattcgggatttcggatttatttttattttttaataaattttaatatttcggattttatttttaacgatacgtcgttttggttatcggataattattttttttcgaagttttaggtattttttataattatatattaattatatacggttttttatattattatacgtgtatttatatattttacgatatatttatttagattattttatttcgtaaagattataacgttcgcgtaacgttatttttttattatcgattaggtacgttacgaataattagatttcgtttttatttaatatgattaaaggtttttttttttttgtttcgttgtttttggtcggtatttgatgttttcgtgtcgtcgtttgacgtcgtttgagttgttttgttcgtttcggttcggtgttggtacgttacggtgggat

SEQ ID NO: 17084 - DNA, 565 bp, Artificial Sequence
  chemically treated genomic DNA (Homo sapiens) CpG-island No: 17084
atcccaccgtaacgtaccaacaccgaaccgaaacgaacaaaacaactcaaacgacgtcaaacgacgacacgaaaacatcaaataccgaccaaaaacaacgaaacaaaaaaaaaaaaacctttaatcatattaaataaaaacgaaatctaattattcgtaacgtacctaatcgataataaaaaaataacgttacgcgaacgttataatctttacgaaataaaataatctaaataaatatatcgtaaaatatataaatacacgtataataatataaaaaaccgtatataattaatatataattataaaaaatacctaaaacttcgaaaaaaaataattatccgataaccaaaacgacgtatcgttaaaaataaaatccgaaatattaaaatttattaaaaaataaaaataaatccgaaatcccgaatacctaaaaataaaattaatcgtaataaaatatcccgctccaacgaccgaaaatactaacgatatatacgtaaatatattatatttatataatatatactaaattaaacccataaaaaaaaaaatataaaataacaaaact

SEQ ID NO: 17085 - DNA, 584 bp, Artificial Sequence
  chemically treated genomic DNA (Homo sapiens) CpG-island No: 17085
gaggcgacgcggacgtagttatcggaattcgggacgcgaagagtcgcgttacgggaatcgttatttttcggagtttcgttttttcgtcgataggcggttattggattaatgtttgggcgtaaagggttttttaggggttaattagcgtttaggtttcggtagggggcggggcgtagcgttggtcggtcgggggcgtagttgggcgggattggggagcgtttcgtttcgtcgcgggattggggtggcgcgttatttttgcggagaaggatttgatagtgtttcggagtcggggcgagtagttaaaaggttcgcggagtcgcgttgggtcgtttcggcgtagttgaatcgggggtcgcgtttgttaggtcgacgggtttggtttagtttggcgttaaggggttcgtgcgttgtggagacgcggagggtcgaggcggcgcggtttgaggtgaggaggggtcgggtgttgggtcgcgtagttggagttagagtgtcggtggtttcggacgggttatttggtattcgaggagattttttttttttttgagagtagcgttcggaatttgttagtttagtttggaaatttt

SEQ ID NO: 17086 - DNA, 584 bp, Artificial Sequence
  chemically treated genomic DNA (Homo sapiens) CpG-island No: 17086
aaaatttccaaactaaactaacaaattccgaacgctactctcaaaaaaaaaaaaaatctcctcgaataccaaataacccgtccgaaaccaccgacactctaactccaactacgcgacccaacacccgacccctcctcacctcaaaccgcgccgcctcgaccctccgcgtctccacaacgcacgaaccccttaacgccaaactaaaccaaacccgtcgacctaacaaacgcgacccccgattcaactacgccgaaacgacccaacgcgactccgcgaaccttttaactactcgccccgactccgaaacactatcaaatccttctccgcaaaaataacgcgccaccccaatcccgcgacgaaacgaaacgctccccaatcccgcccaactacgcccccgaccgaccaacgctacgccccgccccctaccgaaacctaaacgctaattaacccctaaaaaaccctttacgcccaaacattaatccaataaccgcctatcgacgaaaaaacgaaactccgaaaaataacgattcccgtaacgcgactcttcgcgtcccgaattccgataactacgtccgcgtcgcctc

SEQ ID NO: 17087 - DNA, 584 bp, Artificial Sequence
  chemically treated genomic DNA (Homo sapiens) CpG-island No: 17087
gggatttttaggttgggttgataagtttcgggcgttgtttttagggggaagggaggttttttcgagtgttagatagttcgttcgaaattatcgatattttaattttagttacgcgatttagtattcggtttttttttattttaggtcgcgtcgtttcgatttttcgcgtttttatagcgtacgaattttttggcgttaggttgggttagattcgtcggtttggtaggcgcggttttcggtttagttgcgtcggggcggtttagcgcgatttcgcgggttttttggttgttcgtttcggtttcggaatattgttagattttttttcgtagaggtagcgcgttattttagtttcgcggcggggcggggcgttttttaatttcgtttagttgcgttttcggtcggttaacgttgcgtttcgttttttatcgggatttaggcgttgattggtttttgagagattttttgcgtttaggtattggtttagtggtcgtttgtcgacgagggggcgggatttcgaggggtagcgattttcgtaacgcggtttttcgcgtttcggatttcggtggttgcgttcgcgtcgtttt

SEQ ID NO: 17088 - DNA, 584 bp, Artificial Sequence
  chemically treated genomic DNA (Homo sapiens) CpG-island No: 17088
aaaacgacgcgaacgcaaccaccgaaatccgaaacgcgaaaaaccgcgttacgaaaatcgctacccctcgaaatcccgccccctcgtcgacaaacgaccactaaaccaatacctaaacgcaaaaaatctctcaaaaaccaatcaacgcctaaatcccgataaaaaacgaaacgcaacgttaaccgaccgaaaacgcaactaaacgaaattaaaaaacgccccgccccgccgcgaaactaaaataacgcgctacctctacgaaaaaaaatctaacaatattccgaaaccgaaacgaacaaccaaaaaacccgcgaaatcgcgctaaaccgccccgacgcaactaaaccgaaaaccgcgcctaccaaaccgacgaatctaacccaacctaacgccaaaaaattcgtacgctataaaaacgcgaaaaatcgaaacgacgcgacctaaaataaaaaaaaaccgaatactaaatcgcgtaactaaaattaaaatatcgataatttcgaacgaactatctaacactcgaaaaaacctcccttccccctaaaaacaacgcccgaaacttatcaacccaacctaaaaatccc

SEQ ID NO: 17089 - DNA, 537 bp, Artificial Sequence
  chemically treated genomic DNA (Homo sapiens) CpG-island No: 17089
ttgcggcgcgcgtgttttagcgagcggttattagggagcgcggcggagagggcgtttgggtacgagtttaagtgtcgggggcgcgcggcgttggcgttggcgtaggttggtcgcgtagtcgcggtttttatttggtagttgttgaggtcgtggttgtggcgtttttcgatgtcgttgagttgtcgttttagggattttttggtgtcgcgtatcgattttagttcgatgtttttggattgtagttggcgtcggtattcggcgattttttttttggcggagcggatggtttttttgttttgttcggtcgtttcggtgagtttggcgtagcggtatttgaattatttttcggtttggtgtatattttggtttgagtggttttcgagttgggagcggattttttttagcgtcgtcgagatgtttgtttttaggtagtttttgcgttttatcgtgatgtgcgatgtttggatttgggttagaaggtcggttatttttttttcgtggttgtttcgtaggaaggttattttattttgtagcgat

SEQ ID NO: 17090 - DNA, 537 bp, Artificial Sequence
  chemically treated genomic DNA (Homo sapiens) CpG-island No: 17090
atcgctacaaaataaaataaccttcctacgaaacaaccacgaaaaaaaaataaccgaccttctaacccaaatccaaacatcgcacatcacgataaaacgcaaaaactacctaaaaacaaacatctcgacgacgctaaaaaaaatccgctcccaactcgaaaaccactcaaaccaaaatatacaccaaaccgaaaaataattcaaataccgctacgccaaactcaccgaaacgaccgaacaaaacaaaaaaaccatccgctccgccaaaaaaaaaatcgccgaataccgacgccaactacaatccaaaaacatcgaactaaaatcgatacgcgacaccaaaaaatccctaaaacgacaactcaacgacatcgaaaaacgccacaaccacgacctcaacaactaccaaataaaaaccgcgactacgcgaccaacctacgccaacgccaacgccgcgcgcccccgacacttaaactcgtacccaaacgccctctccgccgcgctccctaataaccgctcgctaaaacacgcgcgccgcaa

SEQ ID NO: 17091 - DNA, 537 bp, Artificial Sequence
  chemically treated genomic DNA (Homo sapiens) CpG-island No: 17091
gtcgttgtaggatgaggtggtttttttgcggagtaattacgaggaggaggtggtcgattttttggtttagatttaggtatcgtatattacggtggagcgtaaagattatttgaagatagatatttcgacggcgttgaaggaaattcgtttttagttcgaaagttatttagattagaatatgtattaggtcgaagagtggtttaaatgtcgttacgttaagtttatcgaggcggtcgagtagaataaggaggttattcgtttcgttaaggaagagatcgtcgagtatcggcgttagttgtagtttaagagtatcgagttagagtcggtgcgcggtattaaggagtttttggagcggtagtttagcgatatcgaggagcgttataattacgattttagtagttattaggtaggaatcgcggttgcgcggttagtttgcgttagcgttagcgtcgcgcgttttcgatatttgggttcgtgtttaggcgtttttttcgtcgcgttttttggtggtcgttcgttagagtacgcgcgtcgtag

SEQ ID NO: 17092 - DNA, 537 bp, Artificial Sequence
  chemically treated genomic DNA (Homo sapiens) CpG-island No: 17092
ctacgacgcgcgtactctaacgaacgaccaccaaaaaacgcgacgaaaaaaacgcctaaacacgaacccaaatatcgaaaacgcgcgacgctaacgctaacgcaaactaaccgcgcaaccgcgattcctacctaataactactaaaatcgtaattataacgctcctcgatatcgctaaactaccgctccaaaaactccttaataccgcgcaccgactctaactcgatactcttaaactacaactaacgccgatactcgacgatctcttccttaacgaaacgaataacctccttattctactcgaccgcctcgataaacttaacgtaacgacatttaaaccactcttcgacctaatacatattctaatctaaataactttcgaactaaaaacgaatttccttcaacgccgtcgaaatatctatcttcaaataatctttacgctccaccgtaatatacgatacctaaatctaaaccaaaaaatcgaccacctcctcctcgtaattactccgcaaaaaaaccacctcatcctacaacgac

SEQ ID NO: 17093 - DNA, 540 bp, Artificial Sequence
  chemically treated genomic DNA (Homo sapiens) CpG-island No: 17093
tttttcgttggagcgggatagtttgtagtcgtcgtcgggttcggagtcgtcgttgagtagggacgaggattggttgaagttaaggttgttttcggcggagttgagtatggtcgagttgtaagcgaggcgcggggcgagtatgttgcgtttataggaggaggatacggtgttgggcgagtcgcgggattacgattgcgagcggaagttattggacggggagtcgttgacgcggttgaagttcgagcgggtttcggttattcgtcggtaggcggacgggttgtttagcgagtttaacgtgtagtttattttggaggttttggggcgtgtggttgttatagcgttttgtcggtttcgtcgtagtttatttatagtcgcggcgttggtttcgggttagggtttcgtttcgtggaggcggcggtcgaggaggcggggattgcgggtatcggtcggggaggaggggaggggggcggttgaacggtgatttagcgttcgttttacgtgggtttaggtcgtatgggaatttggatttttttgttttgg

SEQ ID NO: 17094 - DNA, 540 bp, Artificial Sequence
  chemically treated genomic DNA (Homo sapiens) CpG-island No: 17094
ccaaaacaaaaaaatccaaattcccatacgacctaaacccacgtaaaacgaacgctaaatcaccgttcaaccgcccccctcccctcctccccgaccgatacccgcaatccccgcctcctcgaccgccgcctccacgaaacgaaaccctaacccgaaaccaacgccgcgactataaataaactacgacgaaaccgacaaaacgctataacaaccacacgccccaaaacctccaaaataaactacacgttaaactcgctaaacaacccgtccgcctaccgacgaataaccgaaacccgctcgaacttcaaccgcgtcaacgactccccgtccaataacttccgctcgcaatcgtaatcccgcgactcgcccaacaccgtatcctcctcctataaacgcaacatactcgccccgcgcctcgcttacaactcgaccatactcaactccgccgaaaacaaccttaacttcaaccaatcctcgtccctactcaacgacgactccgaacccgacgacgactacaaactatcccgctccaacgaaaaa

SEQ ID NO: 17095 - DNA, 540 bp, Artificial Sequence
  chemically treated genomic DNA (Homo sapiens) CpG-island No: 17095
ttagggtagaaaagtttaggtttttatgcggtttgggtttacgtggagcgggcgttgaattatcgtttagtcgttttttttttttttttttcgatcggtgttcgtagttttcgttttttcggtcgtcgtttttacggggcggggttttggttcgggattagcgtcgcggttataaatgggttgcggcgaggtcggtagaacgttgtgatagttatacgttttaaggtttttaagatgagttatacgttggattcgttgggtaattcgttcgtttatcggcgggtaatcgagattcgttcgagttttagtcgcgttagcggtttttcgtttagtggttttcgttcgtagtcgtggtttcgcggttcgtttagtatcgtgttttttttttataagcgtagtatgttcgtttcgcgtttcgtttatagttcggttatgtttagtttcgtcgagagtagttttgattttagttagttttcgtttttgtttaacggcggtttcggattcggcggcgattataagttgtttcgttttaacgagaag

SEQ ID NO: 17096 - DNA, 540 bp, Artificial Sequence
  chemically treated genomic DNA (Homo sapiens) CpG-island No: 17096
cttctcgttaaaacgaaacaacttataatcgccgccgaatccgaaaccgccgttaaacaaaaacgaaaactaactaaaatcaaaactactctcgacgaaactaaacataaccgaactataaacgaaacgcgaaacgaacatactacgcttataaaaaaaaaacacgatactaaacgaaccgcgaaaccacgactacgaacgaaaaccactaaacgaaaaaccgctaacgcgactaaaactcgaacgaatctcgattacccgccgataaacgaacgaattacccaacgaatccaacgtataactcatcttaaaaaccttaaaacgtataactatcacaacgttctaccgacctcgccgcaacccatttataaccgcgacgctaatcccgaaccaaaaccccgccccgtaaaaacgacgaccgaaaaaacgaaaactacgaacaccgatcgaaaaaaaaaaaaaaaaaacgactaaacgataattcaacgcccgctccacgtaaacccaaaccgcataaaaacctaaacttttctaccctaa

SEQ ID NO: 17097 - DNA, 729 bp, Artificial Sequence
  chemically treated genomic DNA (Homo sapiens) CpG-island No: 17097
attgtttttgtggtagtagttcggttattttttgatcgtggttaagttagtttacgtgttgtatcgttaaggtcggatgtaaattgagagaacgttgttagtttacgatattgtgttagagcggtacggatattatcggatagtttttttatgattttggtttgtgttgtattattaatacgggatacggaaatattcgggttaatcgtaggacgaatatcggcgttgaataggttggtttttaggaagatttgattatcggtaatggagattacgttggtcggaacgaacgtagaaacgttattcgtttgagtttcgataatcggtagtgcggttagagaatcggtttttttttttattttatttttggtgaaggttttaacgtattcggcgttaatacgtgtagtacgttttagtagacgagagtggaggtagaaaacgtcgttcgggaatgttttacgttttggcggacgacggagtagtagggagatttgacggtaagtaatagtttgtttagataggttatcgtaaatgattagcgtatttttatcgcggttacggaagtattcgtttattgcgtaatcggtatacggtgttaggtattgtagtgtagcggatttagacgcggttgttattataacgatggtgttagttagtgcgtcgtgtttttttagtttacgtattacgttagaaatggtggacgttttttggtcgatagcgatatagata

SEQ ID NO: 17098 - DNA, 729 bp, Artificial Sequence
  chemically treated genomic DNA (Homo sapiens) CpG-island No: 17098
tatctatatcgctatcgaccaaaaaacgtccaccatttctaacgtaatacgtaaactaaaaaaacacgacgcactaactaacaccatcgttataataacaaccgcgtctaaatccgctacactacaatacctaacaccgtataccgattacgcaataaacgaatacttccgtaaccgcgataaaaatacgctaatcatttacgataacctatctaaacaaactattacttaccgtcaaatctccctactactccgtcgtccgccaaaacgtaaaacattcccgaacgacgttttctacctccactctcgtctactaaaacgtactacacgtattaacgccgaatacgttaaaaccttcaccaaaaataaaataaaaaaaaaaaccgattctctaaccgcactaccgattatcgaaactcaaacgaataacgtttctacgttcgttccgaccaacgtaatctccattaccgataatcaaatcttcctaaaaaccaacctattcaacgccgatattcgtcctacgattaacccgaatatttccgtatcccgtattaataatacaacacaaaccaaaatcataaaaaaactatccgataatatccgtaccgctctaacacaatatcgtaaactaacaacgttctctcaatttacatccgaccttaacgatacaacacgtaaactaacttaaccacgatcaaaaaataaccgaactactaccacaaaaacaat

SEQ ID NO: 17099 - DNA, 729 bp, Artificial Sequence
  chemically treated genomic DNA (Homo sapiens) CpG-island No: 17099
tatttatgtcgttatcggttagaaagcgtttattatttttaacgtggtacgtaaattggaagagtacggcgtattggttaatattatcgttgtggtagtaatcgcgtttgaattcgttgtattgtaatatttggtatcgtatgtcggttgcgtaatgggcgaatattttcgtgatcgcggtgaagatgcgttgattatttacgatgatttgtttaaataggttgttgtttatcgttagatttttttgttgtttcgtcgttcgttaggacgtgaagtattttcgggcgacgttttttatttttattttcgtttgttggagcgtgttgtacgtgttaacgtcgaatacgttgaagtttttattaaaggtgaagtgaaagggaaaatcggttttttgatcgtattgtcgattatcgaaatttaggcgggtgacgtttttgcgttcgtttcgattaacgtaatttttattatcgatggttagatttttttggaaattaatttgtttaacgtcggtattcgttttgcggttaattcgggtattttcgtatttcgtgttggtggtgtagtatagattaagattatgaaaaaattgttcggtggtattcgtatcgttttggtatagtatcgtgaattggtagcgtttttttagtttgtattcgattttgacgatgtaatacgtaagttagtttgattacggttagaaagtgatcgaattgttgttatagaaatagt

SEQ ID NO: 17100 - DNA, 729 bp, Artificial Sequence
  chemically treated genomic DNA (Homo sapiens) CpG-island No: 17100
actatttctataacaacaattcgatcactttctaaccgtaatcaaactaacttacgtattacatcgtcaaaatcgaatacaaactaaaaaaacgctaccaattcacgatactataccaaaacgatacgaataccaccgaacaattttttcataatcttaatctatactacaccaccaacacgaaatacgaaaatacccgaattaaccgcaaaacgaataccgacgttaaacaaattaatttccaaaaaaatctaaccatcgataataaaaattacgttaatcgaaacgaacgcaaaaacgtcacccgcctaaatttcgataatcgacaatacgatcaaaaaaccgattttccctttcacttcacctttaataaaaacttcaacgtattcgacgttaacacgtacaacacgctccaacaaacgaaaataaaaataaaaaacgtcgcccgaaaatacttcacgtcctaacgaacgacgaaacaacaaaaaaatctaacgataaacaacaacctatttaaacaaatcatcgtaaataatcaacgcatcttcaccgcgatcacgaaaatattcgcccattacgcaaccgacatacgataccaaatattacaatacaacgaattcaaacgcgattactaccacaacgataatattaaccaatacgccgtactcttccaatttacgtaccacgttaaaaataataaacgctttctaaccgataacgacataaata

SEQ ID NO: 17101 - DNA, 709 bp, Artificial Sequence
  chemically treated genomic DNA (Homo sapiens) CpG-island No: 17101
agtttaacgcgttcggggtttttaggggttttcggttttttcggttcgagtgttcgcgtcgttgtttattcgcggtaaatttggatacgtaaattttgcgttttttggggacgttcgatgttagggttttcgttttttatgggggaagagtatttcggcgttacgttggaataagagtaatcgcgtatcgattgtttggttagattcgttgtcggaacgttagtgggaatacgtatcgtcgaatgtttggtatttgttatcgattatcgttaagtttatggtagaaacggaggttttcggttggttatttgcggcgttggatgaatgtcgtttgatgtaaatgcgttcgttaggaattcgttgcgtcggaagatgtttggcgtgatattattaatgtttggtaattacgtatacgttaattggtttgtttgtaattgttagtcgattggcgattgcgtaaggcgcgagagcgcgatttggcggtgaattttgtcgtgcgtgaagagtatttgtggtcggtagcgcgttatatgtcgggaagtttaggcgaattggatagtttgggtttattcggtagcgaaattcgtttttacggtaaaacgttgttagcgttggtggaaaaagcgtagatattgtcggaagatgttttatcgtagtcgatgtttaatttgatggatatgtcgggttatcgtaaagcgtttaaagcgat

SEQ ID NO: 17102 - DNA, 709 bp, Artificial Sequence
  chemically treated genomic DNA (Homo sapiens) CpG-island No: 17102
atcgctttaaacgctttacgataacccgacatatccatcaaattaaacatcgactacgataaaacatcttccgacaatatctacgctttttccaccaacgctaacaacgttttaccgtaaaaacgaatttcgctaccgaataaacccaaactatccaattcgcctaaacttcccgacatataacgcgctaccgaccacaaatactcttcacgcacgacaaaattcaccgccaaatcgcgctctcgcgccttacgcaatcgccaatcgactaacaattacaaacaaaccaattaacgtatacgtaattaccaaacattaataatatcacgccaaacatcttccgacgcaacgaattcctaacgaacgcatttacatcaaacgacattcatccaacgccgcaaataaccaaccgaaaacctccgtttctaccataaacttaacgataatcgataacaaataccaaacattcgacgatacgtattcccactaacgttccgacaacgaatctaaccaaacaatcgatacgcgattactcttattccaacgtaacgccgaaatactcttcccccataaaaaacgaaaaccctaacatcgaacgtccccaaaaaacgcaaaatttacgtatccaaatttaccgcgaataaacaacgacgcgaacactcgaaccgaaaaaaccgaaaacccctaaaaaccccgaacgcgttaaact

SEQ ID NO: 17103 - DNA, 709 bp, Artificial Sequence
  chemically treated genomic DNA (Homo sapiens) CpG-island No: 17103
atcgttttaaacgttttacgataattcggtatgtttattaggttaagtatcggttgcggtaaggtatttttcggtaatgtttgcgttttttttattagcgttagtagcgttttatcgtgaaagcggatttcgttatcggataaatttaggttgtttagttcgtttaaatttttcggtatataacgcgttatcgattataaatgttttttacgtacgataaagtttatcgttagatcgcgttttcgcgttttgcgtagtcgttagtcggttaatagttgtagataggttagttggcgtgtgcgtaattgttaggtattggtgatattacgttaggtatttttcggcgtaacgaatttttgacgagcgtatttgtattaggcggtatttatttagcgtcgtaggtagttagtcggaggttttcgtttttattataagtttggcggtgatcggtaatagatattagatattcggcgatgcgtatttttattgacgtttcggtagcgggtttggttaggtagtcggtgcgcgattatttttgttttagcgtaacgtcggaatattttttttttatggaaagcgaaagttttgatatcgggcgtttttaaagggcgtaggatttgcgtgtttaagtttgtcgcgggtaaatagcggcgcggatattcgagtcgggaaaatcgggggtttttaagaatttcgggcgcgttaagtt

SEQ ID NO: 17104 - DNA, 709 bp, Artificial Sequence
  chemically treated genomic DNA (Homo sapiens) CpG-island No: 17104
aacttaacgcgcccgaaattcttaaaaacccccgattttcccgactcgaatatccgcgccgctatttacccgcgacaaacttaaacacgcaaatcctacgccctttaaaaacgcccgatatcaaaactttcgctttccataaaaaaaaaatattccgacgttacgctaaaacaaaaataatcgcgcaccgactacctaaccaaacccgctaccgaaacgtcaataaaaatacgcatcgccgaatatctaatatctattaccgatcaccgccaaacttataataaaaacgaaaacctccgactaactacctacgacgctaaataaataccgcctaatacaaatacgctcgtcaaaaattcgttacgccgaaaaatacctaacgtaatatcaccaatacctaacaattacgcacacgccaactaacctatctacaactattaaccgactaacgactacgcaaaacgcgaaaacgcgatctaacgataaactttatcgtacgtaaaaaacatttataatcgataacgcgttatataccgaaaaatttaaacgaactaaacaacctaaatttatccgataacgaaatccgctttcacgataaaacgctactaacgctaataaaaaaaacgcaaacattaccgaaaaataccttaccgcaaccgatacttaacctaataaacataccgaattatcgtaaaacgtttaaaacgat

SEQ ID NO: 17105 - DNA, 757 bp, Artificial Sequence
  chemically treated genomic DNA (Homo sapiens) CpG-island No: 17105
ttgcgtttcgtttcgcgggtgttcgatttaagtcgagttcgagttcgagtttaggtaggagttttatagatagttttttttttttttattttttgtaggcgttttacgcgtgcgattttttcggttaagattcgcgggaggaggtcgtttttttttcggcgtataggcggggtttcgggcgcgtttcgcgtttttttcgcgcgtcggggcggaggagcgggcgtcgcgtatttatcgtttaggtcgggagggcgggttcggtttttcggaagaagggagtgggaaggcggttaaaggggttgaaggggcgggtcgggtcggtttgggaggggacgcggagggggcgggtcgggttgcgttcgttttagtcgcggttttatagtagcgggcggcgggattcgggatttagtttggcgacggcgatttcgacgcgggtttttaggatttttcggcgttttatttttggagtagtttttgtcgttagcgttaggtttatttcggaattttagggattttcggcgtcgaacggattcgggtcgggtgtaacggggttttcggattggagaagacgcgggtggtatcgtgcgagttttaggagtttcgggtttattgcgaggtttcggggggcgtagatttgtagagattgcggttaacgggaaggtgagttcgcggggttagtaggcggcgttgtgggggtcggggatagtatgtttggggatagaggaattaaggtttgtaagagtagtggggtttttta

SEQ ID NO: 17106 - DNA, 757 bp, Artificial Sequence
  chemically treated genomic DNA (Homo sapiens) CpG-island No: 17106
taaaaaaccccactactcttacaaaccttaattcctctatccccaaacatactatccccgacccccacaacgccgcctactaaccccgcgaactcaccttcccgttaaccgcaatctctacaaatctacgccccccgaaacctcgcaataaacccgaaactcctaaaactcgcacgataccacccgcgtcttctccaatccgaaaaccccgttacacccgacccgaatccgttcgacgccgaaaatccctaaaattccgaaataaacctaacgctaacgacaaaaactactccaaaaataaaacgccgaaaaatcctaaaaacccgcgtcgaaatcgccgtcgccaaactaaatcccgaatcccgccgcccgctactataaaaccgcgactaaaacgaacgcaacccgacccgccccctccgcgtcccctcccaaaccgacccgacccgccccttcaacccctttaaccgccttcccactcccttcttccgaaaaaccgaacccgccctcccgacctaaacgataaatacgcgacgcccgctcctccgccccgacgcgcgaaaaaaacgcgaaacgcgcccgaaaccccgcctatacgccgaaaaaaaaacgacctcctcccgcgaatcttaaccgaaaaaatcgcacgcgtaaaacgcctacaaaaaataaaaaaaaaaaaaactatctataaaactcctacctaaactcgaactcgaactcgacttaaatcgaacacccgcgaaacgaaacgcaa

SEQ ID NO: 17107 - DNA, 757 bp, Artificial Sequence
  chemically treated genomic DNA (Homo sapiens) CpG-island No: 17107
tggggagttttattatttttgtaaattttaatttttttgtttttaagtatattgttttcgatttttataacgtcgtttgttaatttcgcgggtttattttttcgttggtcgtagtttttgtaggtttgcgtttttcgaggtttcgtagtggattcggggtttttggagttcgtacggtgttattcgcgttttttttagttcggggatttcgttgtattcggttcgggttcgttcggcgtcgagagtttttgggatttcggggtggatttgacgttggcggtaggggttgttttagaggtggggcgtcgggagattttgggggttcgcgtcgagatcgtcgtcgttaagttgggtttcgggtttcgtcgttcgttgttgtagagtcgcggttggagcgaacgtagttcggttcgtttttttcgcgtttttttttaagtcggttcggttcgtttttttagtttttttggtcgtttttttatttttttttttcggggagtcgagttcgttttttcggtttaggcggtgagtgcgcggcgttcgttttttcgtttcggcgcgcgggggagacgcggggcgcgttcggggtttcgtttgtgcgtcgggaagggggcggttttttttcgcgggttttggtcgggaggatcgtacgcgtggggcgtttgtaggaagtgggaagggaagaggttgtttgtaaagtttttgtttgggttcgggttcgggttcggtttgggtcggatattcgcggagcgaagcgtaa

SEQ ID NO: 17108 - DNA, 757 bp, Artificial Sequence
  chemically treated genomic DNA (Homo sapiens) CpG-island No: 17108
ttacgcttcgctccgcgaatatccgacccaaaccgaacccgaacccgaacccaaacaaaaactttacaaacaacctcttcccttcccacttcctacaaacgccccacgcgtacgatcctcccgaccaaaacccgcgaaaaaaaaccgcccccttcccgacgcacaaacgaaaccccgaacgcgccccgcgtctcccccgcgcgccgaaacgaaaaaacgaacgccgcgcactcaccgcctaaaccgaaaaaacgaactcgactccccgaaaaaaaaaaataaaaaaacgaccaaaaaaactaaaaaaacgaaccgaaccgacttaaaaaaaaacgcgaaaaaaacgaaccgaactacgttcgctccaaccgcgactctacaacaacgaacgacgaaacccgaaacccaacttaacgacgacgatctcgacgcgaacccccaaaatctcccgacgccccacctctaaaacaacccctaccgccaacgtcaaatccaccccgaaatcccaaaaactctcgacgccgaacgaacccgaaccgaatacaacgaaatccccgaactaaaaaaaacgcgaataacaccgtacgaactccaaaaaccccgaatccactacgaaacctcgaaaaacgcaaacctacaaaaactacgaccaacgaaaaaataaacccgcgaaattaacaaacgacgttataaaaatcgaaaacaatatacttaaaaacaaaaaaattaaaatttacaaaaataataaaactcccca

SEQ ID NO: 17109 - DNA, 699 bp, Artificial Sequence
  chemically treated genomic DNA (Homo sapiens) CpG-island No: 17109
gcgggtcgttaaattacgtttttaattttgttagcgatttatttatcgtcgaaggtgttacgtttattcgtttcgtcgtttcggttacgttgcgtttttgtattagtagttgtagataaaggtagtagattgagattaagcgtggtgatggatttttttatgagcggacggggcgtttaggcgcgacgaatataattagtaataggtttattatgttataggtaattagaatttcgattagtatattttatgcgtcgatattaattatcgttgttagttaaatttatagtgacgaatcgtaaatttgcgtaatatttaaggtcgagttggttacgttcgcgcgtaatgaaaacggttttaacgtttgatttatcgttatattaaaatttatcgagaaatcggcgtaaattagcgtgatattaaatagagaaatcgtatgggaaggtgaaacggtaagagtgattttcgtcgttaggaataatatttgcgaggtgattattaacgtacgtggtttaaaaatttttagcgtaaatggcgtggagaatgaaacggttatgttgacgttagcggttagcgttataatggtggcgtatttatcgcgtttaaattttatgatttttattagtaatatcggtgacgtgttgacgaaagtgaggattatcgaaacgttgagggtggtgataataatacggttgagga

SEQ ID NO: 17110 - DNA, 699 bp, Artificial Sequence
  chemically treated genomic DNA (Homo sapiens) CpG-island No: 17110
tcctcaaccgtattattatcaccaccctcaacgtttcgataatcctcactttcgtcaacacgtcaccgatattactaataaaaatcataaaatttaaacgcgataaatacgccaccattataacgctaaccgctaacgtcaacataaccgtttcattctccacgccatttacgctaaaaatttttaaaccacgtacgttaataatcacctcgcaaatattattcctaacgacgaaaatcactcttaccgtttcaccttcccatacgatttctctatttaatatcacgctaatttacgccgatttctcgataaattttaatataacgataaatcaaacgttaaaaccgttttcattacgcgcgaacgtaaccaactcgaccttaaatattacgcaaatttacgattcgtcactataaatttaactaacaacgataattaatatcgacgcataaaatatactaatcgaaattctaattacctataacataataaacctattactaattatattcgtcgcgcctaaacgccccgtccgctcataaaaaaatccatcaccacgcttaatctcaatctactacctttatctacaactactaatacaaaaacgcaacgtaaccgaaacgacgaaacgaataaacgtaacaccttcgacgataaataaatcgctaacaaaattaaaaacgtaatttaacgacccgc

SEQ ID NO: 17111 - DNA, 699 bp, Artificial Sequence
  chemically treated genomic DNA (Homo sapiens) CpG-island No: 17111
tttttagtcgtgttgttattattatttttagcgtttcggtgatttttattttcgttaatacgttatcggtattgttgatggaaattatggggtttgagcgcggtgaatacgttattattatggcgttgatcgttggcgttagtatgatcgttttattttttacgttatttgcgttgggaatttttaagttacgtacgttgatgattatttcgtaggtgttatttttggcggcggggattatttttgtcgttttatttttttatgcggtttttttgtttggtattacgttgatttgcgtcggtttttcggtaggttttggtgtggcgatgagttaggcgttagggtcgtttttattacgcgcgggcgtagttagttcgattttaggtattgcgtaggtttgcggttcgttattgtggatttggttggtagcggtggttggtatcggcgtatggaatatgttgatcgggattttgattgtttgtagtatagtgagtttgttgttgattatgttcgtcgcgtttggacgtttcgttcgtttatggagaaatttattattacgtttgattttaatttgttgtttttgtttgtaattgttgatgtaggagcgtagcgtaatcgaagcggcgaagcggataaacgtgatattttcggcggtgagtaagtcgttggtaaagttaagagcgtggtttgacgattcgt

SEQ ID NO: 17112 - DNA, 699 bp, Artificial Sequence
  chemically treated genomic DNA (Homo sapiens) CpG-island No: 17112
acgaatcgtcaaaccacgctcttaactttaccaacgacttactcaccgccgaaaatatcacgtttatccgcttcgccgcttcgattacgctacgctcctacatcaacaattacaaacaaaaacaacaaattaaaatcaaacgtaataataaatttctccataaacgaacgaaacgtccaaacgcgacgaacataatcaacaacaaactcactatactacaaacaatcaaaatcccgatcaacatattccatacgccgataccaaccaccgctaccaaccaaatccacaataacgaaccgcaaacctacgcaatacctaaaatcgaactaactacgcccgcgcgtaataaaaacgaccctaacgcctaactcatcgccacaccaaaacctaccgaaaaaccgacgcaaatcaacgtaataccaaacaaaaaaaccgcataaaaaaataaaacgacaaaaataatccccgccgccaaaaataacacctacgaaataatcatcaacgtacgtaacttaaaaattcccaacgcaaataacgtaaaaaataaaacgatcatactaacgccaacgatcaacgccataataataacgtattcaccgcgctcaaaccccataatttccatcaacaataccgataacgtattaacgaaaataaaaatcaccgaaacgctaaaaataataataacaacacgactaaaaa

SEQ ID NO: 17113 - DNA, 652 bp, Artificial Sequence
  chemically treated genomic DNA (Homo sapiens) CpG-island No: 17113
atagacgagcgaggtaaataaggtatacgtacgagacgtaacgcgattaaataagcgcgataaagacgagtatagtagagagcgtatagaagatacgtaagtaagagcgagtatagtagtatagtagcgtagatattagtagagcgagatcgacgcggaagtcgattaagttacgcgagtagtagtatatatagcgcgaacgttcgtatagagcggaggagcgagttacgtaaggtatagaatagatataagataagagatcgagtagtacgataggagtaagcgtacgaaaagcggaagatagagtatatagtagagtagacgtcgtagatatacgaggagtagaataggagacgatagacgcgtaagaagtaaaggcgtaagagaatatcgagaacgaaggaataaatgagattacgtagtagagtgagacgaagaaggcgtaaagtaggtaggcgcgcggaaagagcgtaagggtagtaagaagtagatagaagacgagacgaattaaggttcgaagaaggaagcgagtattaggaggagcgataggaaattagcgagaggagagtaggtagagaggaatacgaataattagtagcgaagtagacgattatgataagttagtacgtaggaaaaaagaagtagatagtaa

SEQ ID NO: 17114 - DNA, 652 bp, Artificial Sequence
  chemically treated genomic DNA (Homo sapiens) CpG-island No: 17114
ttactatctacttcttttttcctacgtactaacttatcataatcgtctacttcgctactaattattcgtattcctctctacctactctcctctcgctaatttcctatcgctcctcctaatactcgcttccttcttcgaaccttaattcgtctcgtcttctatctacttcttactacccttacgctctttccgcgcgcctacctactttacgccttcttcgtctcactctactacgtaatctcatttattccttcgttctcgatattctcttacgcctttacttcttacgcgtctatcgtctcctattctactcctcgtatatctacgacgtctactctactatatactctatcttccgcttttcgtacgcttactcctatcgtactactcgatctcttatcttatatctattctataccttacgtaactcgctcctccgctctatacgaacgttcgcgctatatatactactactcgcgtaacttaatcgacttccgcgtcgatctcgctctactaatatctacgctactatactactatactcgctcttacttacgtatcttctatacgctctctactatactcgtctttatcgcgcttatttaatcgcgttacgtctcgtacgtataccttatttacctcgctcgtctat

SEQ ID NO: 17115 - DNA, 652 bp, Artificial Sequence
  chemically treated genomic DNA (Homo sapiens) CpG-island No: 17115
ttgttgtttgtttttttttttttacgtgttgatttgttatgatcgtttgtttcgttgttggttgttcgtgtttttttttgtttgtttttttttcgttggttttttgtcgttttttttggtgttcgttttttttttcggattttggttcgtttcgttttttgtttgttttttgttgtttttgcgtttttttcgcgcgtttatttgttttgcgtttttttcgttttattttgttgcgtagttttatttgttttttcgttttcggtgtttttttgcgtttttgttttttgcgcgtttgtcgttttttgttttgtttttcgtgtatttacgacgtttgttttgttgtgtgttttgtttttcgtttttcgtgcgtttgtttttgtcgtgttgttcgattttttgttttgtgtttgttttgtgttttgcgtggttcgttttttcgttttgtacgggcgttcgcgttgtgtgtgttgttgttcgcgtggtttggtcggttttcgcgtcggtttcgttttgttggtgtttgcgttgttgtgttgttgtgttcgtttttgtttgcgtgttttttgtacgttttttgttgtgttcgtttttgtcgcgtttgtttgatcgcgttgcgtttcgtgcgtgtgttttgtttgtttcgttcgtttgt

SEQ ID NO: 17116 - DNA, 652 bp, Artificial Sequence
  chemically treated genomic DNA (Homo sapiens) CpG-island No: 17116
acaaacgaacgaaacaaacaaaacacacgcacgaaacgcaacgcgatcaaacaaacgcgacaaaaacgaacacaacaaaaaacgtacaaaaaacacgcaaacaaaaacgaacacaacaacacaacaacgcaaacaccaacaaaacgaaaccgacgcgaaaaccgaccaaaccacgcgaacaacaacacacacaacgcgaacgcccgtacaaaacgaaaaaacgaaccacgcaaaacacaaaacaaacacaaaacaaaaaatcgaacaacacgacaaaaacaaacgcacgaaaaacgaaaaacaaaacacacaacaaaacaaacgtcgtaaatacacgaaaaacaaaacaaaaaacgacaaacgcgcaaaaaacaaaaacgcaaaaaaacaccgaaaacgaaaaaacaaataaaactacgcaacaaaataaaacgaaaaaaacgcaaaacaaataaacgcgcgaaaaaaacgcaaaaacaacaaaaaacaaacaaaaaacgaaacgaaccaaaatccgaaaaaaaaaacgaacaccaaaaaaaacgacaaaaaaccaacgaaaaaaaaacaaacaaaaaaaaacacgaacaaccaacaacgaaacaaacgatcataacaaatcaacacgtaaaaaaaaaaaaacaaacaacaa

SEQ ID NO: 17117 - DNA, 724 bp, Artificial Sequence
  chemically treated genomic DNA (Homo sapiens) CpG-island No: 17117
tttcgttagttgttagttcgcgtcgttcgcggttcgcgtttatttttttttttggtttttcggtttcggggtcgttcgcgggttaggtttaattcggggtagggttcgtagagggcgcgggattcggtaggggcggttatgttagtttcgtagaggggatttttagtttgcgagtcgggtcggagggtcggcgttcgtttcgcggcgattttggttcgattttttattgataagatcggagtcgggaggcgggtagaagtttggagacgttttaggggtagtgaaaaatggtggcgtttttcggaagatcgagggtgttttttggcgaggcgaggtcgttagtgaaggagttcggttggtcgggagtcggggaggttcgggggttgggggttgcggggtgggggttgaggggcgggagaaggggttgcggtagagagcgagaaaaataagatttaggtttcgaggaatcgtttttttttcggttcgacgtgcgtacgagcgtattttttttttttcgatcgtcgtttcggagtcgttttcgtagaaatgttatttagatgtttagttttttttttcgtcgaggttttcgtagggagttgcgttagcgagcgcgaagttagtagttggttcgagtttattttttagatgggtgaggggaagtcggttttgtgttttcgttttttttttcggttcgaatttttaggtttttttttacgagtagtta

SEQ ID NO: 17118 - DNA, 724 bp, Artificial Sequence
  chemically treated genomic DNA (Homo sapiens) CpG-island No: 17118
taactactcgtaaaaaaaaacctaaaaattcgaaccgaaaaaaaaaacgaaaacacaaaaccgacttcccctcacccatctaaaaaataaactcgaaccaactactaacttcgcgctcgctaacgcaactccctacgaaaacctcgacgaaaaaaaaaactaaacatctaaataacatttctacgaaaacgactccgaaacgacgatcgaaaaaaaaaaaatacgctcgtacgcacgtcgaaccgaaaaaaaaacgattcctcgaaacctaaatcttatttttctcgctctctaccgcaaccccttctcccgcccctcaacccccaccccgcaacccccaacccccgaacctccccgactcccgaccaaccgaactccttcactaacgacctcgcctcgccaaaaaacaccctcgatcttccgaaaaacgccaccatttttcactacccctaaaacgtctccaaacttctacccgcctcccgactccgatcttatcaataaaaaatcgaaccaaaatcgccgcgaaacgaacgccgaccctccgacccgactcgcaaactaaaaatcccctctacgaaactaacataaccgcccctaccgaatcccgcgccctctacgaaccctaccccgaattaaacctaacccgcgaacgaccccgaaaccgaaaaaccaaaaaaaaaaataaacgcgaaccgcgaacgacgcgaactaacaactaacgaaa

SEQ ID NO: 17119 - DNA, 724 bp, Artificial Sequence
  chemically treated genomic DNA (Homo sapiens) CpG-island No: 17119
tggttgttcgtgggaaaaggtttagaggttcgggtcgagaagaggagcgaaagtatagagtcgatttttttttatttatttgggaaatgggttcgggttaattgttgatttcgcgttcgttggcgtagttttttgcggagatttcggcggggagggaggttgaatatttggatgatatttttgcgagagcggtttcggagcggcggtcggggagggagaggtgcgttcgtgcgtacgtcgggtcgggagggaggcgatttttcggggtttgggttttgtttttttcgttttttatcgtagttttttttttcgttttttagtttttatttcgtagtttttagttttcgagttttttcggttttcgattagtcgagtttttttattggcggtttcgtttcgttagagggtattttcgatttttcggaaaacgttattattttttattgtttttggagcgtttttaggtttttgttcgtttttcgatttcgattttgttaatgaagaatcgggttaggatcgtcgcggagcggacgtcgatttttcgattcggttcgtaggttgggagttttttttgcgaggttggtatggtcgtttttatcgggtttcgcgttttttgcggattttgtttcgggttgggtttggttcgcgggcggtttcgggatcgggggattaggagggagagtagacgcgggtcgcggacggcgcggattgatagttggcgaga

SEQ ID NO: 17120 - DNA, 724 bp, Artificial Sequence
  chemically treated genomic DNA (Homo sapiens) CpG-island No: 17120
tctcgccaactatcaatccgcgccgtccgcgacccgcgtctactctccctcctaatcccccgatcccgaaaccgcccgcgaaccaaacccaacccgaaacaaaatccgcaaaaaacgcgaaacccgataaaaacgaccataccaacctcgcaaaaaaaactcccaacctacgaaccgaatcgaaaaatcgacgtccgctccgcgacgatcctaacccgattcttcattaacaaaatcgaaatcgaaaaacgaacaaaaacctaaaaacgctccaaaaacaataaaaaataataacgttttccgaaaaatcgaaaataccctctaacgaaacgaaaccgccaataaaaaaactcgactaatcgaaaaccgaaaaaactcgaaaactaaaaactacgaaataaaaactaaaaaacgaaaaaaaaaactacgataaaaaacgaaaaaaacaaaacccaaaccccgaaaaatcgcctccctcccgacccgacgtacgcacgaacgcacctctccctccccgaccgccgctccgaaaccgctctcgcaaaaatatcatccaaatattcaacctccctccccgccgaaatctccgcaaaaaactacgccaacgaacgcgaaatcaacaattaacccgaacccatttcccaaataaataaaaaaaaatcgactctatactttcgctcctcttctcgacccgaacctctaaaccttttcccacgaacaacca

SEQ ID NO: 17121 - DNA, 520 bp, Artificial Sequence
  chemically treated genomic DNA (Homo sapiens) CpG-island No: 17121
gttaacgacgttagagtcggaaatgacgataacggtgagggttttcgggcggggtttgggataggtagtttcggggttcgcggttttatatcggaaataaaatagcggttggtttggaaggaatttgagttacgagtcgcggcggtagcggggcggcggggaagcgtatgtgcgtgatggggagttcgggtaagttaggaaggtatcgcggatatgggcggtcgcgggtagggttcggttttttgtggtcgttcgggtcgcgaagtcggtgttttaaaagatgaggggcggggcgcggtcggttggggttggggaatttcgtgtgggaaattaggaggggcggttcgtttttcgggtttcgggcgcggtcgggtggagagagatttcggggagttttggttcggaaatgttgtttgttcgaagacgttttagggcgtaggtgttttgggtcgggattagtagtcgtttgaattggagtggagtaggagaaagaggaagcgttttgggttgggtttgtttg

SEQ ID NO: 17122 - DNA, 520 bp, Artificial Sequence
  chemically treated genomic DNA (Homo sapiens) CpG-island No: 17122
caaacaaacccaacccaaaacgcttcctctttctcctactccactccaattcaaacgactactaatcccgacccaaaacacctacgccctaaaacgtcttcgaacaaacaacatttccgaaccaaaactccccgaaatctctctccacccgaccgcgcccgaaacccgaaaaacgaaccgcccctcctaatttcccacacgaaattccccaaccccaaccgaccgcgccccgcccctcatcttttaaaacaccgacttcgcgacccgaacgaccacaaaaaaccgaaccctacccgcgaccgcccatatccgcgataccttcctaacttacccgaactccccatcacgcacatacgcttccccgccgccccgctaccgccgcgactcgtaactcaaattccttccaaaccaaccgctattttatttccgatataaaaccgcgaaccccgaaactacctatcccaaaccccgcccgaaaaccctcaccgttatcgtcatttccgactctaacgtcgttaac

SEQ ID NO: 17123 - DNA, 520 bp, Artificial Sequence
  chemically treated genomic DNA (Homo sapiens) CpG-island No: 17123
taagtagatttagtttaagacgtttttttttttttttattttattttagtttagacggttattaatttcggtttaaggtatttgcgttttgagacgttttcgagtaaatagtattttcggattaaggtttttcggaatttttttttattcggtcgcgttcgaagttcgagaaacgggtcgttttttttggttttttatacggggttttttagttttaatcggtcgcgtttcgttttttattttttaggatatcggtttcgcggttcgggcggttataaagggtcgggttttgttcgcggtcgtttatgttcgcggtgtttttttggtttgttcggattttttattacgtatatacgttttttcgtcgtttcgttgtcgtcgcggttcgtagtttaggttttttttagattagtcgttgttttgttttcgatgtgaaatcgcggatttcggagttgtttgttttaggtttcgttcgagaatttttatcgttgtcgttattttcggttttggcgtcgttggt

SEQ ID NO: 17124 - DNA, 520 bp, Artificial Sequence
  chemically treated genomic DNA (Homo sapiens) CpG-island No: 17124
accaacgacgccaaaaccgaaaataacgacaacgataaaaattctcgaacgaaacctaaaacaaacaactccgaaatccgcgatttcacatcgaaaacaaaacaacgactaatctaaaaaaaacctaaactacgaaccgcgacgacaacgaaacgacgaaaaaacgtatatacgtaataaaaaatccgaacaaaccaaaaaaacaccgcgaacataaacgaccgcgaacaaaacccgaccctttataaccgcccgaaccgcgaaaccgatatcctaaaaaataaaaaacgaaacgcgaccgattaaaactaaaaaaccccgtataaaaaaccaaaaaaaacgacccgtttctcgaacttcgaacgcgaccgaataaaaaaaaattccgaaaaaccttaatccgaaaatactatttactcgaaaacgtctcaaaacgcaaataccttaaaccgaaattaataaccgtctaaactaaaataaaataaaaaaaaaaaaaaacgtcttaaactaaatctactta

SEQ ID NO: 17125 - DNA, 979 bp, Artificial Sequence
  chemically treated genomic DNA (Homo sapiens) CpG-island No: 17125
ttttttgcggttcggtcgatttcgcgggtttgggtttgggcgggtatcgacggagcggttttggttgtagtttttcggcgttagcgaagataggtagggaggcggagggattggaagttttcgggcgtttagcggcggggatttcgtatttcggggtttttgtaggaatttgttcgtttggtttacggcgacgggggtgtcggagaaagtgggggtcgtagagaagatttcgtttcggttcgtttttcggaggtgggcgtagggttatcgttcggtatcgcgcgtttttcggtttggaggaaaggaaatgtagagagtcggggagttggtgcgggacggtttcggcgcgtatttttcgttcgttcggattttttttttaggcgaatgtcgttttcggcgcgtggtataagcgaggttttggagatcgtgcgtttttttcgggaggtgttattgggtcgcgggtttggagcgttcgggagttttagcggttgtcggtatttgcgcggttatttcgggtttttcgtgggaatcgcgttttttcgtttcgggggtgcgcggcgcgtttttggggtggggacgcggggtgtttggttagggttggatcgatgtagaggggggtcgtgggcgggggttacggggacgggcgtttgcggattgcggcggtttcggagtcggttggggattttgtagggggaggtttggtcggcggttattcgttttttcgttttttggcgtttagggtcgtcgttttcggttttagtttaaggtagacgcgtttttcgggaataatacgttgagggcgtttattttgcgtgttcggggttattcggtttttgttttcgggcggtaggagaggtcgagtttttacggttttcggagtagtttcgtgattagattcggattggttttggagttgaaggggttgtttgttattaaatgaatcgaaaaaattgaattttttagatttcggaatggtaga

SEQ ID NO: 17126 - DNA, 979 bp, Artificial Sequence
  chemically treated genomic DNA (Homo sapiens) CpG-island No: 17126
tctaccattccgaaatctaaaaaattcaattttttcgattcatttaataacaaacaaccccttcaactccaaaaccaatccgaatctaatcacgaaactactccgaaaaccgtaaaaactcgacctctcctaccgcccgaaaacaaaaaccgaataaccccgaacacgcaaaataaacgccctcaacgtattattcccgaaaaacgcgtctaccttaaactaaaaccgaaaacgacgaccctaaacgccaaaaaacgaaaaaacgaataaccgccgaccaaacctccccctacaaaatccccaaccgactccgaaaccgccgcaatccgcaaacgcccgtccccgtaacccccgcccacgacccccctctacatcgatccaaccctaaccaaacaccccgcgtccccaccccaaaaacgcgccgcgcacccccgaaacgaaaaaacgcgattcccacgaaaaacccgaaataaccgcgcaaataccgacaaccgctaaaactcccgaacgctccaaacccgcgacccaataacacctcccgaaaaaaacgcacgatctccaaaacctcgcttataccacgcgccgaaaacgacattcgcctaaaaaaaaaatccgaacgaacgaaaaatacgcgccgaaaccgtcccgcaccaactccccgactctctacatttcctttcctccaaaccgaaaaacgcgcgataccgaacgataaccctacgcccacctccgaaaaacgaaccgaaacgaaatcttctctacgacccccactttctccgacacccccgtcgccgtaaaccaaacgaacaaattcctacaaaaaccccgaaatacgaaatccccgccgctaaacgcccgaaaacttccaatccctccgcctccctacctatcttcgctaacgccgaaaaactacaaccaaaaccgctccgtcgatacccgcccaaacccaaacccgcgaaatcgaccgaaccgcaaaaaa

SEQ ID NO: 17127 - DNA, 979 bp, Artificial Sequence
  chemically treated genomic DNA (Homo sapiens) CpG-island No: 17127
tttgttatttcgaagtttgaaaagtttagttttttcggtttatttggtggtaaataatttttttaattttaaggttagttcgggtttggttacggggttatttcgagggtcgtggaagttcgattttttttgtcgttcgagggtagggatcgggtggtttcgggtacgtagggtgggcgtttttaacgtgttgttttcggggaacgcgtttgttttgagttagggtcgaaggcggcgattttaggcgttagagggcgggaaggcgggtggtcgtcgattaagtttttttttatagggtttttagtcgatttcgggatcgtcgtagttcgtagacgttcgttttcgtggttttcgtttacggtttttttttgtatcggtttagttttgattaggtatttcgcgtttttattttaggaacgcgtcgcgtattttcgaggcggagaggcgcggtttttacgggaggttcggggtggtcgcgtaggtgtcggtagtcgttggggttttcggacgttttaggttcgcggtttagtggtatttttcgggaggggcgtacggtttttagggtttcgtttgtattacgcgtcgggagcggtattcgtttgaagggaaggttcgagcgggcggagggtgcgcgtcggggtcgtttcgtattagtttttcggttttttgtatttttttttttttaggtcggggggcgcgcggtgtcgagcgatgattttgcgtttattttcggagagcgagtcggggcggggttttttttgcggtttttatttttttcgatattttcgtcgtcgtgagttaggcgagtaaatttttgtagaagtttcggggtgcggggttttcgtcgttgggcgttcgggggtttttagttttttcgtttttttatttgttttcgttggcgtcgggaggttgtagttagggtcgtttcgtcggtgttcgtttaggtttaagttcgcgaggtcggtcgggtcgtaaggaa

SEQ ID NO: 17128 - DNA, 979 bp, Artificial Sequence
  chemically treated genomic DNA (Homo sapiens) CpG-island No: 17128
ttccttacgacccgaccgacctcgcgaacttaaacctaaacgaacaccgacgaaacgaccctaactacaacctcccgacgccaacgaaaacaaataaaaaaacgaaaaaactaaaaacccccgaacgcccaacgacgaaaaccccgcaccccgaaacttctacaaaaatttactcgcctaactcacgacgacgaaaatatcgaaaaaaataaaaaccgcaaaaaaaaccccgccccgactcgctctccgaaaataaacgcaaaatcatcgctcgacaccgcgcgccccccgacctaaaaaaaaaaaaatacaaaaaaccgaaaaactaatacgaaacgaccccgacgcgcaccctccgcccgctcgaaccttcccttcaaacgaataccgctcccgacgcgtaatacaaacgaaaccctaaaaaccgtacgcccctcccgaaaaataccactaaaccgcgaacctaaaacgtccgaaaaccccaacgactaccgacacctacgcgaccaccccgaacctcccgtaaaaaccgcgcctctccgcctcgaaaatacgcgacgcgttcctaaaataaaaacgcgaaatacctaatcaaaactaaaccgatacaaaaaaaaaccgtaaacgaaaaccacgaaaacgaacgtctacgaactacgacgatcccgaaatcgactaaaaaccctataaaaaaaaacttaatcgacgaccacccgccttcccgccctctaacgcctaaaatcgccgccttcgaccctaactcaaaacaaacgcgttccccgaaaacaacacgttaaaaacgcccaccctacgtacccgaaaccacccgatccctaccctcgaacgacaaaaaaaatcgaacttccacgaccctcgaaataaccccgtaaccaaacccgaactaaccttaaaattaaaaaaattatttaccaccaaataaaccgaaaaaactaaacttttcaaacttcgaaataacaaa

SEQ ID NO: 17129 - DNA, 965 bp, Artificial Sequence
  chemically treated genomic DNA (Homo sapiens) CpG-island No: 17129
tttgcggatcgaaaacgtcgttcgcgcgaatgcgtttaacgcgcgttagaattttttgtttaaatgcggttttgtatttcgtcggaacgaagacgcgggtgttattggtatatatttgatcggagttgaagaagtttgttattatggcgatatcggcggcgagatcgagattcgtattatcgaaaacgattagcggtgatttatcgtttagttttatggttattttttttagggaagaggtcgtcgagttagttattatttttttgtcgttggcgatatcgtcggtaaatgatattttggtaatgttcggatgttcggttagatattgttcggttttcgcgtttacgttcggtaatacgttaaatacgtcgttcggtaggttcgtttcgttgtaaattttagttagttttaacgcggtaagcggggtaatttcgttcggtttgaaaattattgcgttgtttgtcgttagcgtcggggcggatttttatagggtaatttggatcgggtagttttatgcgttaatttttgttattacgtttagcggttcgcggcgggtatatataaaggacgttttacgtaacgggatttggttgttttttagcgtcgggattagttcggcgtagtattttagtacgttcgtatcggtaacgatatcgacggttgaggttttcgaatatgttttttcggtgtcgagggttttagttatgcgagttcgttattgcgtttacgtcgaatattaacggttcgacgtagaatacgcgaggttttatgcggttatcgagttcgatttttgtttgttggcgttttacgggtattaatttcggtcggggttgcggtttaacgtttttggcgtgtagttttagggatcgtggggggaaattcgttaaaggttgtttcggaaattttaaagggagatgaaaggcgaaagtatattgtgagtataataagcgattgttttgtttttt

SEQ ID NO: 17130 - DNA, 965 bp, Artificial Sequence
  chemically treated genomic DNA (Homo sapiens) CpG-island No: 17130
aaaaaacaaaacaatcgcttattatactcacaatatactttcgcctttcatctccctttaaaatttccgaaacaacctttaacgaatttccccccacgatccctaaaactacacgccaaaaacgttaaaccgcaaccccgaccgaaattaatacccgtaaaacgccaacaaacaaaaatcgaactcgataaccgcataaaacctcgcgtattctacgtcgaaccgttaatattcgacgtaaacgcaataacgaactcgcataactaaaaccctcgacaccgaaaaaacatattcgaaaacctcaaccgtcgatatcgttaccgatacgaacgtactaaaatactacgccgaactaatcccgacgctaaaaaacaaccaaatcccgttacgtaaaacgtcctttatatatacccgccgcgaaccgctaaacgtaataacaaaaattaacgcataaaactacccgatccaaattaccctataaaaatccgccccgacgctaacgacaaacaacgcaataattttcaaaccgaacgaaattaccccgcttaccgcgttaaaactaactaaaatttacaacgaaacgaacctaccgaacgacgtatttaacgtattaccgaacgtaaacgcgaaaaccgaacaatatctaaccgaacatccgaacattaccaaaatatcatttaccgacgatatcgccaacgacaaaaaaataataactaactcgacgacctcttccctaaaaaaaataaccataaaactaaacgataaatcaccgctaatcgttttcgataatacgaatctcgatctcgccgccgatatcgccataataacaaacttcttcaactccgatcaaatatataccaataacacccgcgtcttcgttccgacgaaatacaaaaccgcatttaaacaaaaaattctaacgcgcgttaaacgcattcgcgcgaacgacgttttcgatccgcaaa

SEQ ID NO: 17131 - DNA, 965 bp, Artificial Sequence
  chemically treated genomic DNA (Homo sapiens) CpG-island No: 17131
aaaggataaaatagtcgtttattgtgtttatagtgtattttcgttttttatttttttttggggttttcggggtaatttttaacgggtttttttttacggtttttgggattatacgttaggaacgttgggtcgtagtttcggtcgagattgatgttcgtgaagcgttagtaggtaaaaatcgggttcgatgatcgtatggagtttcgcgtattttgcgtcgggtcgttgatattcggcgtgaacgtaatgacgaattcgtataattggaattttcgatatcggaaaagtatattcggaaattttaatcgtcgatatcgttatcggtgcggacgtgttggagtattacgtcgggttgatttcggcgttggaaggtagttagatttcgttgcgtgaaacgttttttgtgtatattcgtcgcgaatcgttgggcgtagtggtagggattggcgtatggaattattcgatttagattgttttgtggaaattcgtttcggcgttggcggtaggtaacgtaatgatttttaaatcgagcgaagttatttcgtttatcgcgttaaagttggttgaaatttatagcgaagcgggtttgtcggacggcgtatttaacgtgttgtcgggcgtgggcgcggagatcgggtaatatttgatcgagtattcgggtattgttaaagtgttatttatcggcggtgtcgttagcggtaaaaaagtgatggttaattcggcggttttttttttgaaagaagtgattatggaattgggcggtaaattatcgttgatcgttttcgatgatgcggatttcgatttcgtcgtcgatatcgttatgatggtaaatttttttagtttcggttaggtgtgtattaatggtattcgcgttttcgtttcggcgaaatgtaaagtcgtatttgagtagaaaattttggcgcgcgttgagcgtattcgcgcgggcgacgttttcgattcgtaaa

SEQ ID NO: 17132 - DNA, 965 bp, Artificial Sequence
  chemically treated genomic DNA (Homo sapiens) CpG-island No: 17132
tttacgaatcgaaaacgtcgcccgcgcgaatacgctcaacgcgcgccaaaattttctactcaaatacgactttacatttcgccgaaacgaaaacgcgaataccattaatacacacctaaccgaaactaaaaaaatttaccatcataacgatatcgacgacgaaatcgaaatccgcatcatcgaaaacgatcaacgataatttaccgcccaattccataatcacttctttcaaaaaaaaaaccgccgaattaaccatcacttttttaccgctaacgacaccgccgataaataacactttaacaatacccgaatactcgatcaaatattacccgatctccgcgcccacgcccgacaacacgttaaatacgccgtccgacaaacccgcttcgctataaatttcaaccaactttaacgcgataaacgaaataacttcgctcgatttaaaaatcattacgttacctaccgccaacgccgaaacgaatttccacaaaacaatctaaatcgaataattccatacgccaatccctaccactacgcccaacgattcgcgacgaatatacacaaaaaacgtttcacgcaacgaaatctaactaccttccaacgccgaaatcaacccgacgtaatactccaacacgtccgcaccgataacgatatcgacgattaaaatttccgaatatacttttccgatatcgaaaattccaattatacgaattcgtcattacgttcacgccgaatatcaacgacccgacgcaaaatacgcgaaactccatacgatcatcgaacccgatttttacctactaacgcttcacgaacatcaatctcgaccgaaactacgacccaacgttcctaacgtataatcccaaaaaccgtaaaaaaaaacccgttaaaaattaccccgaaaaccccaaaaaaaaataaaaaacgaaaatacactataaacacaataaacgactattttatccttt

SEQ ID NO: 17133 - DNA, 807 bp, Artificial Sequence
  chemically treated genomic DNA (Homo sapiens) CpG-island No: 17133
gggtttcggcgttcgcgagcggtttttatataggtagtcgcgtttttatttttaggtagggattttcgtgcgttttcgggtatattcgtttttttatcggtattttattgcgcgaatatatgcgcgttagtcggttttcgcgcgcgttcgtttgtcgaggaagcggcggttttcggggttgggggtagggttcggtggggcgggagcgtcgcggggtcgggtttcggcgttcggggaggggacgaggggcgggcgcggggcggtgttcggtttacgtgggcgggcgggagtagttgaaggttcgttcgggaatttgggttgttttttcgcgcgcggcgttggtttaggcggcggcggcgaaggaggaggaggaggaggaggaaggcggcggtggcggcggtaaaagaggagggaggacgggggcggcgtcggattggagtcgagcggtagcgcgagttgtttagggcgttgtcgtgagttcgttcgtcgggtttttattttcgagttatattttgtcgtgtttagtattgttcgcgttcgtgtttttgcggggagcgcgtcggggttgtttttcgaatgacgggcggaaggttcgatttcgacgatggcggtatttattgcggcggttgggaggagggtaaggcgtacgggtatggtatttgtacggggtttaagggttagggcgagtattcgggtttttggtcgtacggtttcgaggtggtcggaggttatatttggtttagcggtaatatttattagggttattgggcgtagggtaagcggtacgggttgggggtggagacgaag

SEQ ID NO: 17134 - DNA, 807 bp, Artificial Sequence
  chemically treated genomic DNA (Homo sapiens) CpG-island No: 17134
cttcgtctccacccccaacccgtaccgcttaccctacgcccaataaccctaataaatattaccgctaaaccaaatataacctccgaccacctcgaaaccgtacgaccaaaaacccgaatactcgccctaacccttaaaccccgtacaaataccatacccgtacgccttaccctcctcccaaccgccgcaataaataccgccatcgtcgaaatcgaaccttccgcccgtcattcgaaaaacaaccccgacgcgctccccgcaaaaacacgaacgcgaacaatactaaacacgacaaaatataactcgaaaataaaaacccgacgaacgaactcacgacaacgccctaaacaactcgcgctaccgctcgactccaatccgacgccgcccccgtcctccctcctcttttaccgccgccaccgccgccttcctcctcctcctcctcctccttcgccgccgccgcctaaaccaacgccgcgcgcgaaaaaacaacccaaattcccgaacgaaccttcaactactcccgcccgcccacgtaaaccgaacaccgccccgcgcccgcccctcgtcccctccccgaacgccgaaacccgaccccgcgacgctcccgccccaccgaaccctacccccaaccccgaaaaccgccgcttcctcgacaaacgaacgcgcgcgaaaaccgactaacgcgcatatattcgcgcaataaaataccgataaaaaaacgaatatacccgaaaacgcacgaaaatccctacctaaaaataaaaacgcgactacctatataaaaaccgctcgcgaacgccgaaaccc

SEQ ID NO: 17135 - DNA, 807 bp, Artificial Sequence
  chemically treated genomic DNA (Homo sapiens) CpG-island No: 17135
tttcgtttttatttttagttcgtgtcgtttgttttgcgtttagtagttttggtaggtgttgtcgttgggttaggtgtagttttcgattatttcgaagtcgtgcgattaggagttcgagtattcgttttggtttttgggtttcgtgtagatgttatgttcgtgcgttttgttttttttttagtcgtcgtagtaggtgtcgttatcgtcgaagtcgaatttttcgttcgttattcggggggtagtttcggcgcgtttttcgtaggggtacggacgcgggtagtgttgggtacggtagggtgtagttcgggggtgggggttcggcgggcgagtttacgatagcgttttgggtagttcgcgttgtcgttcggttttagttcgacgtcgttttcgttttttttttttttttgtcgtcgttatcgtcgttttttttttttttttttttttttttcgtcgtcgtcgtttgggttagcgtcgcgcgcgagaggatagtttaggttttcgagcggatttttagttgttttcgttcgtttacgtgagtcgggtatcgtttcgcgttcgtttttcgtttttttttcgggcgtcgaggttcggtttcgcggcgttttcgttttatcgggttttgtttttagtttcgggagtcgtcgttttttcggtaggcgggcgcgcgcggggatcggttggcgcgtatgtgttcgcgtagtgggatgtcggtgggagggcgagtgtattcggggacgtacgagaatttttgtttggagatgaaggcgcggttgtttgtgtgggggtcgttcgcgggcgtcggagttt

SEQ ID NO: 17136 - DNA, 807 bp, Artificial Sequence
  chemically treated genomic DNA (Homo sapiens) CpG-island No: 17136
aaactccgacgcccgcgaacgacccccacacaaacaaccgcgccttcatctccaaacaaaaattctcgtacgtccccgaatacactcgccctcccaccgacatcccactacgcgaacacatacgcgccaaccgatccccgcgcgcgcccgcctaccgaaaaaacgacgactcccgaaactaaaaacaaaacccgataaaacgaaaacgccgcgaaaccgaacctcgacgcccgaaaaaaaaacgaaaaacgaacgcgaaacgatacccgactcacgtaaacgaacgaaaacaactaaaaatccgctcgaaaacctaaactatcctctcgcgcgcgacgctaacccaaacgacgacgacgaaaaaaaaaaaaaaaaaaaaaaaaaacgacgataacgacgacaaaaaaaaaaaaaaaacgaaaacgacgtcgaactaaaaccgaacgacaacgcgaactacccaaaacgctatcgtaaactcgcccgccgaacccccacccccgaactacaccctaccgtacccaacactacccgcgtccgtacccctacgaaaaacgcgccgaaactaccccccgaataacgaacgaaaaattcgacttcgacgataacgacacctactacgacgactaaaaaaaaaacaaaacgcacgaacataacatctacacgaaacccaaaaaccaaaacgaatactcgaactcctaatcgcacgacttcgaaataatcgaaaactacacctaacccaacgacaacacctaccaaaactactaaacgcaaaacaaacgacacgaactaaaaataaaaacgaaa

SEQ ID NO: 17137 - DNA, 664 bp, Artificial Sequence
  chemically treated genomic DNA (Homo sapiens) CpG-island No: 17137
ggggcgttacggggttcggtagagtttgtgtattttcgttcgttacgagggtatttggagtaacgggttgtaagacgggtacggcgtggagatttacggggacggaggtgagcggcgtaacgggcggttcggttgtttcgcgagttggtgcggtgggttttgtttcggttgcggggaagcggggaggacgtcgggcgtacgtgttcggaaattcgttaaaatatttgggggcgttttttattttcgcgttcgcgttcgttttttttagagagggcgttgggatcggattggggcgcgagggttggatttgatttcgtttttggagcgggtcgtgtatttatatttaggggagttaggcgtgaatgtatttggtcggcgttagcgttgcgttgttatcgggagggagcgtcgttcgggagggttgggttggagagaggacgttgttatttgagttcgttatattacgtttttgatttttttttttttcggtcgggtttgaaatcgttattttcgtggagttagagcgaatattttgagcgggtgaggttggcggttcgtgttgatcgttttcgggattggttttacgtggagtcgtatttcgtttttggttttttagtagtttaaagatagaagttagaatttcgtaattaggatgttggggaat

SEQ ID NO: 17138 - DNA, 664 bp, Artificial Sequence
  chemically treated genomic DNA (Homo sapiens) CpG-island No: 17138
attccccaacatcctaattacgaaattctaacttctatctttaaactactaaaaaaccaaaaacgaaatacgactccacgtaaaaccaatcccgaaaacgatcaacacgaaccgccaacctcacccgctcaaaatattcgctctaactccacgaaaataacgatttcaaacccgaccgaaaaaaaaaaaaatcaaaaacgtaatataacgaactcaaataacaacgtcctctctccaacccaaccctcccgaacgacgctccctcccgataacaacgcaacgctaacgccgaccaaatacattcacgcctaactcccctaaatataaatacacgacccgctccaaaaacgaaatcaaatccaaccctcgcgccccaatccgatcccaacgccctctctaaaaaaaacgaacgcgaacgcgaaaataaaaaacgcccccaaatattttaacgaatttccgaacacgtacgcccgacgtcctccccgcttccccgcaaccgaaacaaaacccaccgcaccaactcgcgaaacaaccgaaccgcccgttacgccgctcacctccgtccccgtaaatctccacgccgtacccgtcttacaacccgttactccaaataccctcgtaacgaacgaaaatacacaaactctaccgaaccccgtaacgcccc

SEQ ID NO: 17139 - DNA, 664 bp, Artificial Sequence
  chemically treated genomic DNA (Homo sapiens) CpG-island No: 17139
attttttaatattttagttacggggttttggtttttatttttaggttattggaggattagaagcgaaatacgattttacgtgaaattaatttcgggagcggttagtacggatcgttaattttattcgtttagggtgttcgttttaattttacgggagtggcgattttaaattcggtcgggagagggagggattaggaacgtaatgtgacgggtttaagtgatagcgttttttttttagtttaattttttcgggcggcgttttttttcggtggtagcgtagcgttggcgtcggttaggtatatttacgtttagtttttttgagtgtggatatacggttcgttttaagaacggggttagatttagttttcgcgttttagttcggttttagcgttttttttgggaaaggcgggcgcgggcgcgggggtgggaggcgtttttaggtgttttggcgggttttcggatacgtgcgttcggcgtttttttcgttttttcgtagtcggggtagagtttatcgtattagttcgcggagtagtcgagtcgttcgttacgtcgtttattttcgttttcgtaggtttttacgtcgtattcgttttgtagttcgttattttaggtattttcgtagcgagcgggggtgtataggttttgtcggatttcgtagcgtttt

SEQ ID NO: 17140 - DNA, 664 bp, Artificial Sequence
  chemically treated genomic DNA (Homo sapiens) CpG-island No: 17140
aaaacgctacgaaatccgacaaaacctatacacccccgctcgctacgaaaatacctaaaataacgaactacaaaacgaatacgacgtaaaaacctacgaaaacgaaaataaacgacgtaacgaacgactcgactactccgcgaactaatacgataaactctaccccgactacgaaaaaacgaaaaaaacgccgaacgcacgtatccgaaaacccgccaaaacacctaaaaacgcctcccacccccgcgcccgcgcccgcctttcccaaaaaaaacgctaaaaccgaactaaaacgcgaaaactaaatctaaccccgttcttaaaacgaaccgtatatccacactcaaaaaaactaaacgtaaatatacctaaccgacgccaacgctacgctaccaccgaaaaaaaacgccgcccgaaaaaattaaactaaaaaaaaaacgctatcacttaaacccgtcacattacgttcctaatccctccctctcccgaccgaatttaaaatcgccactcccgtaaaattaaaacgaacaccctaaacgaataaaattaacgatccgtactaaccgctcccgaaattaatttcacgtaaaatcgtatttcgcttctaatcctccaataacctaaaaataaaaaccaaaaccccgtaactaaaatattaaaaaat

SEQ ID NO: 17141 - DNA, 566 bp, Artificial Sequence
  chemically treated genomic DNA (Homo sapiens) CpG-island No: 17141
ggttacggcgtgcgttagagcgtgttttacggtatggttacggtgattcgtttatcgttgcgtatttcgttggtttcgttgcgtagcgagtagagtaatggtagcgtgttttacgacgtcgtagtcgtcgtcgatagttcggtcggtattcgcggcggtttcgtgtttaatttttacgtagacgttgagttagcgggtaagaagaagggcggtttttttcggaggggttttttttttggaagtatgaaatttcgtaagttcgaatttaagttttttatttcgagtaagcgtagttttgttcgtagcgacgcggttatgagtagaattagttttagcgatgttaattttacgattagttttggcgatgtagattgtgatttttgttcggtggaagattacgtggacgttattattacggaaatttatatgggcgagtggaagaacgataagcgtaacggtttcggcgttagcgagcgttttaatggtatgaagtatgaaggggagtgggtaaataataagaggtatggatatggttgtatcgtgttttttgacggttttaaagaaga

SEQ ID NO: 17142 - DNA, 566 bp, Artificial Sequence
  chemically treated genomic DNA (Homo sapiens) CpG-island No: 17142
tcttctttaaaaccgtcaaaaaacacgatacaaccatatccatacctcttattatttacccactccccttcatacttcataccattaaaacgctcgctaacgccgaaaccgttacgcttatcgttcttccactcgcccatataaatttccgtaataataacgtccacgtaatcttccaccgaacaaaaatcacaatctacatcgccaaaactaatcgtaaaattaacatcgctaaaactaattctactcataaccgcgtcgctacgaacaaaactacgcttactcgaaataaaaaacttaaattcgaacttacgaaatttcatacttccaaaaaaaaaacccctccgaaaaaaaccgcccttcttcttacccgctaactcaacgtctacgtaaaaattaaacacgaaaccgccgcgaataccgaccgaactatcgacgacgactacgacgtcgtaaaacacgctaccattactctactcgctacgcaacgaaaccaacgaaatacgcaacgataaacgaatcaccgtaaccataccgtaaaacacgctctaacgcacgccgtaacc

SEQ ID NO: 17143 - DNA, 566 bp, Artificial Sequence
  chemically treated genomic DNA (Homo sapiens) CpG-island No: 17143
ttttttttggagtcgttaggaaatacggtatagttatatttatgttttttgttatttgtttatttttttttatattttatgttattggagcgttcgttaacgtcgaagtcgttgcgtttgtcgtttttttattcgtttatgtaggttttcgtggtggtggcgtttacgtggttttttatcgggtaaaaattataatttatatcgttaaagttgatcgtggagttggtatcgttggaattaattttgtttatggtcgcgtcgttgcggatagagttgcgtttgttcgagatggaagatttggattcggatttgcgaagttttatgtttttaagaagggagttttttcggaagaggtcgtttttttttttgttcgttagtttagcgtttgcgtggaagttgagtacgaaatcgtcgcgggtgtcggtcgggttgtcggcggcggttgcggcgtcgtggagtacgttgttattgttttgttcgttgcgtagcgaggttagcgaggtacgtagcggtgagcggattatcgtggttatgtcgtagggtacgttttggcgtacgtcgtagtt

SEQ ID NO: 17144 - DNA, 566 bp, Artificial Sequence
  chemically treated genomic DNA (Homo sapiens) CpG-island No: 17144
aactacgacgtacgccaaaacgtaccctacgacataaccacgataatccgctcaccgctacgtacctcgctaacctcgctacgcaacgaacaaaacaataacaacgtactccacgacgccgcaaccgccgccgacaacccgaccgacacccgcgacgatttcgtactcaacttccacgcaaacgctaaactaacgaacaaaaaaaaaaacgacctcttccgaaaaaactcccttcttaaaaacataaaacttcgcaaatccgaatccaaatcttccatctcgaacaaacgcaactctatccgcaacgacgcgaccataaacaaaattaattccaacgataccaactccacgatcaactttaacgatataaattataatttttacccgataaaaaaccacgtaaacgccaccaccacgaaaacctacataaacgaataaaaaaacgacaaacgcaacgacttcgacgttaacgaacgctccaataacataaaatataaaaaaaaataaacaaataacaaaaaacataaatataactataccgtatttcctaacgactccaaaaaaaa

SEQ ID NO: 17145 - DNA, 504 bp, Artificial Sequence
  chemically treated genomic DNA (Homo sapiens) CpG-island No: 17145
tatagtttcgcgcgggtcgtttagttttcggattcggcggatgatgttaggcgacgggagcggtcgcggtcgggtcggggaggtcgcggtttaggggagttgggagggagggtggtttcgttaggtcgacggcgcgttcggtcgcgcggcgttgtttggagacggttttggcggcgttgtgttgttgtaaatagtcgtttttttgttattatttatagtaggattttttggttttcgggcgcggcggttggaggtaggtttgcggttcggtttttcgcgcgtttcgaattattcgttcgtcggttttattttgtttcgtttttttttaggtgtttatcgcgggtttcgattttcgggttcgaagagtggagaagggaagatcggggttgtgcggggatatgcgttttcgcgttttggaggtggttagcgcgttggggttgagtttcggtagcgtgatttcggttgttttacgtagtagggtaggagattggggggcgtggtata

SEQ ID NO: 17146 - DNA, 504 bp, Artificial Sequence
  chemically treated genomic DNA (Homo sapiens) CpG-island No: 17146
tataccacgccccccaatctcctaccctactacgtaaaacaaccgaaatcacgctaccgaaactcaaccccaacgcgctaaccacctccaaaacgcgaaaacgcatatccccgcacaaccccgatcttcccttctccactcttcgaacccgaaaatcgaaacccgcgataaacacctaaaaaaaaacgaaacaaaataaaaccgacgaacgaataattcgaaacgcgcgaaaaaccgaaccgcaaacctacctccaaccgccgcgcccgaaaaccaaaaaatcctactataaataataacaaaaaaacgactatttacaacaacacaacgccgccaaaaccgtctccaaacaacgccgcgcgaccgaacgcgccgtcgacctaacgaaaccaccctccctcccaactcccctaaaccgcgacctccccgacccgaccgcgaccgctcccgtcgcctaacatcatccgccgaatccgaaaactaaacgacccgcgcgaaactata

SEQ ID NO: 17147 - DNA, 504 bp, Artificial Sequence
  chemically treated genomic DNA (Homo sapiens) CpG-island No: 17147
tgtgttacgttttttaattttttgttttgttgcgtaggatagtcggggttacgttgtcggggtttagttttagcgcgttggttatttttagggcgcgaagacgtatgttttcgtatagtttcggtttttttttttttatttttcgggttcgggggtcggggttcgcggtgggtatttggagaggggcgaggtaggatgaggtcggcgggcggatagttcggggcgcgcggggagtcggatcgtagatttgtttttagtcgtcgcgttcgggagttaggagattttgttatagatagtaatagggaagcggttgtttatagtaatatagcgtcgttagggtcgtttttaggtaacgtcgcgcggtcgggcgcgtcgtcggtttggcgaggttatttttttttttagtttttttgggtcgcggttttttcggttcggtcgcggtcgttttcgtcgtttgatattattcgtcgggttcgggggttgagcggttcgcgcgaggttgtg

SEQ ID NO: 17148 - DNA, 504 bp, Artificial Sequence
  chemically treated genomic DNA (Homo sapiens) CpG-island No: 17148
cacaacctcgcgcgaaccgctcaacccccgaacccgacgaataatatcaaacgacgaaaacgaccgcgaccgaaccgaaaaaaccgcgacccaaaaaaactaaaaaaaaaaataacctcgccaaaccgacgacgcgcccgaccgcgcgacgttacctaaaaacgaccctaacgacgctatattactataaacaaccgcttccctattactatctataacaaaatctcctaactcccgaacgcgacgactaaaaacaaatctacgatccgactccccgcgcgccccgaactatccgcccgccgacctcatcctacctcgcccctctccaaatacccaccgcgaaccccgacccccgaacccgaaaaataaaaaaaaaaaaaccgaaactatacgaaaacatacgtcttcgcgccctaaaaataaccaacgcgctaaaactaaaccccgacaacgtaaccccgactatcctacgcaacaaaacaaaaaattaaaaaacgtaacaca

SEQ ID NO: 17149 - DNA, 732 bp, Artificial Sequence
  chemically treated genomic DNA (Homo sapiens) CpG-island No: 17149
gcgttaaggcgggggtagggagttgcgagcgttggggacgtagtcgggcggtcgtagaagcgtttaggttcgcgcgttatttttttggcgttatcgtggttgagttcgtgacgtttatatttatttataaaacgtttgttataaaagtagtggttgcggcgtttcgtattttaatcgtatttgtagcgagtatttgagaagttaagattgagtcggcggtcgcggcgtagcgaacgagtagtgatcgtgtttttatttagttttgttttatagcgtttatttgttttcgtttttcggtttttcgttcggttttgtttaatcgttacgatgatgttttcgggttttaacgtagattacgaggcgttattttttcgttgtagtagcgcgttttcggtcggggatagttttttttattattatttattcgtagattttttttttagtatgggttcgtttgttaacgcgtaggtaaggttggtttttcgtcgtcgcggggtcgggggtttggggtcgcggaggaggagatatcgggcgggacgttttagtagatgagtagggggtttttttgtgtttggagggaggttgtcgtggtcggagcggtgtcggttcgggggttcgggatttgttttgagcgtacgtacgtttgttatagtaagaattggtttttttttcgggaggtaggttcgttttgagtaatttttggtttgtattttaggacggatttttgatatt

SEQ ID NO: 17150 - DNA, 732 bp, Artificial Sequence
  chemically treated genomic DNA (Homo sapiens) CpG-island No: 17150
aatatcaaaaatccgtcctaaaatacaaaccaaaaattactcaaaacgaacctacctcccgaaaaaaaaaccaattcttactataacaaacgtacgtacgctcaaaacaaatcccgaacccccgaaccgacaccgctccgaccacgacaacctccctccaaacacaaaaaaaccccctactcatctactaaaacgtcccgcccgatatctcctcctccgcgaccccaaacccccgaccccgcgacgacgaaaaaccaaccttacctacgcgttaacaaacgaacccatactaaaaaaaaaatctacgaataaataataataaaaaaaactatccccgaccgaaaacgcgctactacaacgaaaaaataacgcctcgtaatctacgttaaaacccgaaaacatcatcgtaacgattaaacaaaaccgaacgaaaaaccgaaaaacgaaaacaaataaacgctataaaacaaaactaaataaaaacacgatcactactcgttcgctacgccgcgaccgccgactcaatcttaacttctcaaatactcgctacaaatacgattaaaatacgaaacgccgcaaccactacttttataacaaacgttttataaataaatataaacgtcacgaactcaaccacgataacgccaaaaaaataacgcgcgaacctaaacgcttctacgaccgcccgactacgtccccaacgctcgcaactccctacccccgccttaacgc

SEQ ID NO: 17151 - DNA, 732 bp, Artificial Sequence
  chemically treated genomic DNA (Homo sapiens) CpG-island No: 17151
aatgttagagattcgttttggagtgtagattagaggttgtttagaacgaatttgtttttcgaagggggaattaatttttattatggtaagcgtgcgtgcgtttagagtaagtttcgagttttcgagtcggtatcgtttcggttacggtagtttttttttaggtataagggagttttttatttatttattggagcgtttcgttcggtgttttttttttcgcgattttaagttttcggtttcgcggcgacgggaagttagttttatttgcgcgttgataggcgagtttatgttggagaaggagtttgcgggtgagtggtagtaagagaggttattttcggtcggggacgcgttgttgtagcgggaggatgacgtttcgtagtttgcgttgaagttcgagaatattatcgtggcggttaggtaaagtcgggcgaggggtcgaggggcggagataggtgggcgttgtggagtagagttgggtaggagtacggttattgttcgttcgttgcgtcgcggtcgtcggtttagttttggttttttagatgttcgttgtagatgcggttggagtacgaggcgtcgtagttattgtttttataataagcgttttatgaatgagtgtaaacgttacgggtttaattacggtggcgttagaggggtggcgcgcgggtttgggcgtttttgcggtcgttcggttgcgtttttagcgttcgtagttttttgttttcgttttggcgt

SEQ ID NO: 17152 - DNA, 732 bp, Artificial Sequence
  chemically treated genomic DNA (Homo sapiens) CpG-island No: 17152
acgccaaaacgaaaacaaaaaactacgaacgctaaaaacgcaaccgaacgaccgcaaaaacgcccaaacccgcgcgccacccctctaacgccaccgtaattaaacccgtaacgtttacactcattcataaaacgcttattataaaaacaataactacgacgcctcgtactccaaccgcatctacaacgaacatctaaaaaaccaaaactaaaccgacgaccgcgacgcaacgaacgaacaataaccgtactcctacccaactctactccacaacgcccacctatctccgcccctcgacccctcgcccgactttacctaaccgccacgataatattctcgaacttcaacgcaaactacgaaacgtcatcctcccgctacaacaacgcgtccccgaccgaaaataacctctcttactaccactcacccgcaaactccttctccaacataaactcgcctatcaacgcgcaaataaaactaacttcccgtcgccgcgaaaccgaaaacttaaaatcgcgaaaaaaaaaacaccgaacgaaacgctccaataaataaataaaaaactcccttatacctaaaaaaaaactaccgtaaccgaaacgataccgactcgaaaactcgaaacttactctaaacgcacgcacgcttaccataataaaaattaattcccccttcgaaaaacaaattcgttctaaacaacctctaatctacactccaaaacgaatctctaacatt

SEQ ID NO: 17153 - DNA, 777 bp, Artificial Sequence
  chemically treated genomic DNA (Homo sapiens) CpG-island No: 17153
gtcggtttcgtattttcgattttttttcgtcgtttaggggtcgttatatagtcggggttgatgtaattcgtttcgtcgttcgttatagtttgcgggagggacgttcggcggtcgcgacggggggcgttggcggcggcggacgttgtagcggcggcggggttggcgtcgcggcggttttcgggtcgggataggtttgggtatcgggcggagtttcgcggtcgggcggtagcggcgcggagcgggtacggcgtttgtagtcgggtttcggtttcgggggcgtcgttttttttcgtattttttgtacggtgggtgcgagggcgcgcgttgggggcgtcgggacgggcggggcggggtagggcgcggcgcgggtatttgggacggtcgttttcgtacgggcggagcgcgaggagttttagtttagtttcgcggggaggttttcgtagtttagggatttcgagtttttttcgcgtcgggcgttgtagtcgggtttttttcgcgaggcgttcggtagtttgaggtttttttttggttttcgtttcgggacgggaggtttcgttcgttttttggatagtcggggtgttttttttttttttttttcgcgtttttttttttcgttcgtttgtagggaggtgtttttttcgggcggcggggaaggcggggtgagtggggagaaaagtgttcgcggagatgggttgtgcgggtggaggtggagggtgaagggttagggaggtgcggggttggggtcggggttagattgtggagggatgataaggattt

SEQ ID NO: 17154 - DNA, 777 bp, Artificial Sequence
  chemically treated genomic DNA (Homo sapiens) CpG-island No: 17154
aaatccttatcatccctccacaatctaaccccgaccccaaccccgcacctccctaacccttcaccctccacctccacccgcacaacccatctccgcgaacacttttctccccactcaccccgccttccccgccgcccgaaaaaaacacctccctacaaacgaacgaaaaaaaaaaacgcgaaaaaaaaaaaaaaaaaacaccccgactatccaaaaaacgaacgaaacctcccgtcccgaaacgaaaaccaaaaaaaaacctcaaactaccgaacgcctcgcgaaaaaaacccgactacaacgcccgacgcgaaaaaaactcgaaatccctaaactacgaaaacctccccgcgaaactaaactaaaactcctcgcgctccgcccgtacgaaaacgaccgtcccaaatacccgcgccgcgccctaccccgccccgcccgtcccgacgcccccaacgcgcgccctcgcacccaccgtacaaaaaatacgaaaaaaaacgacgcccccgaaaccgaaacccgactacaaacgccgtacccgctccgcgccgctaccgcccgaccgcgaaactccgcccgatacccaaacctatcccgacccgaaaaccgccgcgacgccaaccccgccgccgctacaacgtccgccgccgccaacgccccccgtcgcgaccgccgaacgtccctcccgcaaactataacgaacgacgaaacgaattacatcaaccccgactatataacgacccctaaacgacgaaaaaaaatcgaaaatacgaaaccgac

SEQ ID NO: 17155 - DNA, 777 bp, Artificial Sequence
  chemically treated genomic DNA (Homo sapiens) CpG-island No: 17155
aggtttttgttatttttttataatttaatttcgattttaatttcgtatttttttggttttttattttttatttttattcgtatagtttattttcgcgggtatttttttttttatttatttcgtttttttcgtcgttcgaggagagtatttttttgtaaacggacgggggaggagagcgcgggagggagaaggagggagtatttcggttgtttagggagcggacggagtttttcgtttcggggcgggaattaaaaggaagttttaggttgtcgggcgtttcgcgggaggggttcggttgtagcgttcggcgcggggaaagttcgaggtttttgggttgcgggagttttttcgcggggttgggttggggtttttcgcgtttcgttcgtgcgggggcggtcgttttaggtgttcgcgtcgcgttttgtttcgtttcgttcgtttcggcgtttttagcgcgcgttttcgtatttatcgtgtagaaggtgcggggggaggcggcgttttcggggtcggggttcggttgtaggcgtcgtgttcgtttcgcgtcgttgtcgttcggtcgcggagtttcgttcggtgtttaggtttgtttcggttcgggagtcgtcgcggcgttagtttcgtcgtcgttgtagcgttcgtcgtcgttagcgtttttcgtcgcggtcgtcgagcgtttttttcgtaggttgtggcgggcggcgggacgggttgtattagtttcggttatatagcggtttttgggcggcggggaggggtcgggaatgcggaatcggt

SEQ ID NO: 17156 - DNA, 777 bp, Artificial Sequence
  chemically treated genomic DNA (Homo sapiens) CpG-island No: 17156
accgattccgcattcccgacccctccccgccgcccaaaaaccgctatataaccgaaactaatacaacccgtcccgccgcccgccacaacctacgaaaaaaacgctcgacgaccgcgacgaaaaacgctaacgacgacgaacgctacaacgacgacgaaactaacgccgcgacgactcccgaaccgaaacaaacctaaacaccgaacgaaactccgcgaccgaacgacaacgacgcgaaacgaacacgacgcctacaaccgaaccccgaccccgaaaacgccgcctccccccgcaccttctacacgataaatacgaaaacgcgcgctaaaaacgccgaaacgaacgaaacgaaacaaaacgcgacgcgaacacctaaaacgaccgcccccgcacgaacgaaacgcgaaaaaccccaacccaaccccgcgaaaaaactcccgcaacccaaaaacctcgaactttccccgcgccgaacgctacaaccgaacccctcccgcgaaacgcccgacaacctaaaacttccttttaattcccgccccgaaacgaaaaactccgtccgctccctaaacaaccgaaatactccctccttctccctcccgcgctctcctcccccgtccgtttacaaaaaaatactctcctcgaacgacgaaaaaaacgaaataaataaaaaaaaaaatacccgcgaaaataaactatacgaataaaaataaaaaataaaaaaccaaaaaaatacgaaattaaaatcgaaattaaattataaaaaaataacaaaaacct

SEQ ID NO: 17157 - DNA, 1128 bp, Artificial Sequence
  chemically treated genomic DNA (Homo sapiens) CpG-island No: 17157
agatttttcgtatcggcgggattttttttcgagttagcgcgtatttggaaagggggttgtaggcgaggttcgtttagggcgaggaagttcggttatcgtggagtgtcggttattttatttcgtatagaagttaaatttgttattcggttggttcgcggtagttcggttcgcggttacgcgcgaggagtggaagtttcgaagttcggcgtatttgggtaacgttcggtgttcgggagttttcggtcggtttcggtttttttttttatcggggggtcgttgtttgtgtgtgtttcggtttcgtttttcgtacggttggagtcggcgggttggggaggtgggatcgatagcgcgtttcgtagttcggtgtcgtcgttatttatttttgcgagtttcgtgaggtttttaggtcgtggttcgcggagtcgcggtttttttacggggagttttagcgtcgtttttagtagcgtcgttagtagtagtacgtagaggaggagttcggttcggtcgcggagcgtacgtatcgtttcggtttcgaggttgttttgtttgtatttttgtacgcggtcgcgaatttagtcgcgtttcgtttcgtttttttcgggggcgggattcggcgattttgaggggcgcgcggggtacggggtcgcgcggggcgggggcgcgtagttcgtatagtttttttggtttcggtttttcgcgtgggcgttcgtatagttttagggttcgcgtatttggacgttttttattttttttcgaggggtttttcggcgtttttcgattcgttttgattttgtgggcggttttttttgatttggtcgttttttcgtttttagttttcgtcgttgtcgtcgtcgtagtttttagcgaatttttgttcgcgggaagttgcggttcggcgcgtttcggttttgcgttgcgatttttgcggggttttgagggttcgacgttatttttgtttttttcgatcgcgttttaattgcgatttggatcggcggtgtcgcgcgggcgagggaggcgtagttcgacgggagagtggcgcgagttttcggatgtcgggtagatgtttggttatgtttcgaggaaggtttgttggggaggaagtttagaagtaatttttttagggttttt

SEQ ID NO: 17158 - DNA, 1128 bp, Artificial Sequence
  chemically treated genomic DNA (Homo sapiens) CpG-island No: 17158
aaaaaccctaaaaaaattacttctaaacttcctccccaacaaaccttcctcgaaacataaccaaacatctacccgacatccgaaaactcgcgccactctcccgtcgaactacgcctccctcgcccgcgcgacaccgccgatccaaatcgcaattaaaacgcgatcgaaaaaaacaaaaataacgtcgaaccctcaaaaccccgcaaaaatcgcaacgcaaaaccgaaacgcgccgaaccgcaacttcccgcgaacaaaaattcgctaaaaactacgacgacgacaacgacgaaaactaaaaacgaaaaaacgaccaaatcaaaaaaaaccgcccacaaaatcaaaacgaatcgaaaaacgccgaaaaacccctcgaaaaaaaataaaaaacgtccaaatacgcgaaccctaaaactatacgaacgcccacgcgaaaaaccgaaaccaaaaaaactatacgaactacgcgcccccgccccgcgcgaccccgtaccccgcgcgcccctcaaaatcgccgaatcccgcccccgaaaaaaacgaaacgaaacgcgactaaattcgcgaccgcgtacaaaaatacaaacaaaacaacctcgaaaccgaaacgatacgtacgctccgcgaccgaaccgaactcctcctctacgtactactactaacgacgctactaaaaacgacgctaaaactccccgtaaaaaaaccgcgactccgcgaaccacgacctaaaaacctcacgaaactcgcaaaaataaataacgacgacaccgaactacgaaacgcgctatcgatcccacctccccaacccgccgactccaaccgtacgaaaaacgaaaccgaaacacacacaaacaacgaccccccgataaaaaaaaaaaccgaaaccgaccgaaaactcccgaacaccgaacgttacccaaatacgccgaacttcgaaacttccactcctcgcgcgtaaccgcgaaccgaactaccgcgaaccaaccgaataacaaatttaacttctatacgaaataaaataaccgacactccacgataaccgaacttcctcgccctaaacgaacctcgcctacaaccccctttccaaatacgcgctaactcgaaaaaaaatcccgccgatacgaaaaatct

SEQ ID NO: 17159 - DNA, 1128 bp, Artificial Sequence
  chemically treated genomic DNA (Homo sapiens) CpG-island No: 17159
aagagttttgggggagttatttttaggttttttttttagtaaatttttttcgaggtataattaaatatttgttcggtattcgaagattcgcgttattttttcgtcgggttgcgtttttttcgttcgcgcggtatcgtcggtttaggtcgtagttggagcgcggtcggggagggtagaggtggcgtcggatttttagggtttcgtaggagtcgtagcgtagggtcggagcgcgtcgggtcgtagtttttcgcgaataggaattcgttgggggttgcgacggcgatagcggcggggattgagggcggggaggcggttagattaaagagagtcgtttatagggttaagacgggtcggggagcgtcgaggggtttttcggaggagggtgggggacgtttaggtgcgcggattttagagttgtgcgggcgtttacgcgaggagtcggggttagagaggttgtgcgagttgcgcgttttcgtttcgcgcggtttcgtgtttcgcgcgttttttaggatcgtcgggtttcgttttcggaggaggcgaggcggggcgcgattgggttcgcggtcgcgtgtagaggtgtaggtagagtagtttcggaatcgagacgatgcgtgcgtttcgcgatcgagtcgggttttttttttgcgtgttgttgttggcggcgttgttggaggcggcgttagggtttttcgtgaagaagtcgcggtttcgcggattacggtttgggagttttacgaggttcgtagaggtgagtggcggcggtatcgggttgcggagcgcgttgtcggttttatttttttagttcgtcggttttagtcgtgcggggagcgggatcgggatatatataggtagcgatttttcgatggagagaggggtcggggtcggtcggaagttttcggatatcgggcgttgtttaggtgcgtcggatttcggggtttttatttttcgcgcgtgatcgcgagtcgggttgtcgcggattagtcgggtgataagtttgatttttgtgcggagtgaggtggtcgatattttacggtggtcgggttttttcgttttgagcggatttcgtttgtagttttttttttaggtgcgcgttagttcggagaggagtttcgtcggtgcgaggaattt

SEQ ID NO: 17160 - DNA, 1128 bp, Artificial Sequence
  chemically treated genomic DNA (Homo sapiens) CpG-island No: 17160
aaattcctcgcaccgacgaaactcctctccgaactaacgcgcacctaaaaaaaaaactacaaacgaaatccgctcaaaacgaaaaaacccgaccaccgtaaaatatcgaccacctcactccgcacaaaaatcaaacttatcacccgactaatccgcgacaacccgactcgcgatcacgcgcgaaaaataaaaaccccgaaatccgacgcacctaaacaacgcccgatatccgaaaacttccgaccgaccccgacccctctctccatcgaaaaatcgctacctatatatatcccgatcccgctccccgcacgactaaaaccgacgaactaaaaaaataaaaccgacaacgcgctccgcaacccgataccgccgccactcacctctacgaacctcgtaaaactcccaaaccgtaatccgcgaaaccgcgacttcttcacgaaaaaccctaacgccgcctccaacaacgccgccaacaacaacacgcaaaaaaaaaacccgactcgatcgcgaaacgcacgcatcgtctcgattccgaaactactctacctacacctctacacgcgaccgcgaacccaatcgcgccccgcctcgcctcctccgaaaacgaaacccgacgatcctaaaaaacgcgcgaaacacgaaaccgcgcgaaacgaaaacgcgcaactcgcacaacctctctaaccccgactcctcgcgtaaacgcccgcacaactctaaaatccgcgcacctaaacgtcccccaccctcctccgaaaaacccctcgacgctccccgacccgtcttaaccctataaacgactctctttaatctaaccgcctccccgccctcaatccccgccgctatcgccgtcgcaacccccaacgaattcctattcgcgaaaaactacgacccgacgcgctccgaccctacgctacgactcctacgaaaccctaaaaatccgacgccacctctaccctccccgaccgcgctccaactacgacctaaaccgacgataccgcgcgaacgaaaaaaacgcaacccgacgaaaaaataacgcgaatcttcgaataccgaacaaatatttaattatacctcgaaaaaaatttactaaaaaaaaaacctaaaaataactcccccaaaactctt

SEQ ID NO: 17161 - DNA, 741 bp, Artificial Sequence
  chemically treated genomic DNA (Homo sapiens) CpG-island No: 17161
attatgtcgtttagcgcgtcgtgtagaatgtaggttatttttatcgatagcgtcggtgtatcgttcgtacgggaaatgatcgattgtttatttatttcgttggtaatttggtttagcgtatttggtgtaatgttaaagttatagatatttattatttgcgcggtagaagcgattatattcgtcgtttttgtcggagttagtatcggtatcgggttgtatatggtataatatacgttcggatcgatgatataggcggaaattagcgcgtagaagcgttacgaaggattttagtggatattttatcgtagtcgagagaagtacgtttgtttttcgttcgttagtagggtcggcgtggttttagaagagattagcgtatggaagttagatatcgcgttataggcgatggtgataaataggaacgggaataggttatcggtttatatcgggttagtgttatcgataaatttggttagcgtaggtatggttagcgtcgggcgtataattaaaatgtttatcgttagatcgacgatagtttcgatttttaggaaggtagagaggtagttacgcggggttagtagtaattatatcggtagtatcgtcgttataaaatcgtaatttattagtatttaggttaattgtacgtcggtaaagttaaagtacggtgtcgtaggtcggattttttgttatttagtcgttagagataatggcgaaaattaggaatattagatcgatgatcgatat

SEQ ID NO: 17162 - DNA, 741 bp, Artificial Sequence
  chemically treated genomic DNA (Homo sapiens) CpG-island No: 17162
atatcgatcatcgatctaatattcctaattttcgccattatctctaacgactaaataacaaaaaatccgacctacgacaccgtactttaactttaccgacgtacaattaacctaaatactaataaattacgattttataacgacgatactaccgatataattactactaaccccgcgtaactacctctctaccttcctaaaaatcgaaactatcgtcgatctaacgataaacattttaattatacgcccgacgctaaccatacctacgctaaccaaatttatcgataacactaacccgatataaaccgataacctattcccgttcctatttatcaccatcgcctataacgcgatatctaacttccatacgctaatctcttctaaaaccacgccgaccctactaacgaacgaaaaacaaacgtacttctctcgactacgataaaatatccactaaaatccttcgtaacgcttctacgcgctaatttccgcctatatcatcgatccgaacgtatattataccatatacaacccgataccgatactaactccgacaaaaacgacgaatataatcgcttctaccgcgcaaataataaatatctataactttaacattacaccaaatacgctaaaccaaattaccaacgaaataaataaacaatcgatcatttcccgtacgaacgatacaccgacgctatcgataaaaataacctacattctacacgacgcgctaaacgacataat

SEQ ID NO: 17163 - DNA, 741 bp, Artificial Sequence
  chemically treated genomic DNA (Homo sapiens) CpG-island No: 17163
gtgtcggttatcggtttggtatttttgattttcgttattatttttggcggttgggtggtagaaagttcgatttgcgatatcgtattttgattttatcggcgtgtagttgatttggatgttggtgggttacggttttgtggcggcggtgttgtcggtgtggttattgttggtttcgcgtgattatttttttatttttttgaaaatcgggattatcgtcggtttggcggtaggtattttgattatgcgttcgacgttgattatgtttgcgttgattaaatttgtcgatggtattggttcggtatggatcggtaatttgttttcgtttttgtttattattatcgtttgtggcgcggtgtttggtttttatgcgttgattttttttgggattacgtcgattttgttggcgagcgaagggtaggcgtgtttttttcggttacggtgggatgtttattggaatttttcgtggcgtttttgcgcgttggttttcgtttgtattatcgattcgggcgtgtattgtgttatgtatagttcgatgtcggtgttggtttcggtagggacggcggatgtggtcgtttttgtcgcgtaggtggtgagtatttgtggttttagtattatattagatacgttaaattagattgttagcgaagtgggtgaatagtcgattatttttcgtgcgggcggtgtatcgacgttgtcggtggggatggtttatattttgtacggcgcgttgggcggtatgat

SEQ ID NO: 17164 - DNA, 741 bp, Artificial Sequence
  chemically treated genomic DNA (Homo sapiens) CpG-island No: 17164
atcataccgcccaacgcgccgtacaaaatataaaccatccccaccgacaacgtcgatacaccgcccgcacgaaaaataatcgactattcacccacttcgctaacaatctaatttaacgtatctaatataatactaaaaccacaaatactcaccacctacgcgacaaaaacgaccacatccgccgtccctaccgaaaccaacaccgacatcgaactatacataacacaatacacgcccgaatcgataatacaaacgaaaaccaacgcgcaaaaacgccacgaaaaattccaataaacatcccaccgtaaccgaaaaaaacacgcctacccttcgctcgccaacaaaatcgacgtaatcccaaaaaaaatcaacgcataaaaaccaaacaccgcgccacaaacgataataataaacaaaaacgaaaacaaattaccgatccataccgaaccaataccatcgacaaatttaatcaacgcaaacataatcaacgtcgaacgcataatcaaaatacctaccgccaaaccgacgataatcccgattttcaaaaaaataaaaaaataatcacgcgaaaccaacaataaccacaccgacaacaccgccgccacaaaaccgtaacccaccaacatccaaatcaactacacgccgataaaatcaaaatacgatatcgcaaatcgaactttctaccacccaaccgccaaaaataataacgaaaatcaaaaataccaaaccgataaccgacac

SEQ ID NO: 17165 - DNA, 1261 bp, Artificial Sequence
  chemically treated genomic DNA (Homo sapiens) CpG-island No: 17165
gagttgtcgatagttaagacgtattgggaggagaaagcgtcgtcgtgagtttggttttttcgtaggttgcgtgttagttatacggcggacggggcggacggggtacgcgtttcgagaggggtcgtcgttatttattttgtgggcgggtatcgttttggtcgttttcgggggttttacgacgaagtgtacgtcggttatgagtttattgttgaatatgagcgcgtttttgtaaaggtagaggtacgggttgggggcgtgggcgcgcgcgggcgcgggggtcgcggggtacgggtttatttttcgcgtagcgtggggcggtagtatcgttagtcggggtttttttggtggttgttgtcgagtgtgggcggcgcgggcgcgggcggcggcggcgcgggcgcgggggcgttgggcgggttgcgcggttcggtttttttgtttacggcggcgtcggcgttgttgttggttaggttcgcggtcgcggcgttggcgggagcgtagagtttcgtcgttattttcgcgggcggggcggcgggggtagtttcggcgtttgtggacgtcgcgtttcgcgttttcgcgtcgcgtcggggtttcgggagcggttttgtaagtaaaagtaaggaggttaggtattgagcgacgcggtcgtgtaggtaggttaggggtagtagtatgggcggcggcggcgttgtgattcgcggggttgttattcgtttttttgttattttcgtttttgcgattttgttcgagtttagtttagcgtagttcggttaggttcggtcgcggggggcgtcgtttcgttcgttcgttcgagttcgtattcgtcgcggcgtcggtgcgttacgttgcgttagggtcgcgtttcgcgcgacgtcgttgtttcgcggtttcgtttttaggttcgatattttcgaagttgttcgagtttttgtttagtaatcggcgcgagtcgcgcgttgtgtagaggtagtcgtggaaggcggttttcggcgttggtaggcggtcgtttttagattcgtagtgttatgcgtaggtgtttgcgttcgttttttagttagcgattttttggttaggaacgtaggtggatttgtttgtttggttatttgtatttcggagtttgtttttggtcgcggtttgtgggatggtcgttgggttttttcgttcgtttagatgtttcgcgatttagtttgttacggacgttagtagttagcgtttgtagagagcgcggtttattttgttttgagggttttataggggtaggcgt

SEQ ID NO: 17166 - DNA, 1261 bp, Artificial Sequence
  chemically treated genomic DNA (Homo sapiens) CpG-island No: 17166
acgcctacccctataaaaccctcaaaacaaaataaaccgcgctctctacaaacgctaactactaacgtccgtaacaaactaaatcgcgaaacatctaaacgaacgaaaaaacccaacgaccatcccacaaaccgcgaccaaaaacaaactccgaaatacaaataaccaaacaaacaaatccacctacgttcctaaccaaaaaatcgctaactaaaaaacgaacgcaaacacctacgcataacactacgaatctaaaaacgaccgcctaccaacgccgaaaaccgccttccacgactacctctacacaacgcgcgactcgcgccgattactaaacaaaaactcgaacaacttcgaaaatatcgaacctaaaaacgaaaccgcgaaacaacgacgtcgcgcgaaacgcgaccctaacgcaacgtaacgcaccgacgccgcgacgaatacgaactcgaacgaacgaacgaaacgacgccccccgcgaccgaacctaaccgaactacgctaaactaaactcgaacaaaatcgcaaaaacgaaaataacaaaaaaacgaataacaaccccgcgaatcacaacgccgccgccgcccatactactacccctaacctacctacacgaccgcgtcgctcaatacctaacctccttacttttacttacaaaaccgctcccgaaaccccgacgcgacgcgaaaacgcgaaacgcgacgtccacaaacgccgaaactacccccgccgccccgcccgcgaaaataacgacgaaactctacgctcccgccaacgccgcgaccgcgaacctaaccaacaacaacgccgacgccgccgtaaacaaaaaaaccgaaccgcgcaacccgcccaacgcccccgcgcccgcgccgccgccgcccgcgcccgcgccgcccacactcgacaacaaccaccaaaaaaaccccgactaacgatactaccgccccacgctacgcgaaaaataaacccgtaccccgcgacccccgcgcccgcgcgcgcccacgcccccaacccgtacctctacctttacaaaaacgcgctcatattcaacaataaactcataaccgacgtacacttcgtcgtaaaacccccgaaaacgaccaaaacgatacccgcccacaaaataaataacgacgacccctctcgaaacgcgtaccccgtccgccccgtccgccgtataactaacacgcaacctacgaaaaaaccaaactcacgacgacgctttctcctcccaatacgtcttaactatcgacaactc

SEQ ID NO: 17167 - DNA, 1261 bp, Artificial Sequence
  chemically treated genomic DNA (Homo sapiens) CpG-island No: 17167
gcgtttgtttttgtaaagtttttagagtagagtggatcgcgttttttgtaagcgttggttgttggcgttcgtagtaagttaaatcgcgaagtatttgaacgaacgaggaagtttaacgattattttataggtcgcggttagaggtagatttcggaatgtaaatggttaaataagtaggtttatttgcgtttttaattaaaagatcgttaattgaagaacgggcgtaagtatttgcgtatggtattgcgggtttgggggcggtcgtttgttagcgtcgggagtcgttttttacggttgtttttgtatagcgcgcggttcgcgtcggttgttgggtagaagttcgagtagtttcgaggatgtcgggtttgggggcggggtcgcgaggtagcgacgtcgcgcggggcgcggttttgacgtagcgtgacgtatcggcgtcgcggcgggtacgggttcgggcgggcgggcgggacggcgtttttcgcggtcgggtttggtcgggttgcgttaggttgggttcgggtagggtcgtaggggcgggggtggtaggggagcgggtggtagtttcgcgggttatagcgtcgtcgtcgtttatgttgttgtttttagtttgtttgtacggtcgcgtcgtttagtgtttgatttttttgtttttgtttgtagagtcgttttcgaggtttcggcgcggcgcgagggcgcggggcgcggcgtttataggcgtcgaggttgttttcgtcgtttcgttcgcgaagatggcggcggaattttacgttttcgttagcgtcgcggtcgcggatttagttaatagtaacgtcggcgtcgtcgtgggtaggaaggtcgggtcgcgtagttcgtttagcgttttcgcgttcgcgtcgtcgtcgttcgcgttcgcgtcgtttatattcggtaataattattaggagagtttcggttggcggtgttgtcgttttacgttgcgcgagaggtgagttcgtgtttcgcggttttcgcgttcgcgcgcgtttacgtttttagttcgtgtttttatttttgtaggaacgcgtttatgtttaataatgagtttatggtcgacgtgtatttcgtcgtggggttttcgggggcgattaggacggtgttcgtttataaggtgggtagcggcggtttttttcggaacgcgtgtttcgttcgtttcgttcgtcgtgtggttgatacgtagtttgcgggagagttaggtttacggcggcgttttttttttttagtacgttttggttgtcggtagttt

SEQ ID NO: 17168 - DNA, 1261 bp, Artificial Sequence
  chemically treated genomic DNA (Homo sapiens) CpG-island No: 17168
aaactaccgacaaccaaaacgtactaaaaaaaaaaaacgccgccgtaaacctaactctcccgcaaactacgtatcaaccacacgacgaacgaaacgaacgaaacacgcgttccgaaaaaaaccgccgctacccaccttataaacgaacaccgtcctaatcgcccccgaaaaccccacgacgaaatacacgtcgaccataaactcattattaaacataaacgcgttcctacaaaaataaaaacacgaactaaaaacgtaaacgcgcgcgaacgcgaaaaccgcgaaacacgaactcacctctcgcgcaacgtaaaacgacaacaccgccaaccgaaactctcctaataattattaccgaatataaacgacgcgaacgcgaacgacgacgacgcgaacgcgaaaacgctaaacgaactacgcgacccgaccttcctacccacgacgacgccgacgttactattaactaaatccgcgaccgcgacgctaacgaaaacgtaaaattccgccgccatcttcgcgaacgaaacgacgaaaacaacctcgacgcctataaacgccgcgccccgcgccctcgcgccgcgccgaaacctcgaaaacgactctacaaacaaaaacaaaaaaatcaaacactaaacgacgcgaccgtacaaacaaactaaaaacaacaacataaacgacgacgacgctataacccgcgaaactaccacccgctcccctaccacccccgcccctacgaccctacccgaacccaacctaacgcaacccgaccaaacccgaccgcgaaaaacgccgtcccgcccgcccgcccgaacccgtacccgccgcgacgccgatacgtcacgctacgtcaaaaccgcgccccgcgcgacgtcgctacctcgcgaccccgcccccaaacccgacatcctcgaaactactcgaacttctacccaacaaccgacgcgaaccgcgcgctatacaaaaacaaccgtaaaaaacgactcccgacgctaacaaacgaccgcccccaaacccgcaataccatacgcaaatacttacgcccgttcttcaattaacgatcttttaattaaaaacgcaaataaacctacttatttaaccatttacattccgaaatctacctctaaccgcgacctataaaataatcgttaaacttcctcgttcgttcaaatacttcgcgatttaacttactacgaacgccaacaaccaacgcttacaaaaaacgcgatccactctactctaaaaactttacaaaaacaaacgc

SEQ ID NO: 17169 - DNA, 649 bp, Artificial Sequence
  chemically treated genomic DNA (Homo sapiens) CpG-island No: 17169
gtgtagatcgagggttttgcgggggtgtgtggggttagcgtggagatcgagggttttgcgggggtgtgtggggttagcgtggagatcgagggttttgcgggggtgtgtggggttagcgtggagttcgagggttttgcgggggtgtgtggggttagcgtggagatcgagggttttgcgggggtgtgtggggttagcgtgtagatcgagggttttgcgggggtgtgtggggttagcgtggagttcgagagttttgcggggatgtgtggggttagcgtggagatcgagggttttgcgggggtgtgtggggttagcgtggagatcgagggttttgcgggggtgtgtggggttagcgtggagatcgagggttttgcgggggtgtgtggggttagcgtggagttcgagagttttgcggggatgtgtggggttagcgtggagatcgagggttttgtgggggtgtgtggggttagcgtggagatcgagggttttgcgggggtgtgtggggttagcgtggagatcgagggttttgcgggggtgtgtggggttagcgtggagatcgagggttttgcgggggtgtgtggggttagcgtggggtttgagggttttgcggggggtgtgtggggttagcgtggagaatgttttatgggttgat

SEQ ID NO: 17170 - DNA, 649 bp, Artificial Sequence
  chemically treated genomic DNA (Homo sapiens) CpG-island No: 17170
atcaacccataaaacattctccacgctaaccccacacaccccccgcaaaaccctcaaaccccacgctaaccccacacacccccgcaaaaccctcgatctccacgctaaccccacacacccccgcaaaaccctcgatctccacgctaaccccacacacccccgcaaaaccctcgatctccacgctaaccccacacacccccacaaaaccctcgatctccacgctaaccccacacatccccgcaaaactctcgaactccacgctaaccccacacacccccgcaaaaccctcgatctccacgctaaccccacacacccccgcaaaaccctcgatctccacgctaaccccacacacccccgcaaaaccctcgatctccacgctaaccccacacatccccgcaaaactctcgaactccacgctaaccccacacacccccgcaaaaccctcgatctacacgctaaccccacacacccccgcaaaaccctcgatctccacgctaaccccacacacccccgcaaaaccctcgaactccacgctaaccccacacacccccgcaaaaccctcgatctccacgctaaccccacacacccccgcaaaaccctcgatctccacgctaaccccacacacccccgcaaaaccctcgatctacac

SEQ ID NO: 17171 - DNA, 649 bp, Artificial Sequence
  chemically treated genomic DNA (Homo sapiens) CpG-island No: 17171
attagtttataaagtattttttacgttgattttatatatttttcgtaggatttttagattttacgttgattttatatattttcgtaggattttcggtttttacgttgattttatatattttcgtaggattttcggtttttacgttgattttatatattttcgtaggattttcggtttttacgttgattttatatatttttataggattttcggtttttacgttgattttatatattttcgtaggattttcgggttttacgttgattttatatattttcgtaggattttcggtttttacgttgattttatatattttcgtaggattttcggtttttacgttgattttatatattttcgtaggattttcggtttttacgttgattttatatattttcgtaggattttcgggttttacgttgattttatatattttcgtaggattttcggtttgtacgttgattttatatattttcgtaggattttcggtttttacgttgattttatatattttcgtaggattttcgggttttacgttgattttatatattttcgtaggattttcggtttttacgttgattttatatattttcgtaggattttcggtttttacgttgattttatatattttcgtaggattttcggtttgtat

SEQ ID NO: 17172 - DNA, 649 bp, Artificial Sequence
  chemically treated genomic DNA (Homo sapiens) CpG-island No: 17172
atacaaaccgaaaatcctacgaaaatatataaaatcaacgtaaaaaccgaaaatcctacgaaaatatataaaatcaacgtaaaaaccgaaaatcctacgaaaatatataaaatcaacgtaaaacccgaaaatcctacgaaaatatataaaatcaacgtaaaaaccgaaaatcctacgaaaatatataaaatcaacgtacaaaccgaaaatcctacgaaaatatataaaatcaacgtaaaacccgaaaatcctacgaaaatatataaaatcaacgtaaaaaccgaaaatcctacgaaaatatataaaatcaacgtaaaaaccgaaaatcctacgaaaatatataaaatcaacgtaaaaaccgaaaatcctacgaaaatatataaaatcaacgtaaaacccgaaaatcctacgaaaatatataaaatcaacgtaaaaaccgaaaatcctataaaaatatataaaatcaacgtaaaaaccgaaaatcctacgaaaatatataaaatcaacgtaaaaaccgaaaatcctacgaaaatatataaaatcaacgtaaaaaccgaaaatcctacgaaaatatataaaatcaacgtaaaatctaaaaatcctacgaaaaatatataaaatcaacgtaaaaaatactttataaactaat

SEQ ID NO: 17173 - DNA, 610 bp, Artificial Sequence
  chemically treated genomic DNA (Homo sapiens) CpG-island No: 17173
ggtcggggtcgattcggttagtttttttttcgggcgacgtttacgtgtttgcgcggtttttttggtatcgcggcgattagcgtttcgaggcgcgcggtattcgataggtggtatttgcgagtttcgtttatttcggtcgtttcgtttatttcggtcgtttcgtttcgcgcgtttacggagtatgtttagagtcgcggttacgcgttcgttcgaaggtttttgtcgggatagggcgtcgtttcgtgtcggttttcgtagagttcgcggttttcgtttgttcgggcgtcgttatggagcgtatcgagggggcgttcgtgggtcgttgcgtcgttttattttatttgcggtcgtttacgttgtattatcgttaggtgagttcgcgttttcgcgtttttcgcgttttcgtcggcggttcggtttacgattcgcgtttcgtttattatttttcgcgttgtcggtttcgtttcggagtttcgttttcgtttttcgtcgatttttcgggcggtcgtttgttcgttcgtcggatcgcgggtttttagatttagtgagtttttaggtcggggaggggtcgcgggagggatatttgagggggtattatttatttttttaa

SEQ ID NO: 17174 - DNA, 610 bp, Artificial Sequence
  chemically treated genomic DNA (Homo sapiens) CpG-island No: 17174
ttaaaaaaataaataataccccctcaaatatccctcccgcgacccctccccgacctaaaaactcactaaatctaaaaacccgcgatccgacgaacgaacaaacgaccgcccgaaaaatcgacgaaaaacgaaaacgaaactccgaaacgaaaccgacaacgcgaaaaataataaacgaaacgcgaatcgtaaaccgaaccgccgacgaaaacgcgaaaaacgcgaaaacgcgaactcacctaacgataatacaacgtaaacgaccgcaaataaaataaaacgacgcaacgacccacgaacgccccctcgatacgctccataacgacgcccgaacaaacgaaaaccgcgaactctacgaaaaccgacacgaaacgacgccctatcccgacaaaaaccttcgaacgaacgcgtaaccgcgactctaaacatactccgtaaacgcgcgaaacgaaacgaccgaaataaacgaaacgaccgaaataaacgaaactcgcaaataccacctatcgaataccgcgcgcctcgaaacgctaatcgccgcgataccaaaaaaaccgcgcaaacacgtaaacgtcgcccgaaaaaaaaactaaccgaatcgaccccgacc

SEQ ID NO: 17175 - DNA, 610 bp, Artificial Sequence
  chemically treated genomic DNA (Homo sapiens) CpG-island No: 17175
ttgaaaggatgagtggtgtttttttagatgtttttttcgcggttttttttcggtttgggggtttattgggtttgggaattcgcgattcggcgggcggataagcggtcgttcgggagatcggcgggaggcgggggcggggtttcggggcggggtcggtagcgcggaagatggtgggcggggcgcgggtcgtgggtcgggtcgtcggcgggggcgcgggggacgcgggggcgcgggtttatttggcggtaatgtagcgtgagcggtcgtaggtagggtgaggcggcgtagcggtttacggacgttttttcgatgcgttttatggcggcgttcggataggcgggggtcgcgagttttgcgggggtcgatacggggcggcgttttgtttcgataggagttttcgggcgggcgcgtgatcgcggttttgagtatgtttcgtgggcgcgcggggcggggcggtcgaggtgggcggggcggtcgaggtgggcggggttcgtaggtgttatttgtcgggtgtcgcgcgtttcggggcgttggtcgtcgcggtgttagggaagtcgcgtaggtacgtgggcgtcgttcgggggaaggattggtcgggtcgatttcggtt

SEQ ID NO: 17176 - DNA, 610 bp, Artificial Sequence
  chemically treated genomic DNA (Homo sapiens) CpG-island No: 17176
aaccgaaatcgacccgaccaatccttcccccgaacgacgcccacgtacctacgcgacttccctaacaccgcgacgaccaacgccccgaaacgcgcgacacccgacaaataacacctacgaaccccgcccacctcgaccgccccgcccacctcgaccgccccgccccgcgcgcccacgaaacatactcaaaaccgcgatcacgcgcccgcccgaaaactcctatcgaaacaaaacgccgccccgtatcgacccccgcaaaactcgcgacccccgcctatccgaacgccgccataaaacgcatcgaaaaaacgtccgtaaaccgctacgccgcctcaccctacctacgaccgctcacgctacattaccgccaaataaacccgcgcccccgcgtcccccgcgcccccgccgacgacccgacccacgacccgcgccccgcccaccatcttccgcgctaccgaccccgccccgaaaccccgcccccgcctcccgccgatctcccgaacgaccgcttatccgcccgccgaatcgcgaattcccaaacccaataaacccccaaaccgaaaaaaaaccgcgaaaaaaacatctaaaaaaacaccactcatcctttcaa

SEQ ID NO: 17177 - DNA, 1713 bp, Artificial Sequence
  chemically treated genomic DNA (Homo sapiens) CpG-island No: 17177
cggcgtcggcgtacgtttcgtcgatttacgcggaggtgtgagcggggttttcgcggttcgcgttgatttcgaggtttcgtgttttcgtcgttcgggcgttttggggggcgcgcgtcgggtcggggcgttggtaggcgacgttttttatcgtttttaaagtttggggcgttttcggattttttttcggttttatttcgcggcgcggtttcgtttttttatgtatatgtaggtgcgcgggtgacgaatgggcgagcgagttgttagtttcgtttcgaatttgttggttgcggtgtcgggagcgcgggcgcgtagagtcgaggtcgggattcgttgtttttatcgtcgtcgtcgtcgtcgtcgggtgggagtcgggtcgggtagtcggagcgcggtcgttagcgagtcggagttgtcgtcgtttttgtacgttcgtcgtttaggttcgcgcgtcgcggcgttgcgttcgatttcgttcgcgtcgtcgtcgtcgtcgtttttgtcgttgtcgttgtttttgcgggcgttcggagggcgggcgggcgttgggaggtcggcgcggcggttgggagtcgggcgcgggcggcggcggcggggtcgggcgggcgggtcgcgggggtaatgcgggcgtagggtcgggggcgtttttttcggcggttgttgttgttgttggcgttttgggtgtaggtgagcggggcggcgggggcggcgggggtcgcggacggggtatatcgggtcgtttttaggggtcgggcgggtattgtttggggtcgtcgtggttcggaagttttcgaggttgcgcgcggcggttggggtttcgggcgggcgcggttgggtgggggcggggcggcggggtttgtttttttatttttggcgttcggttcgtcgatttcggttcgcgttttttttcgttttttcgttgttttatttttaggcggcgcggtttatgggttatttcgagttgtagttgagcgcgttgcggaacgtgaacggggagttgttgagcggcgtttgttgtgacggcgacggtcggataacgcgcgcggggggttgcggttacgacgagtgcgatacgtacgtgcgcgtgtgttttaaggagtattaggttaaggtgacgtttacggggttttgtagttacggttacggcgttacgttcgtgttgggcggtaattttttttatttgtcgtcggcgggcgttgcgggggatcgagcgcgggcgcgggttcgggtcggcggcgattaggattcgggtttcgtcgttatttttttttagttcgtttggtcggtacgtgcgttttatttttcgtgttttagttttttttttttttttcgcgtttcggtttcgcgcgtttcgcgatttttaatatttgcggtcgggtttgcgtgcgagtcgcgcgcgtttaggcggggcggggtcggtagggggcgcgtgttttggggatttggttcgcgtttggttacgtgggcgcgtcggggtttcggggttatcgggagcggggtcgcggcgggggcggggcggcggcgtttcgcgtgcgcggcggtgtgcggcgtgtgtttgcgtcgttttgcgcgtgtttgtttgggtggggaggcgaggcgaggcgtttcggtttcgggtaggtcgcggtggtatgtgcgtagcgcgtgttggggttggtttagggtaggttttgattgagtcgtttcgggttcgtggttagtttgcgtttgttttgt

SEQ ID NO: 17178 - DNA, 1713 bp, Artificial Sequence
  chemically treated genomic DNA (Homo sapiens) CpG-island No: 17178
acaaaacaaacgcaaactaaccacgaacccgaaacgactcaatcaaaacctaccctaaaccaaccccaacacgcgctacgcacataccaccgcgacctacccgaaaccgaaacgcctcgcctcgcctccccacccaaacaaacacgcgcaaaacgacgcaaacacacgccgcacaccgccgcgcacgcgaaacgccgccgccccgcccccgccgcgaccccgctcccgataaccccgaaaccccgacgcgcccacgtaaccaaacgcgaaccaaatccccaaaacacgcgccccctaccgaccccgccccgcctaaacgcgcgcgactcgcacgcaaacccgaccgcaaatattaaaaatcgcgaaacgcgcgaaaccgaaacgcgaaaaaaaaaaaaaaaactaaaacacgaaaaataaaacgcacgtaccgaccaaacgaactaaaaaaaaataacgacgaaacccgaatcctaatcgccgccgacccgaacccgcgcccgcgctcgatcccccgcaacgcccgccgacgacaaataaaaaaaattaccgcccaacacgaacgtaacgccgtaaccgtaactacaaaaccccgtaaacgtcaccttaacctaatactccttaaaacacacgcgcacgtacgtatcgcactcgtcgtaaccgcaaccccccgcgcgcgttatccgaccgtcgccgtcacaacaaacgccgctcaacaactccccgttcacgttccgcaacgcgctcaactacaactcgaaataacccataaaccgcgccgcctaaaaataaaacaacgaaaaaacgaaaaaaaacgcgaaccgaaatcgacgaaccgaacgccaaaaataaaaaaacaaaccccgccgccccgcccccacccaaccgcgcccgcccgaaaccccaaccgccgcgcgcaacctcgaaaacttccgaaccacgacgaccccaaacaatacccgcccgacccctaaaaacgacccgatataccccgtccgcgacccccgccgcccccgccgccccgctcacctacacccaaaacgccaacaacaacaacaaccgccgaaaaaaacgcccccgaccctacgcccgcattacccccgcgacccgcccgcccgaccccgccgccgccgcccgcgcccgactcccaaccgccgcgccgacctcccaacgcccgcccgccctccgaacgcccgcaaaaacaacgacaacgacaaaaacgacgacgacgacgacgcgaacgaaatcgaacgcaacgccgcgacgcgcgaacctaaacgacgaacgtacaaaaacgacgacaactccgactcgctaacgaccgcgctccgactacccgacccgactcccacccgacgacgacgacgacgacgataaaaacaacgaatcccgacctcgactctacgcgcccgcgctcccgacaccgcaaccaacaaattcgaaacgaaactaacaactcgctcgcccattcgtcacccgcgcacctacatatacataaaaaaacgaaaccgcgccgcgaaataaaaccgaaaaaaaatccgaaaacgccccaaactttaaaaacgataaaaaacgtcgcctaccaacgccccgacccgacgcgcgccccccaaaacgcccgaacgacgaaaacacgaaacctcgaaatcaacgcgaaccgcgaaaaccccgctcacacctccgcgtaaatcgacgaaacgtacgccgacgccg

SEQ ID NO: 17179 - DNA, 1713 bp, Artificial Sequence
  chemically treated genomic DNA (Homo sapiens) CpG-island No: 17179
gtagggtaggcgtaggttggttacgggttcggggcggtttagttagggtttgttttagattagttttagtacgcgttgcgtatatgttatcgcggtttgttcgggatcggggcgtttcgtttcgtttttttatttagatagatacgcgtagggcgacgtaggtatacgtcgtatatcgtcgcgtacgcgggacgtcgtcgtttcgttttcgtcgcgatttcgttttcggtggtttcggggtttcggcgcgtttacgtggttaggcgcggattaagtttttagagtacgcgttttttgtcggtttcgtttcgtttgggcgcgcgcggttcgtacgtagattcggtcgtaggtgttgggggtcgcgaagcgcgcggggtcggggcgcggagagagagggaagggttggagtacgagggatggagcgtacgtatcggttaggcgaattggaaggggatgacgacgaggttcgggttttggtcgtcgtcggttcgggttcgcgttcgcgttcggtttttcgtagcgttcgtcggcggtaggtagaaggagttgtcgtttagtacgggcgtggcgtcgtggtcgtagttgtagggtttcgtgggcgttattttggtttggtattttttaaggtatacgcgtacgtacgtgtcgtattcgtcgtggtcgtagtttttcgcgcgcgttgttcggtcgtcgtcgttatagtaggcgtcgtttagtagtttttcgtttacgtttcgtagcgcgtttagttgtagttcgaaatagtttatgggtcgcgtcgtttaaaaataaggtagcgggagagcggagggaggcgcgggtcggggtcggcgggtcgggcgttaggggtgggggaataggtttcgtcgtttcgtttttatttagtcgcgttcgttcggagttttagtcgtcgcgcgtagtttcgagggttttcgaattacggcggttttaggtagtgttcgttcggtttttaggggcggttcggtgtgtttcgttcgcgattttcgtcgttttcgtcgtttcgtttatttgtatttagagcgttagtagtagtagtagtcgtcggggaaggcgttttcggttttgcgttcgtattgttttcgcgattcgttcgttcggtttcgtcgtcgtcgttcgcgttcggtttttagtcgtcgcgtcggttttttagcgttcgttcgtttttcgagcgttcgtagaggtagcggtagcggtagaggcggcggcggcggcggcgcgggcggggtcgagcgtagcgtcgcggcgcgcgggtttgggcggcgggcgtgtaggggcggcggtagtttcggttcgttggcggtcgcgtttcggttgttcggttcggtttttattcggcggcgacggcggcggcggtgaaggtagcgggtttcggtttcggttttgcgcgttcgcgttttcggtatcgtagttaataagttcggaacgagattgatagttcgttcgtttattcgttattcgcgtatttgtatatgtatgagggggcggggtcgcgtcgcggggtggggtcgggggggggttcgggggcgttttaggttttaaaggcggtggagggcgtcgtttgttagcgtttcggttcggcgcgcgttttttagggcgttcgggcggcgggggtacggggtttcggggttagcgcgggtcgcgggggtttcgtttatattttcgcgtgagtcggcgaggcgtgcgtcggcgtcg

SEQ ID NO: 17180 - DNA, 1713 bp, Artificial Sequence
  chemically treated genomic DNA (Homo sapiens) CpG-island No: 17180
cgacgccgacgcacgcctcgccgactcacgcgaaaatataaacgaaacccccgcgacccgcgctaaccccgaaaccccgtacccccgccgcccgaacgccctaaaaaacgcgcgccgaaccgaaacgctaacaaacgacgccctccaccgcctttaaaacctaaaacgcccccgaacccccccccgaccccaccccgcgacgcgaccccgccccctcatacatatacaaatacgcgaataacgaataaacgaacgaactatcaatctcgttccgaacttattaactacgataccgaaaacgcgaacgcgcaaaaccgaaaccgaaacccgctaccttcaccgccgccgccgtcgccgccgaataaaaaccgaaccgaacaaccgaaacgcgaccgccaacgaaccgaaactaccgccgcccctacacgcccgccgcccaaacccgcgcgccgcgacgctacgctcgaccccgcccgcgccgccgccgccgccgcctctaccgctaccgctacctctacgaacgctcgaaaaacgaacgaacgctaaaaaaccgacgcgacgactaaaaaccgaacgcgaacgacgacgacgaaaccgaacgaacgaatcgcgaaaacaatacgaacgcaaaaccgaaaacgccttccccgacgactactactactactaacgctctaaatacaaataaacgaaacgacgaaaacgacgaaaatcgcgaacgaaacacaccgaaccgcccctaaaaaccgaacgaacactacctaaaaccgccgtaattcgaaaaccctcgaaactacgcgcgacgactaaaactccgaacgaacgcgactaaataaaaacgaaacgacgaaacctattcccccacccctaacgcccgacccgccgaccccgacccgcgcctccctccgctctcccgctaccttatttttaaacgacgcgacccataaactatttcgaactacaactaaacgcgctacgaaacgtaaacgaaaaactactaaacgacgcctactataacgacgacgaccgaacaacgcgcgcgaaaaactacgaccacgacgaatacgacacgtacgtacgcgtataccttaaaaaataccaaaccaaaataacgcccacgaaaccctacaactacgaccacgacgccacgcccgtactaaacgacaactccttctacctaccgccgacgaacgctacgaaaaaccgaacgcgaacgcgaacccgaaccgacgacgaccaaaacccgaacctcgtcgtcatccccttccaattcgcctaaccgatacgtacgctccatccctcgtactccaacccttccctctctctccgcgccccgaccccgcgcgcttcgcgacccccaacacctacgaccgaatctacgtacgaaccgcgcgcgcccaaacgaaacgaaaccgacaaaaaacgcgtactctaaaaacttaatccgcgcctaaccacgtaaacgcgccgaaaccccgaaaccaccgaaaacgaaatcgcgacgaaaacgaaacgacgacgtcccgcgtacgcgacgatatacgacgtatacctacgtcgccctacgcgtatctatctaaataaaaaaacgaaacgaaacgccccgatcccgaacaaaccgcgataacatatacgcaacgcgtactaaaactaatctaaaacaaaccctaactaaaccgccccgaacccgtaaccaacctacgcctaccctac

SEQ ID NO: 17181 - DNA, 715 bp, Artificial Sequence
  chemically treated genomic DNA (Homo sapiens) CpG-island No: 17181
tcgtatcgtcgtgtttttcggtttaagttttaatattcgggcgaattggcgtgttttattagttcggtagtatgaattattattcgttagatattttattggagacgacggaagatcgttgtcgaagcggcgttttatcgtttttagtatgacgttttgtattgttttattgttgaagtcgtcggtagtgatcgtttagtgtagtgttttacgattatagtagtttagcgcgaacgtgatacgtagttttttttcgttattatagtagaattcgaattcgttagagtattatcgttgattgtttttttttacggttattttgtttgtatgtgttcgtttcgatggcggtatagtaggttttcgtttaagtaatagcgtattttggcgtatgattcggtaaatacgtttggtattgatcgtaggtatattattaagttttgtttgtttgcgaagtagcgtttatattcgacgataattatacgttggtagtttttcgataatatggtgtatacggagaagtatattcgtattattagtgtgacgattgcggcggttatttatttagttatcggttcgtttgagaatgacgtgtaattgcgtacgcgatattcggagataacggttgattaagtttatttttattttagggtataaggggcgtggttattattttttgtcgttatattacgggttttgacgattttttttacgtttt

SEQ ID NO: 17182 - DNA, 715 bp, Artificial Sequence
  chemically treated genomic DNA (Homo sapiens) CpG-island No: 17182
aaaacgtaaaaaaaatcgtcaaaacccgtaatataacgacaaaaaataataaccacgccccttataccctaaaataaaaataaacttaatcaaccgttatctccgaatatcgcgtacgcaattacacgtcattctcaaacgaaccgataactaaataaataaccgccgcaatcgtcacactaataatacgaatatacttctccgtatacaccatattatcgaaaaactaccaacgtataattatcgtcgaatataaacgctacttcgcaaacaaacaaaacttaataatatacctacgatcaataccaaacgtatttaccgaatcatacgccaaaatacgctattacttaaacgaaaacctactataccgccatcgaaacgaacacatacaaacaaaataaccgtaaaaaaaaacaatcaacgataatactctaacgaattcgaattctactataataacgaaaaaaaactacgtatcacgttcgcgctaaactactataatcgtaaaacactacactaaacgatcactaccgacgacttcaacaataaaacaatacaaaacgtcatactaaaaacgataaaacgccgcttcgacaacgatcttccgtcgtctccaataaaatatctaacgaataataattcatactaccgaactaataaaacacgccaattcgcccgaatattaaaacttaaaccgaaaaacacgacgatacga

SEQ ID NO: 17183 - DNA, 715 bp, Artificial Sequence
  chemically treated genomic DNA (Homo sapiens) CpG-island No: 17183
gaaacgtggaaaggatcgttaagattcgtgatatgacggtaaaaaatgatagttacgttttttatgttttgggatggggataagtttagttagtcgttgttttcgggtgtcgcgtgcgtagttgtacgttatttttagacgaatcgatgattggatggatggtcgtcgtagtcgttatattgatgatacggatgtgttttttcgtatatattatgttatcggagagttgttaacgtatggttatcgtcgggtatgggcgttgtttcgtagataggtagaatttgatggtatgtttgcgattaatgttaaacgtgtttatcggattatgcgttagaatgcgttgttgtttgagcgaaaatttgttgtatcgttatcgaaacgggtatatataggtagagtggtcgtgaaagaaagtaattagcgatggtgttttgacgggttcgagttttgttgtgataacggagagagattgcgtgttacgttcgcgttggattgttgtgatcgtgaggtattgtattgggcggttattatcggcggttttaatagtgaaatagtataggacgttatgttgggagcggtggaacgtcgtttcggtaacgatttttcgtcgtttttagtggagtgtttgacggataatggtttatgttatcgggttaatgaaatacgttagttcgttcggatgttgggatttgaatcgaagaatacggcggtgcgg

SEQ ID NO: 17184 - DNA, 715 bp, Artificial Sequence
  chemically treated genomic DNA (Homo sapiens) CpG-island No: 17184
ccgcaccgccgtattcttcgattcaaatcccaacatccgaacgaactaacgtatttcattaacccgataacataaaccattatccgtcaaacactccactaaaaacgacgaaaaatcgttaccgaaacgacgttccaccgctcccaacataacgtcctatactatttcactattaaaaccgccgataataaccgcccaatacaatacctcacgatcacaacaatccaacgcgaacgtaacacgcaatctctctccgttatcacaacaaaactcgaacccgtcaaaacaccatcgctaattactttctttcacgaccactctacctatatatacccgtttcgataacgatacaacaaattttcgctcaaacaacaacgcattctaacgcataatccgataaacacgtttaacattaatcgcaaacataccatcaaattctacctatctacgaaacaacgcccatacccgacgataaccatacgttaacaactctccgataacataatatatacgaaaaaacacatccgtatcatcaatataacgactacgacgaccatccatccaatcatcgattcgtctaaaaataacgtacaactacgcacgcgacacccgaaaacaacgactaactaaacttatccccatcccaaaacataaaaaacgtaactatcattttttaccgtcatatcacgaatcttaacgatcctttccacgtttc

SEQ ID NO: 17185 - DNA, 750 bp, Artificial Sequence
  chemically treated genomic DNA (Homo sapiens) CpG-island No: 17185
cggttgtcgtatgcgcggtattgatttagttttttttcgcggtgtatcgtcgttatttgttcgaagcggttatggttataacgggttatataatcggaatagtcggtgaagtttagtaattgatcgtaacggttttacgttatggtttttcggttgtcggtggtatttttcgttgcgtagggtaagttattgtgtggattattataacggtagcgggtgatatcgtcgttaggggtagttttttgaattagacggtttaatttattatattttcggcgtaattttagttcgttaggttcggtggttgacgttaattggttgtggtggttatagtaaaacgtcgatgttttgttattcggcgtggttatgcgcgtgatgaggttcgttattatattcgggttgtattttgttgttttgtttgcggtattcgtttgtgttttgagtttgtttacggcgttaaattgattttgcgtgacgttgtcgttcgcgtgttttttttttatttatcggtttagttcgggtttcgtttgcgtgtgtagtattttcggcggtttaggttgtgcgtgattgtgaagcggatttattttattgggtcgtgtagttaatttttcgggtatagtgtttggtttcgtcgttgttgagaatacggaagggatttcggcggtttttgttagtggttatatacggtcgggatatatttaagaagttatttttgttgttaagggatataaatcgggattttgggtggtt

SEQ ID NO: 17186 - DNA, 750 bp, Artificial Sequence
  chemically treated genomic DNA (Homo sapiens) CpG-island No: 17186
aaccacccaaaatcccgatttatatcccttaacaacaaaaataacttcttaaatatatcccgaccgtatataaccactaacaaaaaccgccgaaatcccttccgtattctcaacaacgacgaaaccaaacactatacccgaaaaattaactacacgacccaataaaataaatccgcttcacaatcacgcacaacctaaaccgccgaaaatactacacacgcaaacgaaacccgaactaaaccgataaataaaaaaaaaacacgcgaacgacaacgtcacgcaaaatcaatttaacgccgtaaacaaactcaaaacacaaacgaataccgcaaacaaaacaacaaaatacaacccgaatataataacgaacctcatcacgcgcataaccacgccgaataacaaaacatcgacgttttactataaccaccacaaccaattaacgtcaaccaccgaacctaacgaactaaaattacgccgaaaatataataaattaaaccgtctaattcaaaaaactacccctaacgacgatatcacccgctaccgttataataatccacacaataacttaccctacgcaacgaaaaataccaccgacaaccgaaaaaccataacgtaaaaccgttacgatcaattactaaacttcaccgactattccgattatataacccgttataaccataaccgcttcgaacaaataacgacgatacaccgcgaaaaaaaactaaatcaataccgcgcatacgacaaccg

SEQ ID NO: 17187 - DNA, 750 bp, Artificial Sequence
  chemically treated genomic DNA (Homo sapiens) CpG-island No: 17187
gattatttagaatttcggtttatattttttggtaataagggtagttttttgggtatatttcggtcgtgtgtggttattgataagggtcgtcggaatttttttcgtgtttttagtagcggcggggttagatattatattcggaaggttaattatacgatttagtagagtaagttcgttttataattacgtatagtttggatcgtcggaaatgttgtatacgtaggcgaaattcgggttgaatcggtgggtgaaaaaggaatacgcggacggtagcgttacgtagagttagtttgacgtcgtgggtaggtttagggtatagacggatgtcgtaggtaggataatagagtatagttcggatgtggtgacgggttttattacgcgtataattacgtcggatggtagggtatcggcgttttattataattattataattagttaacgttagttatcgggtttgacgggttggaattgcgtcgggaatatgatgaattgggtcgtttgatttaggaaattgtttttgacggcgatattattcgttatcgttatgataatttatatagtgatttattttgcgtaacggaagatgttatcggtagtcggaaaattatgacgtggagtcgttacggttagttgttgagttttatcgattgtttcggttatgtaattcgttatgattatgatcgtttcgggtagatgacggcggtgtatcgcgaggaagggttgagttagtatcgcgtatacgatagtcg

SEQ ID NO: 17188 - DNA, 750 bp, Artificial Sequence
  chemically treated genomic DNA (Homo sapiens) CpG-island No: 17188
cgactatcgtatacgcgatactaactcaacccttcctcgcgatacaccgccgtcatctacccgaaacgatcataatcataacgaattacataaccgaaacaatcgataaaactcaacaactaaccgtaacgactccacgtcataattttccgactaccgataacatcttccgttacgcaaaataaatcactatataaattatcataacgataacgaataatatcgccgtcaaaaacaatttcctaaatcaaacgacccaattcatcatattcccgacgcaattccaacccgtcaaacccgataactaacgttaactaattataataattataataaaacgccgataccctaccatccgacgtaattatacgcgtaataaaacccgtcaccacatccgaactatactctattatcctacctacgacatccgtctataccctaaacctacccacgacgtcaaactaactctacgtaacgctaccgtccgcgtattcctttttcacccaccgattcaacccgaatttcgcctacgtatacaacatttccgacgatccaaactatacgtaattataaaacgaacttactctactaaatcgtataattaaccttccgaatataatatctaaccccgccgctactaaaaacacgaaaaaaattccgacgacccttatcaataaccacacacgaccgaaatatacccaaaaaactacccttattaccaaaaaatataaaccgaaattctaaataatc

SEQ ID NO: 17189 - DNA, 842 bp, Artificial Sequence
  chemically treated genomic DNA (Homo sapiens) CpG-island No: 17189
ggttcggttcggtttcgtttttcggaattttattagcgggttacgcgtaggagggcgtgagttttcggatgtgtaggttttgtattgtcgtggtagttttgtcggacgcggtcgtagtgtttagaggtttaggtttatatcgttcgggcgggttttttgtttggttcgggttattagatttttatagtcgggaacgttattatttcgggcgttagtttttcggtttagtcggtttatagattttcgttttttatttttttagcggggaggggcgtagaggtattacgtgacgtttcgtattcgttcggttttggttatatgtggtacgtcgttgcgttagttatagttttggttgtaggagtttagttgtcgtttttcgttagcgggcggggcggggatttggtgttaggttttcgttaattcgttttcgtcgttttagttagttgttttagttcgggttcgatcgttatggagcggtgcggggtttacgtttgtttcgtgtgaggcgtatcgttgtcgtcgtcgcggacgtcgttttcgtttgtcgaggttttcggaattttcgtcgtttttcggagtttttcgtttttggtagtttgttatcgttttttgggcgggttcgaatgcgcgttcggtgaaggtgtaggttcggcgtcgttattgtcgtagttaggagatggttcgggttacggagtcgggattggaggtaagaagggtcgatagattgatttaggtcgggtcgggtcgcgggggttgtggtcggggtcgggtgggggtgggggttcgtaagttttgcggggagtttcggggagatttttcgggttggggttgtttaattaggt

SEQ ID NO: 17190 - DNA, 842 bp, Artificial Sequence
  chemically treated genomic DNA (Homo sapiens) CpG-island No: 17190
acctaattaaacaaccccaacccgaaaaatctccccgaaactccccgcaaaacttacgaacccccacccccacccgaccccgaccacaacccccgcgacccgacccgacctaaatcaatctatcgacccttcttacctccaatcccgactccgtaacccgaaccatctcctaactacgacaataacgacgccgaacctacaccttcaccgaacgcgcattcgaacccgcccaaaaaacgataacaaactaccaaaaacgaaaaactccgaaaaacgacgaaaattccgaaaacctcgacaaacgaaaacgacgtccgcgacgacgacaacgatacgcctcacacgaaacaaacgtaaaccccgcaccgctccataacgatcgaacccgaactaaaacaactaactaaaacgacgaaaacgaattaacgaaaacctaacaccaaatccccgccccgcccgctaacgaaaaacgacaactaaactcctacaaccaaaactataactaacgcaacgacgtaccacatataaccaaaaccgaacgaatacgaaacgtcacgtaatacctctacgcccctccccgctaaaaaaataaaaaacgaaaatctataaaccgactaaaccgaaaaactaacgcccgaaataataacgttcccgactataaaaatctaataacccgaaccaaacaaaaaacccgcccgaacgatataaacctaaacctctaaacactacgaccgcgtccgacaaaactaccacgacaatacaaaacctacacatccgaaaactcacgccctcctacgcgtaacccgctaataaaattccgaaaaacgaaaccgaaccgaacc

SEQ ID NO: 17191 - DNA, 842 bp, Artificial Sequence
  chemically treated genomic DNA (Homo sapiens) CpG-island No: 17191
gtttgattgagtagttttagttcggagggttttttcgaggtttttcgtagaatttgcgggtttttatttttattcggtttcggttataattttcgcggttcggttcggtttgggttagtttgtcggttttttttatttttagtttcggtttcgtagttcgaattattttttggttgcggtagtggcggcgtcgggtttgtatttttatcggacgcgtattcgagttcgtttagggggcggtgataggttgttaagggcgaggggtttcgggaggcggcgggggtttcggaggtttcgataaacgaaggcggcgttcgcggcggcggtagcgatgcgttttatacggaataggcgtaggtttcgtatcgttttatgacggtcgggttcgggttgggatagttgattgaggcggcgggggcgggttaacgaagatttggtattagattttcgtttcgttcgttggcgggggacggtagttggatttttgtagttagggttgtgattgacgtagcggcgtgttatatgtgattaagatcgggcgggtgcggggcgttacgtgatgtttttgcgttttttttcgttgggggagtagggggcgggggtttgtgggtcggttgggtcgggaggttgacgttcggggtggtgacgttttcggttgtgggggtttgatgattcgggttaggtaaaggattcgttcgagcggtataggtttgagtttttgggtattgcggtcgcgttcggtagggttgttacggtagtatagggtttgtatattcgggagtttacgtttttttgcgcgtagttcgttagtgaggtttcgaagggcggggtcgggtcgaatt

SEQ ID NO: 17192 - DNA, 842 bp, Artificial Sequence
  chemically treated genomic DNA (Homo sapiens) CpG-island No: 17192
aattcgacccgaccccgcccttcgaaacctcactaacgaactacgcgcaaaaaaacgtaaactcccgaatatacaaaccctatactaccgtaacaaccctaccgaacgcgaccgcaatacccaaaaactcaaacctataccgctcgaacgaatcctttacctaacccgaatcatcaaacccccacaaccgaaaacgtcaccaccccgaacgtcaacctcccgacccaaccgacccacaaacccccgccccctactcccccaacgaaaaaaaacgcaaaaacatcacgtaacgccccgcacccgcccgatcttaatcacatataacacgccgctacgtcaatcacaaccctaactacaaaaatccaactaccgtcccccgccaacgaacgaaacgaaaatctaataccaaatcttcgttaacccgcccccgccgcctcaatcaactatcccaacccgaacccgaccgtcataaaacgatacgaaacctacgcctattccgtataaaacgcatcgctaccgccgccgcgaacgccgccttcgtttatcgaaacctccgaaacccccgccgcctcccgaaacccctcgcccttaacaacctatcaccgccccctaaacgaactcgaatacgcgtccgataaaaatacaaacccgacgccgccactaccgcaaccaaaaaataattcgaactacgaaaccgaaactaaaaataaaaaaaaccgacaaactaacccaaaccgaaccgaaccgcgaaaattataaccgaaaccgaataaaaataaaaacccgcaaattctacgaaaaacctcgaaaaaaccctccgaactaaaactactcaatcaaac

SEQ ID NO: 17193 - DNA, 705 bp, Artificial Sequence
  chemically treated genomic DNA (Homo sapiens) CpG-island No: 17193
ggggtatcgacggagttttaatgacggtcgtgattggtgtaggattttgttaattttaggaaggttcgtagagaagtgaggaaaacgtggtggggggtatgcgcgatttggtaggcggtgttgtcgtttgttgtatttgagaggtttgcgtatgtcgacgtacggattcgaggcggggagtatgggaagaagcggttaggagtatgatttgattattgcgattatcgttaggggaagggaggagagggtgtagaaacggggacgagggtgggggaagggtaaggaggcgttcgagttggtgcgcggagtattttgggagacgtagtttagcgggagggggaagtcgaagattgcgcgtgtttaggagcgcggagcggttcgttgagcgtagaggtgagggcggggtttttttaatcgggagggttatcgtgtggacgggggcggtggttgtagattcggggatttcggttttttagtgagatcggaagcgcggggaacgaattcgggtagtttttgcgggagcgtttagggttagagcgagaggtttgttaattattattcgttgttacgacgataggttttgggagtttcgttttcggttgtttaggcgtcgtttggatttattttggtattttggagcggaagttgtcgtttggatttttgggaagtgtatttcgggatttttcgtaggtatttgttattttg

SEQ ID NO: 17194 - DNA, 705 bp, Artificial Sequence
  chemically treated genomic DNA (Homo sapiens) CpG-island No: 17194
caaaataacaaatacctacgaaaaatcccgaaatacacttcccaaaaatccaaacgacaacttccgctccaaaataccaaaataaatccaaacgacgcctaaacaaccgaaaacgaaactcccaaaacctatcgtcgtaacaacgaataataattaacaaacctctcgctctaaccctaaacgctcccgcaaaaactacccgaattcgttccccgcgcttccgatctcactaaaaaaccgaaatccccgaatctacaaccaccgcccccgtccacacgataaccctcccgattaaaaaaaccccgccctcacctctacgctcaacgaaccgctccgcgctcctaaacacgcgcaatcttcgacttccccctcccgctaaactacgtctcccaaaatactccgcgcaccaactcgaacgcctccttacccttcccccaccctcgtccccgtttctacaccctctcctcccttcccctaacgataatcgcaataatcaaatcatactcctaaccgcttcttcccatactccccgcctcgaatccgtacgtcgacatacgcaaacctctcaaatacaacaaacgacaacaccgcctaccaaatcgcgcataccccccaccacgttttcctcacttctctacgaaccttcctaaaattaacaaaatcctacaccaatcacgaccgtcattaaaactccgtcgatacccc

SEQ ID NO: 17195 - DNA, 705 bp, Artificial Sequence
  chemically treated genomic DNA (Homo sapiens) CpG-island No: 17195
taagatggtaggtatttacggagggtttcgaaatatattttttagaagtttaggcggtaattttcgttttagggtgttaaggtaggtttagacgacgtttaggtaatcgggggcggggtttttaaagtttgtcgtcgtggtaacgagtagtgattgataagtttttcgttttagttttgggcgttttcgtaaggattgttcggattcgtttttcgcgttttcggttttattggggagtcggaattttcgagtttgtagttatcgttttcgtttatacgatagttttttcggttaagaggatttcgtttttatttttgcgtttagcgggtcgtttcgcgtttttgagtacgcgtagttttcgatttttttttttcgttggattacgttttttaggatgtttcgcgtattagttcgagcgtttttttgttttttttttattttcgttttcgtttttatatttttttttttttttttttagcggtggtcgtaatgattaggttatatttttggtcgtttttttttatgtttttcgtttcgaattcgtgcgtcggtatgcgtaagttttttaggtataatagacggtagtatcgtttattagatcgcgtatgttttttattacgttttttttatttttttacgggtttttttgagattagtaggattttgtattaattacggtcgttattagaatttcgtcggtgtttt

SEQ ID NO: 17196 - DNA, 705 bp, Artificial Sequence
  chemically treated genomic DNA (Homo sapiens) CpG-island No: 17196
aaaacaccgacgaaattctaataacgaccgtaattaatacaaaatcctactaatctcaaaaaaacccgtaaaaaaataaaaaaaacgtaataaaaaacatacgcgatctaataaacgatactaccgtctattatacctaaaaaacttacgcataccgacgcacgaattcgaaacgaaaaacataaaaaaaaacgaccaaaaatataacctaatcattacgaccaccgctaaaaaaaaaaaaaaaaaaatataaaaacgaaaacgaaaataaaaaaaaaacaaaaaaacgctcgaactaatacgcgaaacatcctaaaaaacgtaatccaacgaaaaaaaaaaatcgaaaactacgcgtactcaaaaacgcgaaacgacccgctaaacgcaaaaataaaaacgaaatcctcttaaccgaaaaaactatcgtataaacgaaaacgataactacaaactcgaaaattccgactccccaataaaaccgaaaacgcgaaaaacgaatccgaacaatccttacgaaaacgcccaaaactaaaacgaaaaacttatcaatcactactcgttaccacgacgacaaactttaaaaaccccgcccccgattacctaaacgtcgtctaaacctaccttaacaccctaaaacgaaaattaccgcctaaacttctaaaaaatatatttcgaaaccctccgtaaatacctaccatctta

SEQ ID NO: 17197 - DNA, 1119 bp, Artificial Sequence
  chemically treated genomic DNA (Homo sapiens) CpG-island No: 17197
acgggtgagcgattattcgtgtgtagcgagtgcggtcgtagttttagtcgtagttcgtatttgttgcgttattagtttacgtatatcgaggagcggtcgttcgtgtgcggcgattgtggttagggtttcgtgcgtagcgcgcgtttggaagagtatcggagagtgtatacgggcgaatagttttttcgttgcgttgagtgcggttagagttttcggtagcgttttaatttgttgtagtattagcgtatttacggcgatttttcgggttttggcgttaagttttcggttttttttggtgcgttcgagtttttcggttttttttcgtgtagcgagtgtcgcgagagtttcgcgcggcgcgtcgtgttgttggagtattaggcggtatatacgggcgataagttttttggttgcgtcgagtgcggcgagcgtttcggtcgtcgtttagtgttgttgtagtatcggcgcgtgtatagtggcgagcggtttttcgtttgtgtcgagtgcggttagagttttcggtagcgttttaatttgacgtagtatcggcgtatttatatcggggagcggtttttcgtttgcgtcgagtgtggtaaggtttttcgttagcggtttacgtttacgtagtattttcgcgtatatacgggcgagaaattttttgtttgtttcgagtgtggttagcgttttagttagcgttttaagtttacgcgttattagaggatatatatcggcgaaaagttttattattgcggtgagtgcggtttgggttttacgtaggtttcgcggtttatcgagtattagcgtatttatacgggcgaacggtttttcgtttgtttcgagtgcggttagagttttcggtagtacgttaattttatttagtatcggcgtatttatacgggtgaacggttttacgtatgttttgagtgtggtaaggtttttcgttagcggtttacgtttacgtagtatttgcgtatttatcgacgagagaagtttttcgtttgttaggattgtggtcgtcgtttttattagagtattaagtttatttagtattagcgcgtttatagcgtcgagtagttttagtcgggacgtattgtgttcgttatggttagaatatttattttt

SEQ ID NO: 17198 - DNA, 1119 bp, Artificial Sequence
  chemically treated genomic DNA (Homo sapiens) CpG-island No: 17198
aaaaataaatattctaaccataacgaacacaatacgtcccgactaaaactactcgacgctataaacgcgctaatactaaataaacttaatactctaataaaaacgacgaccacaatcctaacaaacgaaaaacttctctcgtcgataaatacgcaaatactacgtaaacgtaaaccgctaacgaaaaaccttaccacactcaaaacatacgtaaaaccgttcacccgtataaatacgccgatactaaataaaattaacgtactaccgaaaactctaaccgcactcgaaacaaacgaaaaaccgttcgcccgtataaatacgctaatactcgataaaccgcgaaacctacgtaaaacccaaaccgcactcaccgcaataataaaacttttcgccgatatatatcctctaataacgcgtaaacttaaaacgctaactaaaacgctaaccacactcgaaacaaacaaaaaatttctcgcccgtatatacgcgaaaatactacgtaaacgtaaaccgctaacgaaaaaccttaccacactcgacgcaaacgaaaaaccgctccccgatataaatacgccgatactacgtcaaattaaaacgctaccgaaaactctaaccgcactcgacacaaacgaaaaaccgctcgccactatacacgcgccgatactacaacaacactaaacgacgaccgaaacgctcgccgcactcgacgcaaccaaaaaacttatcgcccgtatataccgcctaatactccaacaacacgacgcgccgcgcgaaactctcgcgacactcgctacacgaaaaaaaaccgaaaaactcgaacgcaccaaaaaaaaccgaaaacttaacgccaaaacccgaaaaatcgccgtaaatacgctaatactacaacaaattaaaacgctaccgaaaactctaaccgcactcaacgcaacgaaaaaactattcgcccgtatacactctccgatactcttccaaacgcgcgctacgcacgaaaccctaaccacaatcgccgcacacgaacgaccgctcctcgatatacgtaaactaataacgcaacaaatacgaactacgactaaaactacgaccgcactcgctacacacgaataatcgctcacccgt

SEQ ID NO: 17199 - DNA, 1119 bp, Artificial Sequence
  chemically treated genomic DNA (Homo sapiens) CpG-island No: 17199
ggaggtaggtgttttgattatggcggatatagtgcgtttcggttggagttattcggcgttgtggacgcgttggtgttgaatgagtttggtgttttggtggaagcggcggttatagttttggtaggcgaagggtttttttcgtcggtgggtgcgtagatgttgcgtgagcgtgggtcgttggcggaaggttttgttatatttagggtatgcgtagggtcgtttattcgtgtggatgcgtcggtgttgggtgaggttggcgtgttgtcgaaagttttggtcgtattcggggtaggcgaagggtcgttcgttcgtgtggatgcgttggtgttcggtgagtcgcgagatttgcgtgaagtttaggtcgtatttatcgtagtggtagggtttttcgtcggtgtgtgttttttgatgacgcgtgagtttgaggcgttggttgaagcgttggttatattcggggtaggtaaagggtttttcgttcgtgtgtacgcggagatgttgcgtgagcgtaggtcgttggcggaaggttttgttatattcggcgtaggcgaagggtcgtttttcggtgtggatgcgtcggtgttgcgttaggttggagcgttgtcggaagttttggtcgtattcggtataggcgaagggtcgttcgttattgtgtacgcgtcggtgttgtagtagtattgagcggcggtcgaagcgttcgtcgtattcgacgtagttaaaggatttgtcgttcgtgtgtatcgtttggtgttttagtagtacggcgcgtcgcgcgaagttttcgcggtattcgttgtacggaaaggggtcgggaggttcgggcgtattaggaggggtcgggggtttagcgttagggttcgggggatcgtcgtggatgcgttggtgttgtagtagattggagcgttgtcggaagttttggtcgtatttagcgtaacggaaaggttgttcgttcgtgtgtatttttcgatgtttttttaggcgcgcgttgcgtacgaagttttggttatagtcgtcgtatacgaacggtcgtttttcggtgtgcgtaagttggtggcgtagtaggtgcgagttgcggttgaagttgcggtcgtattcgttgtatacgaatggtcgtttattcgt

SEQ ID NO: 17200 - DNA, 1119 bp, Artificial Sequence
  chemically treated genomic DNA (Homo sapiens) CpG-island No: 17200
acgaataaacgaccattcgtatacaacgaatacgaccgcaacttcaaccgcaactcgcacctactacgccaccaacttacgcacaccgaaaaacgaccgttcgtatacgacgactataaccaaaacttcgtacgcaacgcgcgcctaaaaaaacatcgaaaaatacacacgaacgaacaacctttccgttacgctaaatacgaccaaaacttccgacaacgctccaatctactacaacaccaacgcatccacgacgatcccccgaaccctaacgctaaacccccgacccctcctaatacgcccgaacctcccgacccctttccgtacaacgaataccgcgaaaacttcgcgcgacgcgccgtactactaaaacaccaaacgatacacacgaacgacaaatcctttaactacgtcgaatacgacgaacgcttcgaccgccgctcaatactactacaacaccgacgcgtacacaataacgaacgacccttcgcctataccgaatacgaccaaaacttccgacaacgctccaacctaacgcaacaccgacgcatccacaccgaaaaacgacccttcgcctacgccgaatataacaaaaccttccgccaacgacctacgctcacgcaacatctccgcgtacacacgaacgaaaaaccctttacctaccccgaatataaccaacgcttcaaccaacgcctcaaactcacgcgtcatcaaaaaacacacaccgacgaaaaaccctaccactacgataaatacgacctaaacttcacgcaaatctcgcgactcaccgaacaccaacgcatccacacgaacgaacgacccttcgcctaccccgaatacgaccaaaactttcgacaacacgccaacctcacccaacaccgacgcatccacacgaataaacgaccctacgcataccctaaatataacaaaaccttccgccaacgacccacgctcacgcaacatctacgcacccaccgacgaaaaaaacccttcgcctaccaaaactataaccgccgcttccaccaaaacaccaaactcattcaacaccaacgcgtccacaacgccgaataactccaaccgaaacgcactatatccgccataatcaaaacacctacctcc

SEQ ID NO: 17201 - DNA, 506 bp, Artificial Sequence
  chemically treated genomic DNA (Homo sapiens) CpG-island No: 17201
ggcgcgtagacgtatcgtatttttattttttcgcgtagagttcgacgtaataattcgtataacgaaaagcgatagttttcgcgtagacgaagaaaatagaagataaaggtaatatagattatattagttttataatatatagataatagaaaaagtatacgcggggatcgcgagtaacggtttaatattataggagagggtggtcgacgttatcgagtatcggaggaggcgagagtagcgtttacgacggttttagacgaaacgtagagagaacgcgcgagagttaaaaggaggaacgagtataagcggaacgcgtttaggaaagtatttataagcgcgcggcgttatttaggcgtaacgcgggcgatattttttagtatagtatttatacgtattcgtcgatcggacgcgttatatttttttcgtaggttcgaggcggagaatttaaggataagaagacgaagtaggagagacgtagataataataacggatcgcggtcggggag

SEQ ID NO: 17202 - DNA, 506 bp, Artificial Sequence
  chemically treated genomic DNA (Homo sapiens) CpG-island No: 17202
ctccccgaccgcgatccgttattattatctacgtctctcctacttcgtcttcttatccttaaattctccgcctcgaacctacgaaaaaaatataacgcgtccgatcgacgaatacgtataaatactatactaaaaaatatcgcccgcgttacgcctaaataacgccgcgcgcttataaatactttcctaaacgcgttccgcttatactcgttcctccttttaactctcgcgcgttctctctacgtttcgtctaaaaccgtcgtaaacgctactctcgcctcctccgatactcgataacgtcgaccaccctctcctataatattaaaccgttactcgcgatccccgcgtatactttttctattatctatatattataaaactaatataatctatattacctttatcttctattttcttcgtctacgcgaaaactatcgcttttcgttatacgaattattacgtcgaactctacgcgaaaaaataaaaatacgatacgtctacgcgcc

SEQ ID NO: 17203 - DNA, 506 bp, Artificial Sequence
  chemically treated genomic DNA (Homo sapiens) CpG-island No: 17203
tttttcggtcgcggttcgttgttgttgtttgcgttttttttgtttcgtttttttgtttttgggtttttcgtttcgggtttgcggggggggtgtggcgcgttcggtcggcgggtgcgtgtgggtgttgtgttggggggtgtcgttcgcgttgcgtttgggtggcgtcgcgcgtttgtgggtgtttttttgggcgcgtttcgtttgtgttcgtttttttttttagttttcgcgcgttttttttgcgtttcgtttggggtcgtcgtgggcgttgttttcgtttttttcggtgttcggtggcgtcggttatttttttttgtggtgttgggtcgttgttcgcggttttcgcgtgtgttttttttgttgtttgtgtgttgtggggttggtgtggtttatgttgtttttgttttttgtttttttcgtttgcgcgggggttgtcgtttttcgttgtgcgggttgttgcgtcgggttttgcgcgaggaggtgggagtgcggtgcgtttgcgcgtt

SEQ ID NO: 17204 - DNA, 506 bp, Artificial Sequence
  chemically treated genomic DNA (Homo sapiens) CpG-island No: 17204
aacgcgcaaacgcaccgcactcccacctcctcgcgcaaaacccgacgcaacaacccgcacaacgaaaaacgacaacccccgcgcaaacgaaaaaaacaaaaaacaaaaacaacataaaccacaccaaccccacaacacacaaacaacaaaaaaaacacacgcgaaaaccgcgaacaacgacccaacaccacaaaaaaaaataaccgacgccaccgaacaccgaaaaaaacgaaaacaacgcccacgacgaccccaaacgaaacgcaaaaaaaacgcgcgaaaactaaaaaaaaaaacgaacacaaacgaaacgcgcccaaaaaaacacccacaaacgcgcgacgccacccaaacgcaacgcgaacgacaccccccaacacaacacccacacgcacccgccgaccgaacgcgccacaccccccccgcaaacccgaaacgaaaaacccaaaaacaaaaaaacgaaacaaaaaaaacgcaaacaacaacaacgaaccgcgaccgaaaaa

SEQ ID NO: 17205 - DNA, 549 bp, Artificial Sequence
  chemically treated genomic DNA (Homo sapiens) CpG-island No: 17205
gattagggtcgaatagtgaattttatcggttggtcgttgatttgtatatcggagtatatagtaattagattattagcgatataattaatcggaatggttataatgttcgttagtacgtcgagcgttagataacgacggttagaaggttcgataatgtcgagcgttatcggaatggaaaatataatcgttggttttattatcgattcgagaattaatttagagtatagttacgcggttacgtcgtcgttcgttagttttttggcgaggaagaagtcgtttatatcgtacgttagtagtgtttcggcgaatatcgatgggttagcgtcgagtatttcgtaaatcggaataattatcggttcgagaacgtgagttagtatcggtgttagcgcggttatatcgattatcgttaggtttagtgcgtttattgttataaagtttttttcgaattgatcgtttgatttttcgatatttttatcgaatttatcgaggaaacgagtagaatcgtcgaattgcgataggattttgtttacggtagttattagtataaag

SEQ ID NO: 17206 - DNA, 549 bp, Artificial Sequence
  chemically treated genomic DNA (Homo sapiens) CpG-island No: 17206
ctttatactaataactaccgtaaacaaaatcctatcgcaattcgacgattctactcgtttcctcgataaattcgataaaaatatcgaaaaatcaaacgatcaattcgaaaaaaactttataacaataaacgcactaaacctaacgataatcgatataaccgcgctaacaccgatactaactcacgttctcgaaccgataattattccgatttacgaaatactcgacgctaacccatcgatattcgccgaaacactactaacgtacgatataaacgacttcttcctcgccaaaaaactaacgaacgacgacgtaaccgcgtaactatactctaaattaattctcgaatcgataataaaaccaacgattatattttccattccgataacgctcgacattatcgaaccttctaaccgtcgttatctaacgctcgacgtactaacgaacattataaccattccgattaattatatcgctaataatctaattactatatactccgatatacaaatcaacgaccaaccgataaaattcactattcgaccctaatc

SEQ ID NO: 17207 - DNA, 549 bp, Artificial Sequence
  chemically treated genomic DNA (Homo sapiens) CpG-island No: 17207
ttttatgttgatagttgtcgtagataggattttgtcgtagttcggcggttttgttcgttttttcggtaagttcggtaaaagtatcgaaggattaggcggttagttcgaagaaggttttatggtaatgggcgtattgggtttggcgatggtcggtatgatcgcgttggtatcggtattggtttacgttttcgggtcggtaattatttcggtttacgaaatgttcggcgttaatttatcgatgttcgtcggaatattgttggcgtgcgatatgggcggtttttttttcgttaaagagttggcgggcggcgacgtagtcgcgtggttatattttgggttaattttcgggtcgatgatggggttaacgattgtgttttttatttcggtggcgttcggtattatcgaattttttgatcgtcgttatttggcgttcggcgtgttggcgggtattgtgattatttcgattggttgtatcgttggtggtttggttgttatgtatttcggtgtgtagattaacggttagtcggtggaatttattgttcggttttgatt

SEQ ID NO: 17208 - DNA, 549 bp, Artificial Sequence
  chemically treated genomic DNA (Homo sapiens) CpG-island No: 17208
aatcaaaaccgaacaataaattccaccgactaaccgttaatctacacaccgaaatacataacaaccaaaccaccaacgatacaaccaatcgaaataatcacaatacccgccaacacgccgaacgccaaataacgacgatcaaaaaattcgataataccgaacgccaccgaaataaaaaacacaatcgttaaccccatcatcgacccgaaaattaacccaaaatataaccacgcgactacgtcgccgcccgccaactctttaacgaaaaaaaaaccgcccatatcgcacgccaacaatattccgacgaacatcgataaattaacgccgaacatttcgtaaaccgaaataattaccgacccgaaaacgtaaaccaataccgataccaacgcgatcataccgaccatcgccaaacccaatacgcccattaccataaaaccttcttcgaactaaccgcctaatccttcgatacttttaccgaacttaccgaaaaaacgaacaaaaccgccgaactacgacaaaatcctatctacgacaactatcaacataaaa

SEQ ID NO: 17209 - DNA, 770 bp, Artificial Sequence
  chemically treated genomic DNA (Homo sapiens) CpG-island No: 17209
cgcgttgggcgtttggtattagaacgattcggtattggtgaaagaatttgtcgaattgttgtggttgaaaggcgatgaatttgttatcgtcgagggtaaaacgttgtttttgaacgaagcgttatagtggtatttcgaattgatcgttaatatcgttaatattgttgagaattacgttacgtttattcgtagtgaaatattgttgtcgttggtgggcgataaagcgaagttatagtattacgtcgcgacgacgtcgattgttgatatggtgcgttttttttcggtatagtttgatgtcgaagcgttaattaatttgttgcgttcgttgacgtcgcgtttgtattttatcgttttttcgtaggcggaagtcgagaacgaagtatacgttatcgttggtgtggtgcgttacgacgtggaaggtcgcgttcgtgtcggtggtgtttttagttttttcgttgatcgcgtggaagaagagggcgaagttcgcgtatttatcgtaatataacgataattttcgtttgttagttaatttagaaatttcggtgattatgattgggtttaggtatcggtatagcgtcgtttcgcgtttttatgtagtaacgcgtcgtcgacgaagcgttaggtaaaaattggttgttttttggtaattcgtattttacggaagattttttgtattaggtggagtggtagcgttacgttaaagatggcgtgttgatacgtatcgattttgtttggtcgcgcgattaaaaagaaaaagtttacgtataaga

SEQ ID NO: 17210 - DNA, 770 bp, Artificial Sequence
  chemically treated genomic DNA (Homo sapiens) CpG-island No: 17210
tcttatacgtaaactttttctttttaatcgcgcgaccaaacaaaatcgatacgtatcaacacgccatctttaacgtaacgctaccactccacctaatacaaaaaatcttccgtaaaatacgaattaccaaaaaacaaccaatttttacctaacgcttcgtcgacgacgcgttactacataaaaacgcgaaacgacgctataccgatacctaaacccaatcataatcaccgaaatttctaaattaactaacaaacgaaaattatcgttatattacgataaatacgcgaacttcgccctcttcttccacgcgatcaacgaaaaaactaaaaacaccaccgacacgaacgcgaccttccacgtcgtaacgcaccacaccaacgataacgtatacttcgttctcgacttccgcctacgaaaaaacgataaaatacaaacgcgacgtcaacgaacgcaacaaattaattaacgcttcgacatcaaactataccgaaaaaaaacgcaccatatcaacaatcgacgtcgtcgcgacgtaatactataacttcgctttatcgcccaccaacgacaacaatatttcactacgaataaacgtaacgtaattctcaacaatattaacgatattaacgatcaattcgaaataccactataacgcttcgttcaaaaacaacgttttaccctcgacgataacaaattcatcgcctttcaaccacaacaattcgacaaattctttcaccaataccgaatcgttctaataccaaacgcccaacgcg

SEQ ID NO: 17211 - DNA, 770 bp, Artificial Sequence
  chemically treated genomic DNA (Homo sapiens) CpG-island No: 17211
ttttgtacgtaaattttttttttttgatcgcgcgattaggtaagatcgatacgtgttagtacgttatttttgacgtagcgttgttattttatttggtataggaagtttttcgtaaagtgcggattattaaagaatagttagtttttatttggcgtttcgtcggcggcgcgttgttgtataaaggcgcggaacggcgttatatcggtgtttgggtttaattataattatcggggtttttggattggttggtaggcggaagttatcgttatgttgcgataaatacgcggatttcgttttttttttttacgcggttagcgaggaagttggaggtattatcggtacgggcgcggttttttacgtcgtaacgtattatattaacggtgacgtgtatttcgttttcgattttcgtttgcgaggaggcgatggaatatagacgcggcgttagcgggcgtagtagattaattagcgtttcggtattaagttgtgtcggggagaaacgtattatgttaataatcggcgtcgtcgcggcgtaatgttgtaatttcgttttatcgtttattagcggtagtagtgttttattgcgggtaagcgtggcgtaatttttaataatgttggcggtgttgacggttagttcgaagtgttattgtagcgtttcgtttagaggtaacgttttgttttcgacggtgataggtttatcgttttttagttatagtagttcgataagtttttttattagtgtcggatcgttttgatattagacgtttagcgcg

SEQ ID NO: 17212 - DNA, 770 bp, Artificial Sequence
  chemically treated genomic DNA (Homo sapiens) CpG-island No: 17212
cgcgctaaacgtctaatatcaaaacgatccgacactaataaaaaaacttatcgaactactataactaaaaaacgataaacctatcaccgtcgaaaacaaaacgttacctctaaacgaaacgctacaataacacttcgaactaaccgtcaacaccgccaacattattaaaaattacgccacgcttacccgcaataaaacactactaccgctaataaacgataaaacgaaattacaacattacgccgcgacgacgccgattattaacataatacgtttctccccgacacaacttaataccgaaacgctaattaatctactacgcccgctaacgccgcgtctatattccatcgcctcctcgcaaacgaaaatcgaaaacgaaatacacgtcaccgttaatataatacgttacgacgtaaaaaaccgcgcccgtaccgataatacctccaacttcctcgctaaccgcgtaaaaaaaaaaaacgaaatccgcgtatttatcgcaacataacgataacttccgcctaccaaccaatccaaaaaccccgataattataattaaacccaaacaccgatataacgccgttccgcgcctttatacaacaacgcgccgccgacgaaacgccaaataaaaactaactattctttaataatccgcactttacgaaaaacttcctataccaaataaaataacaacgctacgtcaaaaataacgtactaacacgtatcgatcttacctaatcgcgcgatcaaaaaaaaaaaatttacgtacaaaa

SEQ ID NO: 17213 - DNA, 1218 bp, Artificial Sequence
  chemically treated genomic DNA (Homo sapiens) CpG-island No: 17213
ggcgttaaaatttacgcgaaacgcgtggtggttaaatttcgtttgttttagtttataaattagcgcgtaaatcgcgtcggtgtcgtattgcgtggtcgggcgaagtttataagtaggtatggtgtttttttttttgatggattagcgttagtagcgtgtcgatcgattggcgtaggttgtcgttattgttgagcgtatggtaattttgtggagtatagcgggcggcgcgcgttaggcgggcgttaattttattggcgtttttacggttacggttttttaggcgttggcggaggattttcggcgaaatttgtaaatagacgggtagtagcgtcgattgatagcgcgttcgcgtttgcggtagatgggcgcgtgagtcgttgattagtacgtcgaattcggcgtgtagttagagattaatttcgacgtcgacgttataatatagatcgttagcgtgttagtttaaggttaatagattttgtttcgcgcgggtaaaaatttttgttcgtttaggggcgatatggtttttattttcggcgttgtgtatcgcgcgttatgtagcgatgcgttattagtaattgagtttgttttcgtagtcggagtttcgttagtaggtttgtttttttcggagtcggacggttttattaattaaattagtttttttattattagaatattcgtgtattttgacgttagacgtggtcgatatgaatatgattgtttttgcgatgcgttagtattaggtcggcgcgtttgttttcgttaattatttcgcgattttggagattaagcgtttgcgttggatttttagttattagttttatcgtttgcggtagcgtaaagcggttgttttggttatcggcgacgcgaaatgtcgtatcgagtaggttggcggggtagtagtcggaagagaggatatttagtaggttaagttgcgttagtttattggtcgttacgttgtcggagtgcgagtcgtcgcgtataatattcggcgcgtttattagtacgtttatgttatgtttgcgcgaggttttcgtcgtttcgaacgtggtgggaaattcggcgattacgttgttaagttggtgagatttagtaacgtgggcgtgggtggcgttatcgtggttggtaagttgtaatgtttcgcgcgcggtataggtgcggcgatggattcgcgattcggttgcgattagcgtgcggcgagcgttagttgttcggtttcgt

SEQ ID NO: 17214 - DNA, 1218 bp, Artificial Sequence
  chemically treated genomic DNA (Homo sapiens) CpG-island No: 17214
acgaaaccgaacaactaacgctcgccgcacgctaatcgcaaccgaatcgcgaatccatcgccgcacctataccgcgcgcgaaacattacaacttaccaaccacgataacgccacccacgcccacgttactaaatctcaccaacttaacaacgtaatcgccgaatttcccaccacgttcgaaacgacgaaaacctcgcgcaaacataacataaacgtactaataaacgcgccgaatattatacgcgacgactcgcactccgacaacgtaacgaccaataaactaacgcaacttaacctactaaatatcctctcttccgactactaccccgccaacctactcgatacgacatttcgcgtcgccgataaccaaaacaaccgctttacgctaccgcaaacgataaaactaataactaaaaatccaacgcaaacgcttaatctccaaaatcgcgaaataattaacgaaaacaaacgcgccgacctaatactaacgcatcgcaaaaacaatcatattcatatcgaccacgtctaacgtcaaaatacacgaatattctaataataaaaaaactaatttaattaataaaaccgtccgactccgaaaaaaacaaacctactaacgaaactccgactacgaaaacaaactcaattactaataacgcatcgctacataacgcgcgatacacaacgccgaaaataaaaaccatatcgcccctaaacgaacaaaaatttttacccgcgcgaaacaaaatctattaaccttaaactaacacgctaacgatctatattataacgtcgacgtcgaaattaatctctaactacacgccgaattcgacgtactaatcaacgactcacgcgcccatctaccgcaaacgcgaacgcgctatcaatcgacgctactacccgtctatttacaaatttcgccgaaaatcctccgccaacgcctaaaaaaccgtaaccgtaaaaacgccaataaaattaacgcccgcctaacgcgcgccgcccgctatactccacaaaattaccatacgctcaacaataacgacaacctacgccaatcgatcgacacgctactaacgctaatccatcaaaaaaaaaaacaccatacctacttataaacttcgcccgaccacgcaatacgacaccgacgcgatttacgcgctaatttataaactaaaacaaacgaaatttaaccaccacgcgtttcgcgtaaattttaacgcc

SEQ ID NO: 17215 - DNA, 1218 bp, Artificial Sequence
  chemically treated genomic DNA (Homo sapiens) CpG-island No: 17215
acgaagtcgagtaattggcgttcgtcgtacgttggtcgtagtcgaatcgcgaatttatcgtcgtatttgtgtcgcgcgcgaaatattgtagtttgttagttacgatgacgttatttacgtttacgttgttgaattttattagtttggtagcgtgatcgtcgaattttttattacgttcgaagcggcggaagtttcgcgtaagtatggtatgaacgtgttgatgggcgcgtcgaatattgtgcgcggcggttcgtatttcggtaacgtggcggttagtgaattggcgtagtttggtttgttggatattttttttttcgattattatttcgttagtttgttcgatgcggtatttcgcgtcgtcgatgattagagtaatcgttttacgttgtcgtaggcggtgaagttggtgattaaaaatttagcgtaggcgtttaatttttaggatcgcggggtgattggcgagggtaaacgcgtcgatttggtgttggcgtatcgtaaggataattatatttatatcgattacgtttggcgttagggtatacgggtgttttgatgatgggaaaattgatttggttaatggggtcgttcggtttcgggaaagatagatttgttggcggaatttcgattgcgggaataaatttagttattggtggcgtatcgttatataacgcgcgatgtatagcgtcggaagtgaaaattatatcgtttttgagcgagtaggagtttttattcgcgcggggtaaaatttgttggttttaagttggtacgttaacggtttgtattatggcgtcggcgtcgagattgatttttggttgtacgtcggattcgacgtgttggttaacggtttacgcgtttatttgtcgtaggcgcgggcgcgttattaatcggcgttgttgttcgtttgtttataggtttcgtcggagatttttcgttagcgtttggaaaatcgtggtcgtgaaaacgttagtgaaattaacgttcgtttggcgcgcgtcgttcgttatattttataggattgttatacgtttaataatgacggtagtttgcgttagtcggtcgatacgttgttgacgttgatttattagaaggagaaatattatgtttgtttgtgagtttcgttcggttacgtagtacgatatcgacgcggtttacgcgttgatttgtgagttaaaataggcggagtttgattattacgcgtttcgcgtgggttttaacgtt

SEQ ID NO: 17216 - DNA, 1218 bp, Artificial Sequence
  chemically treated genomic DNA (Homo sapiens) CpG-island No: 17216
aacgttaaaacccacgcgaaacgcgtaataatcaaactccgcctattttaactcacaaatcaacgcgtaaaccgcgtcgatatcgtactacgtaaccgaacgaaactcacaaacaaacataatatttctccttctaataaatcaacgtcaacaacgtatcgaccgactaacgcaaactaccgtcattattaaacgtataacaatcctataaaatataacgaacgacgcgcgccaaacgaacgttaatttcactaacgttttcacgaccacgattttccaaacgctaacgaaaaatctccgacgaaacctataaacaaacgaacaacaacgccgattaataacgcgcccgcgcctacgacaaataaacgcgtaaaccgttaaccaacacgtcgaatccgacgtacaaccaaaaatcaatctcgacgccgacgccataatacaaaccgttaacgtaccaacttaaaaccaacaaattttaccccgcgcgaataaaaactcctactcgctcaaaaacgatataattttcacttccgacgctatacatcgcgcgttatataacgatacgccaccaataactaaatttattcccgcaatcgaaattccgccaacaaatctatctttcccgaaaccgaacgaccccattaaccaaatcaattttcccatcatcaaaacacccgtataccctaacgccaaacgtaatcgatataaatataattatccttacgatacgccaacaccaaatcgacgcgtttaccctcgccaatcaccccgcgatcctaaaaattaaacgcctacgctaaatttttaatcaccaacttcaccgcctacgacaacgtaaaacgattactctaatcatcgacgacgcgaaataccgcatcgaacaaactaacgaaataataatcgaaaaaaaaaatatccaacaaaccaaactacgccaattcactaaccgccacgttaccgaaatacgaaccgccgcgcacaatattcgacgcgcccatcaacacgttcataccatacttacgcgaaacttccgccgcttcgaacgtaataaaaaattcgacgatcacgctaccaaactaataaaattcaacaacgtaaacgtaaataacgtcatcgtaactaacaaactacaatatttcgcgcgcgacacaaatacgacgataaattcgcgattcgactacgaccaacgtacgacgaacgccaattactcgacttcgt

SEQ ID NO: 17217 - DNA, 1129 bp, Artificial Sequence
  chemically treated genomic DNA (Homo sapiens) CpG-island No: 17217
  unsure (1080, 1082)
tggtattgagcgcgttggaaattgatatttagtttaacgttaacgtgttgatcggttttgacggcgtattgcgtggtgttttcggtggttattgcgatatcgcgattgtttttgcgttttttattatcgtcgcgtcgttggtacgcggtcgtatttcgattttggtggataacgtattgatttgtattattttaggttttagtgtcgatattttggttatagattacggtatcgtagttaattcggtacgttcggaattggtagaacgtttgtaggaagcgggtattaaagtggtttttattgagtggttgcgcgaacgtgcgcgtttgttgatcggtgaattatagtcgattgaatttatagatcgcgtcgttgtcgttgtgcgttatcgcgatggttcggtgatcgatgttgtgtattaggtgaaggaataagttatgtatttgttttttgaattcgttagttattatgcggtattaattttcgagttgttcgttagtcgggatgaaaggtaagtacggtaatacgtttggtttaagcgttattttgttttattggttttttttatcgtggttgcgtttgggtcgattaaagatagcgaggttatacgtcgaatttttaattatggcgtgatagttttgcgtgttttagtcgtaaaatagggttggtaaatttaggagtaggttgtattggttttcgttagcgggtcggagggtatgttgagtattgtcgtttcggttcgcgattttaagttcgatattattgagtttgaatatagttattttttcgggcggttatgggatatcgatgttttgacgttcgaaagcgaaattttttttcgtcgcgattattattggcgattcgtcgttgtttgtgtgcgaataagcgtagcggcggcgcgggaaaattataatgacgattattatcgagggggcgggacgagttagcggaggtataatttagtggagttaatagagatcgcggcgggtcggaggaaaggcgacggtcggtttaaggggtaaagcgaaaggtcgataggtcgaagtatgaaaattacgtgttcgatggtgcgtcgggttntnggaaacggattatatagaaagatacgattagatatatattagatata

SEQ ID NO: 17218 - DNA, 1129 bp, Artificial Sequence
  chemically treated genomic DNA (Homo sapiens) CpG-island No: 17218
  unsure (48, 50)
tatatctaatatatatctaatcgtatctttctatataatccgtttccnanaacccgacgcaccatcgaacacgtaattttcatacttcgacctatcgacctttcgctttaccccttaaaccgaccgtcgcctttcctccgacccgccgcgatctctattaactccactaaattatacctccgctaactcgtcccgccccctcgataataatcgtcattataattttcccgcgccgccgctacgcttattcgcacacaaacaacgacgaatcgccaataataatcgcgacgaaaaaaaatttcgctttcgaacgtcaaaacatcgatatcccataaccgcccgaaaaaataactatattcaaactcaataatatcgaacttaaaatcgcgaaccgaaacgacaatactcaacataccctccgacccgctaacgaaaaccaatacaacctactcctaaatttaccaaccctattttacgactaaaacacgcaaaactatcacgccataattaaaaattcgacgtataacctcgctatctttaatcgacccaaacgcaaccacgataaaaaaaaccaataaaacaaaataacgcttaaaccaaacgtattaccgtacttacctttcatcccgactaacgaacaactcgaaaattaataccgcataataactaacgaattcaaaaaacaaatacataacttattccttcacctaatacacaacatcgatcaccgaaccatcgcgataacgcacaacgacaacgacgcgatctataaattcaatcgactataattcaccgatcaacaaacgcgcacgttcgcgcaaccactcaataaaaaccactttaatacccgcttcctacaaacgttctaccaattccgaacgtaccgaattaactacgataccgtaatctataaccaaaatatcgacactaaaacctaaaataatacaaatcaatacgttatccaccaaaatcgaaatacgaccgcgtaccaacgacgcgacgataataaaaaacgcaaaaacaatcgcgatatcgcaataaccaccgaaaacaccacgcaatacgccgtcaaaaccgatcaacacgttaacgttaaactaaatatcaatttccaacgcgctcaatacca

SEQ ID NO: 17219 - DNA, 1129 bp, Artificial Sequence
  chemically treated genomic DNA (Homo sapiens) CpG-island No: 17219
  unsure (48, 50)
tgtatttggtgtgtgtttggtcgtgtttttttatgtggttcgtttttnanagttcgacgtattatcgaatacgtggtttttatatttcggtttatcggtttttcgttttgttttttagatcggtcgtcgtttttttttcggttcgtcgcggtttttgttagttttattgggttatattttcgttgattcgtttcgttttttcggtgataatcgttattatggttttttcgcgtcgtcgttgcgtttgttcgtatataggtagcggcgagtcgttagtgatagtcgcggcgggagagaatttcgttttcgggcgttaggatatcgatattttataatcgttcgagaggatgattatgtttaagtttaatggtgtcgagtttgaggtcgcgagtcggggcggtaatgtttaatatgtttttcggttcgttggcggaaattagtgtagtttgtttttgaatttgttagttttgttttgcggttaaggtacgtaaggttgttacgttatgattaaaaattcggcgtgtgatttcgttgtttttaatcggtttaggcgtaattacggtaaaggagattagtggaataggatggcgtttgagttagacgtgttgtcgtgtttgttttttatttcggttgacgagtagttcgggaattgatatcgtatggtggttggcgagtttaggaagtaggtgtatggtttatttttttatttgatgtataatatcgattatcgagttatcgcggtaacgtataacggtaacgacgcggtttgtgaatttaatcggttgtggtttatcggttagtagacgcgtacgttcgcgtagttatttaatggaaattattttaatgttcgttttttgtagacgttttgttagtttcggacgtgtcgggttaattgcgatatcgtggtttgtgattagaatatcgatattggagtttggggtgatgtaggttagtacgttatttattagagtcggaatacgatcgcgtattagcggcgcgacgatgatggaaagcgtagaggtaatcgcggtatcgtagtgattatcggaagtattacgtagtacgtcgttagagtcggttagtacgttaacgttgaattgggtgttaatttttagcgcgtttagtatta

SEQ ID NO: 17220 - DNA, 1129 bp, Artificial Sequence
  chemically treated genomic DNA (Homo sapiens) CpG-island No: 17220
  unsure (1080, 1082)
taatactaaacgcgctaaaaattaacacccaattcaacgttaacgtactaaccgactctaacgacgtactacgtaatacttccgataatcactacgataccgcgattacctctacgctttccatcatcgtcgcgccgctaatacgcgatcgtattccgactctaataaataacgtactaacctacatcaccccaaactccaatatcgatattctaatcacaaaccacgatatcgcaattaacccgacacgtccgaaactaacaaaacgtctacaaaaaacgaacattaaaataatttccattaaataactacgcgaacgtacgcgtctactaaccgataaaccacaaccgattaaattcacaaaccgcgtcgttaccgttatacgttaccgcgataactcgataatcgatattatacatcaaataaaaaaataaaccatacacctacttcctaaactcgccaaccaccatacgatatcaattcccgaactactcgtcaaccgaaataaaaaacaaacacgacaacacgtctaactcaaacgccatcctattccactaatctcctttaccgtaattacgcctaaaccgattaaaaacaacgaaatcacacgccgaatttttaatcataacgtaacaaccttacgtaccttaaccgcaaaacaaaactaacaaattcaaaaacaaactacactaatttccgccaacgaaccgaaaaacatattaaacattaccgccccgactcgcgacctcaaactcgacaccattaaacttaaacataatcatcctctcgaacgattataaaatatcgatatcctaacgcccgaaaacgaaattctctcccgccgcgactatcactaacgactcgccgctacctatatacgaacaaacgcaacgacgacgcgaaaaaaccataataacgattatcaccgaaaaaacgaaacgaatcaacgaaaatataacccaataaaactaacaaaaaccgcgacgaaccgaaaaaaaaacgacgaccgatctaaaaaacaaaacgaaaaaccgataaaccgaaatataaaaaccacgtattcgataatacgtcgaactntnaaaaacgaaccacataaaaaaacacgaccaaacacacaccaaataca

SEQ ID NO: 17221 - DNA, 789 bp, Artificial Sequence
  chemically treated genomic DNA (Homo sapiens) CpG-island No: 17221
cggtaggttaattacgttaaaatatattagtatttagaacgacgttataaaggtaggcgatagaatatcgttagcgttttgtggcgtaattagttgcggatcgatggtttgtaaggtttgtattgcgttatttaagtcgttagcggtatgtattacgttaataagtagtataacggtgttaattagtattataagtttttgtatggtgtcgtttagtacgttggcgcgaaagttattaaaggcggtatataacgtaatgttgatattaaaaattagtagttcggttttataaggaatattcgtcgcggtttttagtaggcgcgtatcgtcgataaattgtacggttatcgtattaacgaacgtaattagtaaatttaaattcgttagttatattagaagacgattttggtagcgggtaaatagtatatcgtttagcgttattgtattgtagcggcgcgtaagaatcgtaaattttttgtcgagaatatcgagtgaaagttagattgtaggaagttgaattatcgttagtaatatttagtttagttcgtatttataagtagtttttggttcgtcgataaacgaattggtattgatataggtcgcggtgagcgttatcgttagtataatatcgtttatagagcggttgtcgaggaaatatttattaaggaaggtgtcggtgtttcgtttacgtatcgtataaatcgagatatcgaatattattattagataggcgattagcggtagaattattttaagttgtatcgttattttttagtgggatatcgcgat

SEQ ID NO: 17222 - DNA, 789 bp, Artificial Sequence
  chemically treated genomic DNA (Homo sapiens) CpG-island No: 17222
atcgcgatatcccactaaaaaataacgatacaacttaaaataattctaccgctaatcgcctatctaataataatattcgatatctcgatttatacgatacgtaaacgaaacaccgacaccttccttaataaatatttcctcgacaaccgctctataaacgatattatactaacgataacgctcaccgcgacctatatcaataccaattcgtttatcgacgaaccaaaaactacttataaatacgaactaaactaaatattactaacgataattcaacttcctacaatctaactttcactcgatattctcgacaaaaaatttacgattcttacgcgccgctacaatacaataacgctaaacgatatactatttacccgctaccaaaatcgtcttctaatataactaacgaatttaaatttactaattacgttcgttaatacgataaccgtacaatttatcgacgatacgcgcctactaaaaaccgcgacgaatattccttataaaaccgaactactaatttttaatatcaacattacgttatataccgcctttaataactttcgcgccaacgtactaaacgacaccatacaaaaacttataatactaattaacaccgttatactacttattaacgtaatacataccgctaacgacttaaataacgcaatacaaaccttacaaaccatcgatccgcaactaattacgccacaaaacgctaacgatattctatcgcctacctttataacgtcgttctaaatactaatatattttaacgtaattaacctaccg

SEQ ID NO: 17223 - DNA, 789 bp, Artificial Sequence
  chemically treated genomic DNA (Homo sapiens) CpG-island No: 17223
atcgcgatattttattggaggatgacgatgtagtttgaagtaattttatcgttggtcgtttatttggtggtggtgttcggtatttcggtttatgcgatgcgtaaacggagtatcggtattttttttaatgagtattttttcggtagtcgttttatgggcggtattgtgttggcgatgacgtttatcgcgatttatattagtgttagttcgtttatcggcgggttaggagttgtttataaatacgggttgggttgggtattgttggcgatgatttagttttttgtagtttggtttttattcggtattttcggtaagaagtttgcgatttttgcgcgtcgttataatgtagtgacgttgaacgatatgttgtttgttcgttattagagtcgttttttggtgtggttggcgagtttgagtttgttggttgcgttcgttggtgcgatgatcgtgtagtttatcggcggtgcgcgtttgttggaaatcgcggcgggtattttttatgaaatcgggttgttgatttttggtattagtattgcgttatatatcgtttttggtggttttcgcgttagcgtgttgaacgatattatgtaagggtttgtgatgttgattggtatcgttgtgttgtttattggcgtagtatatgtcgttggcggtttaagtaacgtagtatagattttgtaaattatcgattcgtaattggttacgttataaggcgttgacgatattttgtcgtttgtttttatgacgtcgttttgggtattggtgtgttttggcgtgattggtttgtcg

SEQ ID NO: 17224 - DNA, 789 bp, Artificial Sequence
  chemically treated genomic DNA (Homo sapiens) CpG-island No: 17224
cgacaaaccaatcacgccaaaacacaccaatacccaaaacgacgtcataaaaacaaacgacaaaatatcgtcaacgccttataacgtaaccaattacgaatcgataatttacaaaatctatactacgttacttaaaccgccaacgacatatactacgccaataaacaacacaacgataccaatcaacatcacaaacccttacataatatcgttcaacacgctaacgcgaaaaccaccaaaaacgatatataacgcaatactaataccaaaaatcaacaacccgatttcataaaaaatacccgccgcgatttccaacaaacgcgcaccgccgataaactacacgatcatcgcaccaacgaacgcaaccaacaaactcaaactcgccaaccacaccaaaaaacgactctaataacgaacaaacaacatatcgttcaacgtcactacattataacgacgcgcaaaaatcgcaaacttcttaccgaaaataccgaataaaaaccaaactacaaaaaactaaatcatcgccaacaatacccaacccaacccgtatttataaacaactcctaacccgccgataaacgaactaacactaatataaatcgcgataaacgtcatcgccaacacaataccgcccataaaacgactaccgaaaaaatactcattaaaaaaaataccgatactccgtttacgcatcgcataaaccgaaataccgaacaccaccaccaaataaacgaccaacgataaaattacttcaaactacatcgtcatcctccaataaaatatcgcgat

SEQ ID NO: 17225 - DNA, 688 bp, Artificial Sequence
  chemically treated genomic DNA (Homo sapiens) CpG-island No: 17225
cgatatcgtcgtcgttatcgtttatggtaaaggatgggcgaataatgtacgggaagtttacgttagcggtaatcgttagcgttttttttatcgtgtgtgcgatatcggaacgcgcggtttttagattaattttttttatcgttacgtcgaaacgacggcggttttttgttttattaatcgtatcggtagtggtattaattatggtgatatcgaatttttttaatacgttttgacgttttagttttagcgcgtagtttagcgtcgtttgatcgtttatcgttggtagtatcgcgttcgggcgtttttttttaataattttgcgtataattttttagtgaatcggttcgatgtaggttgtattagttattttcgggtcggttatgatggtcgtcgggttggagtttattagaatgacgcggtaattttttttacgtagggtttataacgtttgcgcgttaagtagttaatttatacgttggacgataatatcgggttcgatttcgaatcggattttgtatattttgtacgtttgggagggtttttaattcgtaatattacgggttacgagtcggttttatatcggtaagggcgttatacgtcgcggttgttttgataacggttttgtagcgcgcgtaaatgtgtcgttgttttaaatatattgttatgttagtatatttttattttgtga

SEQ ID NO: 17226 - DNA, 688 bp, Artificial Sequence
  chemically treated genomic DNA (Homo sapiens) CpG-island No: 17226
tcacaaaataaaaatatactaacataacaatatatttaaaacaacgacacatttacgcgcgctacaaaaccgttatcaaaacaaccgcgacgtataacgcccttaccgatataaaaccgactcgtaacccgtaatattacgaattaaaaaccctcccaaacgtacaaaatatacaaaatccgattcgaaatcgaacccgatattatcgtccaacgtataaattaactacttaacgcgcaaacgttataaaccctacgtaaaaaaaattaccgcgtcattctaataaactccaacccgacgaccatcataaccgacccgaaaataactaatacaacctacatcgaaccgattcactaaaaaattatacgcaaaattattaaaaaaaaacgcccgaacgcgatactaccaacgataaacgatcaaacgacgctaaactacgcgctaaaactaaaacgtcaaaacgtattaaaaaaattcgatatcaccataattaataccactaccgatacgattaataaaacaaaaaaccgccgtcgtttcgacgtaacgataaaaaaaattaatctaaaaaccgcgcgttccgatatcgcacacacgataaaaaaaacgctaacgattaccgctaacgtaaacttcccgtacattattcgcccatcctttaccataaacgataacgacgacgatatcg

SEQ ID NO: 17227 - DNA, 688 bp, Artificial Sequence
  chemically treated genomic DNA (Homo sapiens) CpG-island No: 17227
ttataaggtaaaaatatgttggtataatagtgtgtttgaagtaacggtatatttgcgcgcgttgtagaatcgttgttaaaatagtcgcggcgtgtggcgtttttgtcggtatgggatcggttcgtaattcgtagtattacgggttaaaggtttttttaaacgtatagaatatataagattcgattcggggtcgggttcgatgttatcgtttagcgtgtgagttgattatttggcgcgtaagcgttgtaagttttgcgtgaagagggttatcgcgttattttggtgaattttaattcggcgattattatgatcgattcggaaatggttgatgtaatttatatcgagtcgatttattgggaagttgtacgtaagattattgaaaaagagcgttcggacgcggtgttgttaacgatgggcggttagacggcgttgaattgcgcgttggagttggaacgttagggcgtgttggaagagttcggtgttattatgattggtgttattgtcgatgcgattgataaagtagaagatcgtcgtcgtttcgacgtagcgatgaagaaaattggtttggaaatcgcgcgtttcggtatcgtatatacgatggaagaagcgttggcggttgtcgttgacgtgggtttttcgtgtattattcgtttattttttattatgggcggtagcggcggcggtatcg

SEQ ID NO: 17228 - DNA, 688 bp, Artificial Sequence
  chemically treated genomic DNA (Homo sapiens) CpG-island No: 17228
cgataccgccgccgctaccgcccataataaaaaataaacgaataatacacgaaaaacccacgtcaacgacaaccgccaacgcttcttccatcgtatatacgataccgaaacgcgcgatttccaaaccaattttcttcatcgctacgtcgaaacgacgacgatcttctactttatcaatcgcatcgacaataacaccaatcataataacaccgaactcttccaacacgccctaacgttccaactccaacgcgcaattcaacgccgtctaaccgcccatcgttaacaacaccgcgtccgaacgctctttttcaataatcttacgtacaacttcccaataaatcgactcgatataaattacatcaaccatttccgaatcgatcataataatcgccgaattaaaattcaccaaaataacgcgataaccctcttcacgcaaaacttacaacgcttacgcgccaaataatcaactcacacgctaaacgataacatcgaacccgaccccgaatcgaatcttatatattctatacgtttaaaaaaacctttaacccgtaatactacgaattacgaaccgatcccataccgacaaaaacgccacacgccgcgactattttaacaacgattctacaacgcgcgcaaatataccgttacttcaaacacactattataccaacatatttttaccttataa

SEQ ID NO: 17229 - DNA, 592 bp, Artificial Sequence
  chemically treated genomic DNA (Homo sapiens) CpG-island No: 17229
tatttttttggcgagttggaaatttttttgttgatggcgcgcgacgagtaggacgattcgtttaatttgaaaggtttttttgtcggggcgatgggttacggatagtttatgtcgtcgttttataaataatatgcggtagattttagcggcgacgggtatattaatttgtgggattcggttgatgcgatcggtagcgtggcgaattattttaaagcgtacggttgggtgaaaggcgattaggtcgcggtaatggtaaacggttaggttttaggtttgttaaatggttttaaaattaagtatagtatttcgtagtttgtcgtcgtaggtttaacgttatagtagtcgttgggtaattattaataagttagtttgttgcgtttggatgttggtatcggttattagtattggtacggtttgtcgaatttttatattattattcgttataattatagtatttattacgtaatggcggtttggtagttaggataagtcgtggcgttggcgcgagtatagtagttatttataagaggggggcgtgagtttttttttggtaattagttttttttgattttttcgtaaatttgtagtttaa

SEQ ID NO: 17230 - DNA, 592 bp, Artificial Sequence
  chemically treated genomic DNA (Homo sapiens) CpG-island No: 17230
ttaaactacaaatttacgaaaaaatcaaaaaaaactaattaccaaaaaaaaactcacgcccccctcttataaataactactatactcgcgccaacgccacgacttatcctaactaccaaaccgccattacgtaataaatactataattataacgaataataatataaaaattcgacaaaccgtaccaatactaataaccgataccaacatccaaacgcaacaaactaacttattaataattacccaacgactactataacgttaaacctacgacgacaaactacgaaatactatacttaattttaaaaccatttaacaaacctaaaacctaaccgtttaccattaccgcgacctaatcgcctttcacccaaccgtacgctttaaaataattcgccacgctaccgatcgcatcaaccgaatcccacaaattaatatacccgtcgccgctaaaatctaccgcatattatttataaaacgacgacataaactatccgtaacccatcgccccgacaaaaaaacctttcaaattaaacgaatcgtcctactcgtcgcgcgccatcaacaaaaaaatttccaactcgccaaaaaaata

SEQ ID NO: 17231 - DNA, 592 bp, Artificial Sequence
  chemically treated genomic DNA (Homo sapiens) CpG-island No: 17231
ttgggttgtaaatttacgagaggattagaaaaaattgattattagagggaagtttacgttttttttttgtaaatagttattgtattcgcgttagcgttacggtttgttttaattgttagatcgttattgcgtaatgggtgttgtggttgtaacgggtgatggtgtagaagttcggtagatcgtattagtattggtagtcggtgttaatatttagacgtagtaggttggtttgttgatggttgtttagcggttgttgtggcgttaaatttgcggcggtaagttgcgaaatgttgtatttagttttgaagttatttggtaagtttggagtttgatcgtttgttattatcgcgatttgatcgttttttatttagtcgtgcgttttgaaatagttcgttacgttatcgatcgtattaatcggattttataggttgatatgttcgtcgtcgttgaaatttatcgtatattgtttgtaagacgacggtataaattgttcgtagtttatcgtttcggtaaaggaattttttagattgagcggatcgttttgttcgtcgcgcgttattaataggaaggtttttagttcgttagagaaata

SEQ ID NO: 17232 - DNA, 592 bp, Artificial Sequence
  chemically treated genomic DNA (Homo sapiens) CpG-island No: 17232
tatttctctaacgaactaaaaaccttcctattaataacgcgcgacgaacaaaacgatccgctcaatctaaaaaattcctttaccgaaacgataaactacgaacaatttataccgtcgtcttacaaacaatatacgataaatttcaacgacgacgaacatatcaacctataaaatccgattaatacgatcgataacgtaacgaactatttcaaaacgcacgactaaataaaaaacgatcaaatcgcgataataacaaacgatcaaactccaaacttaccaaataacttcaaaactaaatacaacatttcgcaacttaccgccgcaaatttaacgccacaacaaccgctaaacaaccatcaacaaaccaacctactacgtctaaatattaacaccgactaccaatactaatacgatctaccgaacttctacaccatcacccgttacaaccacaacacccattacgcaataacgatctaacaattaaaacaaaccgtaacgctaacgcgaatacaataactatttacaaaaaaaaaacgtaaacttccctctaataatcaattttttctaatcctctcgtaaatttacaacccaa

SEQ ID NO: 17233 - DNA, 784 bp, Artificial Sequence
  chemically treated genomic DNA (Homo sapiens) CpG-island No: 17233
cgtaacgaaggacgattttagtatattcgtacggtgattatcggttgtagtcgtttaggttttggtaatcgttatgttttcgtttttcggatcgtttttcgggtgaacggtaattagcgtcggtacgtcgaatttacgtttgtattttttacgtatttcggtgtttgggtatttcggcgtaattattattacggtgatatttttacggatttgttcgtttatttcgacgatgttgaaatcgtgcgagtagtttagcgtcgcgtcgttttttattagtggttgtacggtgcgtattatattagagtgttgtttgttcggcgttaggttaatcgttagattcgttttattagtgattattttttttatcgtatttgtcgtattattagtagtaagtttaatttttatcgacgggtgtttcgcgcggaagcgatttagaatcggcggtagatggttgtaggtagcggttatcgagtagaagatatgtaattcgttagagagcgacggtttttgttgatcgatggtgtggcgtaattgttgatattgtaatagcgtttgttgggcgaaaacgcgtagtttttcgttcgttttagttagcgttatcgtgcggttatcgcgtataaatagcggttgatcgagatttttttttaggcgttgaatttgtcgtgagagcgtggatgggttaacgtgtatcgttcgcgcgttgcggttaaaatggcggtttttcgttagatgtaggaaggtttttagatcgcgtaaatttatagggatagttttcgatgttgat

SEQ ID NO: 17234 - DNA, 784 bp, Artificial Sequence
  chemically treated genomic DNA (Homo sapiens) CpG-island No: 17234
atcaacatcgaaaactatccctataaatttacgcgatctaaaaaccttcctacatctaacgaaaaaccgccattttaaccgcaacgcgcgaacgatacacgttaacccatccacgctctcacgacaaattcaacgcctaaaaaaaaatctcgatcaaccgctatttatacgcgataaccgcacgataacgctaactaaaacgaacgaaaaactacgcgttttcgcccaacaaacgctattacaatatcaacaattacgccacaccatcgatcaacaaaaaccgtcgctctctaacgaattacatatcttctactcgataaccgctacctacaaccatctaccgccgattctaaatcgcttccgcgcgaaacacccgtcgataaaaattaaacttactactaataatacgacaaatacgataaaaaaaataatcactaataaaacgaatctaacgattaacctaacgccgaacaaacaacactctaatataatacgcaccgtacaaccactaataaaaaacgacgcgacgctaaactactcgcacgatttcaacatcgtcgaaataaacgaacaaatccgtaaaaatatcaccgtaataataattacgccgaaatacccaaacaccgaaatacgtaaaaaatacaaacgtaaattcgacgtaccgacgctaattaccgttcacccgaaaaacgatccgaaaaacgaaaacataacgattaccaaaacctaaacgactacaaccgataatcaccgtacgaatatactaaaatcgtccttcgttacg

SEQ ID NO: 17235 - DNA, 784 bp, Artificial Sequence
  chemically treated genomic DNA (Homo sapiens) CpG-island No: 17235
gttaatatcgagggttgtttttgtggatttacgcgatttgaaaatttttttgtatttggcggaaagtcgttattttggtcgtagcgcgcgggcgatgtacgttagtttatttacgtttttacggtagatttagcgtttggaagaagatttcggttagtcgttgtttgtgcgcgataatcgtacggtgacgttgattgaagcgggcgaagagttgcgcgttttcgtttagtaaacgttgttgtagtattagtagttgcgttatattatcgattagtaagggtcgtcgttttttggcgaattatatattttttgttcggtgatcgttgtttatagttatttgtcgtcgattttggatcgttttcgcgcggaatattcgtcggtggagattaaatttattattggtgatgcggtagatgcgatggaaaaggtggttattggtgaagcggatttggcgattaatttgacgtcggataagtagtattttgatgtagtgcgtatcgtatagttattgatgaaagacggcgcggcgttgggttattcgtacggttttaatatcgtcgaagtgggcgagtagattcgtaaagatattatcgtagtgatggttgcgtcgaaatgtttaggtatcgaagtgcgtgaagagtataaacgtgggttcggcgtatcgacgttgattgtcgtttattcggaaaacgattcgaaaggcgaaggtatggcgattgttaaagtttgggcggttgtaatcggtggttatcgtgcgggtgtgttggaatcgtttttcgttgcg

SEQ ID NO: 17236 - DNA, 784 bp, Artificial Sequence
  chemically treated genomic DNA (Homo sapiens) CpG-island No: 17236
cgcaacgaaaaacgattccaacacacccgcacgataaccaccgattacaaccgcccaaactttaacaatcgccataccttcgcctttcgaatcgttttccgaataaacgacaatcaacgtcgatacgccgaacccacgtttatactcttcacgcacttcgatacctaaacatttcgacgcaaccatcactacgataatatctttacgaatctactcgcccacttcgacgatattaaaaccgtacgaataacccaacgccgcgccgtctttcatcaataactatacgatacgcactacatcaaaatactacttatccgacgtcaaattaatcgccaaatccgcttcaccaataaccaccttttccatcgcatctaccgcatcaccaataataaatttaatctccaccgacgaatattccgcgcgaaaacgatccaaaatcgacgacaaataactataaacaacgatcaccgaacaaaaaatatataattcgccaaaaaacgacgacccttactaatcgataatataacgcaactactaatactacaacaacgtttactaaacgaaaacgcgcaactcttcgcccgcttcaatcaacgtcaccgtacgattatcgcgcacaaacaacgactaaccgaaatcttcttccaaacgctaaatctaccgtaaaaacgtaaataaactaacgtacatcgcccgcgcgctacgaccaaaataacgactttccgccaaatacaaaaaaattttcaaatcgcgtaaatccacaaaaacaaccctcgatattaac

SEQ ID NO: 17237 - DNA, 557 bp, Artificial Sequence
  chemically treated genomic DNA (Homo sapiens) CpG-island No: 17237
ttggcgatttgcgttagttgtttatcgtttagtttacgggagaataattgcgttagttaggcgtaaatataggtaatttgttgtgttgttagcgtggttatgattttatttgcgacgcgggaatatattcgtattgcgttattatttttacggggtcgttaaacgtcgttatttgttttattgtttcgttgtattttttaatttttattagcgtagtgtgcgtattggtcgtttgcgttagttgcgatgtatcgatgtcgatggttaatacgttggggttatcgtatttgtatagcgtattaggttcgtcgtttttatttggatcgtattatgttttttcgtgaattcgtgttacgtcgggtgtatagcggttagaaattattgtttttgttaatatttgatcgcgagcgttaaagacgcgtattatattatcgttacgaatatcgcgcgcgttggtattttgcgggttaatgaatattggttttttattcgttatcgtatattgttgacgtagcgttttcgatttatataattgcgagtgaagtcggaaattcgga

SEQ ID NO: 17238 - DNA, 557 bp, Artificial Sequence
  chemically treated genomic DNA (Homo sapiens) CpG-island No: 17238
tccgaatttccgacttcactcgcaattatataaatcgaaaacgctacgtcaacaatatacgataacgaataaaaaaccaatattcattaacccgcaaaataccaacgcgcgcgatattcgtaacgataatataatacgcgtctttaacgctcgcgatcaaatattaacaaaaacaataatttctaaccgctatacacccgacgtaacacgaattcacgaaaaaacataatacgatccaaataaaaacgacgaacctaatacgctatacaaatacgataaccccaacgtattaaccatcgacatcgatacatcgcaactaacgcaaacgaccaatacgcacactacgctaataaaaattaaaaaatacaacgaaacaataaaacaaataacgacgtttaacgaccccgtaaaaataataacgcaatacgaatatattcccgcgtcgcaaataaaatcataaccacgctaacaacacaacaaattacctatatttacgcctaactaacgcaattattctcccgtaaactaaacgataaacaactaacgcaaatcgccaa

SEQ ID NO: 17239 - DNA, 557 bp, Artificial Sequence
  chemically treated genomic DNA (Homo sapiens) CpG-island No: 17239
ttcggattttcgattttattcgtagttatgtgagtcggaaacgttgcgttagtaatatacggtagcgggtaaagagttagtatttattaattcgtaggatgttagcgcgcgcggtattcgtaacggtgatgtggtacgcgtttttaacgttcgcggttaggtgttggtaggggtagtggtttttgatcgttatgtattcggcgtggtacgaatttacgaaggggtatggtacgatttagataaaggcggcgagtttggtgcgttgtgtaaatacggtaattttaacgtgttgattatcgatatcggtatatcgtagttggcgtaggcgattagtgcgtatattacgttggtggaaattgagaagtataacggaatagtggagtaggtgacggcgtttaacggtttcgtggagatggtggcgtagtgcgaatatgttttcgcgtcgtaggtgaaattatgattacgttgatagtataatagattgtttgtgtttacgtttggttagcgtagttgttttttcgtgagttggacgatgaataattgacgtaaatcgttag

SEQ ID NO: 17240 - DNA, 557 bp, Artificial Sequence
  chemically treated genomic DNA (Homo sapiens) CpG-island No: 17240
ctaacgatttacgtcaattattcatcgtccaactcacgaaaaaacaactacgctaaccaaacgtaaacacaaacaatctattatactatcaacgtaatcataatttcacctacgacgcgaaaacatattcgcactacgccaccatctccacgaaaccgttaaacgccgtcacctactccactattccgttatacttctcaatttccaccaacgtaatatacgcactaatcgcctacgccaactacgatataccgatatcgataatcaacacgttaaaattaccgtatttacacaacgcaccaaactcgccgcctttatctaaatcgtaccataccccttcgtaaattcgtaccacgccgaatacataacgatcaaaaaccactacccctaccaacacctaaccgcgaacgttaaaaacgcgtaccacatcaccgttacgaataccgcgcgcgctaacatcctacgaattaataaatactaactctttacccgctaccgtatattactaacgcaacgtttccgactcacataactacgaataaaatcgaaaatccgaa

SEQ ID NO: 17241 - DNA, 517 bp, Artificial Sequence
  chemically treated genomic DNA (Homo sapiens) CpG-island No: 17241
ggtgtcgtgtatagggtattatcgttcgcgtgaagttaggacgttagtattaggaaaacgatttgtcggatttgatcgtttcgttcgattaatcgtttttgttgattttcgacggcgtaatcgattcgtataatttcggcgcgtgtttgcgtagtgcggacgtcgtaggcgtttatgcggtgattgtgtcgaaagatcgtttcgtatagtttaacgttacggcgaaaaaagtagtttgcggcgcggtagaaagcgtttcgttgattcgggtgattaattttgcgcgtattatgcgtatgttgtaggaagagaatatttggatcgtcggtacggtaggcgaggcggattatatattttattagagtaaaatgatcggacgtttggcgttggtgatgggtgcggaaggtgaaggtatgcgtcgtttgattcgtgaatattgcgatgagttgattagtatttcgatggttggaagcgttttttttttgaacgtttcggttgcgatcggaatttgtttatt

SEQ ID NO: 17242 - DNA, 517 bp, Artificial Sequence
  chemically treated genomic DNA (Homo sapiens) CpG-island No: 17242
aataaacaaattccgatcgcaaccgaaacgttcaaaaaaaaaacgcttccaaccatcgaaatactaatcaactcatcgcaatattcacgaatcaaacgacgcataccttcaccttccgcacccatcaccaacgccaaacgtccgatcattttactctaataaaatatataatccgcctcgcctaccgtaccgacgatccaaatattctcttcctacaacatacgcataatacgcgcaaaattaatcacccgaatcaacgaaacgctttctaccgcgccgcaaactacttttttcgccgtaacgttaaactatacgaaacgatctttcgacacaatcaccgcataaacgcctacgacgtccgcactacgcaaacacgcgccgaaattatacgaatcgattacgccgtcgaaaatcaacaaaaacgattaatcgaacgaaacgatcaaatccgacaaatcgttttcctaatactaacgtcctaacttcacgcgaacgataataccctatacacgacacc

SEQ ID NO: 17243 - DNA, 517 bp, Artificial Sequence
  chemically treated genomic DNA (Homo sapiens) CpG-island No: 17243
aataagtaaatttcggtcgtaatcgaaacgtttagggaagaaacgtttttagttatcgggatgttgattaatttatcgtaatgtttacgagttaggcgacgtatatttttatttttcgtatttattattagcgttaggcgttcggttattttgttttgatagagtgtatgattcgtttcgtttgtcgtatcgacgatttagatattttttttttgtaatatacgtatggtgcgcgtaaggttagttattcgaattagcggaacgttttttgtcgcgtcgtaggttatttttttcgtcgtagcgttgagttgtgcggagcgatttttcggtataattatcgtatgaacgtttgcggcgttcgtattacgtaggtacgcgtcgaggttgtgcggatcggttacgtcgtcgaggattagtaggaacggttgatcgagcgaagcgattagattcggtagatcgtttttttgatattgacgttttggttttacgcgggcgataatgttttatgtacggtatt

SEQ ID NO: 17244 - DNA, 517 bp, Artificial Sequence
  chemically treated genomic DNA (Homo sapiens) CpG-island No: 17244
aataccgtacataaaacattatcgcccgcgtaaaaccaaaacgtcaatatcaaaaaaacgatctaccgaatctaatcgcttcgctcgatcaaccgttcctactaatcctcgacgacgtaaccgatccgcacaacctcgacgcgtacctacgtaatacgaacgccgcaaacgttcatacgataattataccgaaaaatcgctccgcacaactcaacgctacgacgaaaaaaataacctacgacgcgacaaaaaacgttccgctaattcgaataactaaccttacgcgcaccatacgtatattacaaaaaaaaaatatctaaatcgtcgatacgacaaacgaaacgaatcatacactctatcaaaacaaaataaccgaacgcctaacgctaataataaatacgaaaaataaaaatatacgtcgcctaactcgtaaacattacgataaattaatcaacatcccgataactaaaaacgtttcttccctaaacgtttcgattacgaccgaaatttacttatt

SEQ ID NO: 17245 - DNA, 544 bp, Artificial Sequence
  chemically treated genomic DNA (Homo sapiens) CpG-island No: 17245
atttaggaagattttgttagtttacgcgtgttagacgggaagttattaggaggttaacgtaaattagcgtattagtaggagcgtaatttggtattattttcggcgagcggggatagaaagataattagtaggaatagcggattaataattattaggcgttagatcggtacgatcgttaagcgatacgtcggaagaggatttaagataaggcgtagcggaagaagtatcgattaacgaatcggttacggaagagatacggtcgatatatagcgtttgtttcgtgcgcgggaatttttcgatttattcgatagaacggggtatcggttagttaagtacgtatcggagagtcgataggtgataacgtgtacgagaaatgttcggtaatcgaggtaaagatcggggaaacggggatcggaaggattagtacgcgggaaagaagttgtagggttttttaattattaaagtgattttggaaggcggcgttttttttcgggggaaaaaaagaaaaacggatagaacggataaaaaggtttttcggggggaa

SEQ ID NO: 17246 - DNA, 544 bp, Artificial Sequence
  chemically treated genomic DNA (Homo sapiens) CpG-island No: 17246
ttccccccgaaaaacctttttatccgttctatccgtttttctttttttcccccgaaaaaaaacgccgccttccaaaatcactttaataattaaaaaaccctacaacttctttcccgcgtactaatccttccgatccccgtttccccgatctttacctcgattaccgaacatttctcgtacacgttatcacctatcgactctccgatacgtacttaactaaccgataccccgttctatcgaataaatcgaaaaattcccgcgcacgaaacaaacgctatatatcgaccgtatctcttccgtaaccgattcgttaatcgatacttcttccgctacgccttatcttaaatcctcttccgacgtatcgcttaacgatcgtaccgatctaacgcctaataattattaatccgctattcctactaattatctttctatccccgctcgccgaaaataataccaaattacgctcctactaatacgctaatttacgttaacctcctaataacttcccgtctaacacgcgtaaactaacaaaatcttcctaaat

SEQ ID NO: 17247 - DNA, 544 bp, Artificial Sequence
  chemically treated genomic DNA (Homo sapiens) CpG-island No: 17247
tttttttcggggggtttttttgttcgttttgttcgtttttttttttttttttcgggaaaaggcgtcgttttttagggttattttggtgattgggaagttttatagtttttttttcgcgtgttagttttttcggttttcgttttttcggtttttatttcggttgtcgggtatttttcgtgtacgttgttatttgtcgatttttcggtacgtgtttggttgatcgatatttcgttttgtcggatgagtcggggaattttcgcgtacgaagtaggcgttgtatgtcgatcgtatttttttcgtgatcggttcgttgatcggtatttttttcgttacgttttattttgagttttttttcggcgtatcgtttggcgatcgtatcggtttggcgtttagtggttgttggttcgttgtttttgttggttatttttttgttttcgttcgtcggggatggtgttaggttacgtttttgttggtgcgttgatttacgttggttttttgatgatttttcgtttggtacgcgtgaattggtaggatttttttgaat

SEQ ID NO: 17248 - DNA, 544 bp, Artificial Sequence
  chemically treated genomic DNA (Homo sapiens) CpG-island No: 17248
attcaaaaaaatcctaccaattcacgcgtaccaaacgaaaaatcatcaaaaaaccaacgtaaatcaacgcaccaacaaaaacgtaacctaacaccatccccgacgaacgaaaacaaaaaaataaccaacaaaaacaacgaaccaacaaccactaaacgccaaaccgatacgatcgccaaacgatacgccgaaaaaaaactcaaaataaaacgtaacgaaaaaaataccgatcaacgaaccgatcacgaaaaaaatacgatcgacatacaacgcctacttcgtacgcgaaaattccccgactcatccgacaaaacgaaatatcgatcaaccaaacacgtaccgaaaaatcgacaaataacaacgtacacgaaaaatacccgacaaccgaaataaaaaccgaaaaaacgaaaaccgaaaaaactaacacgcgaaaaaaaaactataaaacttcccaatcaccaaaataaccctaaaaaacgacgccttttcccgaaaaaaaaaaaaaaaaacgaacaaaacgaacaaaaaaaccccccgaaaaaaa

SEQ ID NO: 17249 - DNA, 903 bp, Artificial Sequence
  chemically treated genomic DNA (Homo sapiens) CpG-island No: 17249
ggtatcggtgagttcgtttattattcgtgcggataatttttttcgggatgaggtcggttttttttgttagtttgtcgtgacggttatatcggtaaagatagtgcgcgttacgggcgatacggttattcggttatatgttgagggtgttgttcgggtgtagtttcgggtcgggtaggcggttatttgtcgggtttgtggtatacgggatgcggatatttagattcgttgcggtggtgtgaacgtcggttagtttgtcggtggtgttgtagttgtaatttcgggtttggcgcgggttgttgatgcggatgagttcgtcgttgtcgttttaggtgtaatcgcggttagatagtaggttgtttaggtgttggttttgtaattgttcggtaggggtataagcggtggtgagtttataacggtcgaagttgcgtagcgtttttcggtgtaggcggtcgcgggtgtattttattagcggtgtgtcgtcgagttttatgtttgttaggtaatcgttgtcgtaggttagttattttacggcgggtaggttgttcggtatatagcggttcgttagtttttgcgcgttgtacgtatgtttggttttatgttgttagagtagtgttttcgtttgcgggtgatgtatcgtttgacgtttatcggttagtcggtttttttattttattgttatgtttcgtatcggtgttttcgtgattggttgtgtttgtagtagtagttcgtatttgtttcgtttgggttttttcgggcggtgtgagggtcgtcgttaggcgtgggtcgatttttttcgaaatatcgtcggcggaatagttggtatagtttgtacggattgaggagtggtttagggattcgtaaatagttcgatgttatttttgtgtgttttttttggtttttttg

SEQ ID NO: 17250 - DNA, 903 bp, Artificial Sequence
  chemically treated genomic DNA (Homo sapiens) CpG-island No: 17250
caaaaaaaccaaaaaaaacacacaaaaataacatcgaactatttacgaatccctaaaccactcctcaatccgtacaaactataccaactattccgccgacgatatttcgaaaaaaatcgacccacgcctaacgacgaccctcacaccgcccgaaaaaacccaaacgaaacaaatacgaactactactacaaacacaaccaatcacgaaaacaccgatacgaaacataacaataaaataaaaaaaccgactaaccgataaacgtcaaacgatacatcacccgcaaacgaaaacactactctaacaacataaaaccaaacatacgtacaacgcgcaaaaactaacgaaccgctatataccgaacaacctacccgccgtaaaataactaacctacgacaacgattacctaacaaacataaaactcgacgacacaccgctaataaaatacacccgcgaccgcctacaccgaaaaacgctacgcaacttcgaccgttataaactcaccaccgcttatacccctaccgaacaattacaaaaccaacacctaaacaacctactatctaaccgcgattacacctaaaacgacaacgacgaactcatccgcatcaacaacccgcgccaaacccgaaattacaactacaacaccaccgacaaactaaccgacgttcacaccaccgcaacgaatctaaatatccgcatcccgtataccacaaacccgacaaataaccgcctacccgacccgaaactacacccgaacaacaccctcaacatataaccgaataaccgtatcgcccgtaacgcgcactatctttaccgatataaccgtcacgacaaactaacaaaaaaaaccgacctcatcccgaaaaaaattatccgcacgaataataaacgaactcaccgatacc

SEQ ID NO: 17251 - DNA, 903 bp, Artificial Sequence
  chemically treated genomic DNA (Homo sapiens) CpG-island No: 17251
taaagaagttaaaagaaatatataaaagtggtatcgggttatttgcgggtttttgagttattttttagttcgtatagattgtgttaattgtttcgtcggcgatatttcgagggaagtcgatttacgtttagcgacgatttttatatcgttcgaagggatttagacggggtagatacgaattgttgttgtaaatatagttaattacgaaggtatcggtgcggggtataatagtaagatgagaaagtcggttgatcggtgagcgttagacggtgtattattcgtagacggaagtattgttttggtagtatgagattagatatgcgtataacgcgtaggggttggcgaatcgttgtatatcggatagtttgttcgtcgtggaatggttgatttacggtagcggttatttggtaggtatgaaattcggcgatatatcgttggtggagtatattcgcgatcgtttgtatcgggaaacgttgcgtagtttcggtcgttatgaatttattatcgtttatatttttgtcgggtagttatagagttagtatttgaatagtttgttgtttgatcgcgattatatttggaacgataacggcgaatttattcgtattagtagttcgcgttagattcggagttatagttatagtattatcggtaggttgatcggcgtttatattatcgtagcgaatttggatattcgtatttcgtatgttatagattcggtaggtaatcgtttgttcgattcggagttgtattcggatagtatttttagtatgtggtcggataatcgtatcgttcgtgacgcgtattatttttatcggtatgatcgttacggtaggttgatagagaaaatcgattttatttcggaaggggttattcgtacggatgatgagcggatttatcggtatt

SEQ ID NO: 17252 - DNA, 903 bp, Artificial Sequence
  chemically treated genomic DNA (Homo sapiens) CpG-island No: 17252
aataccgataaatccgctcatcatccgtacgaataaccccttccgaaataaaatcgattttctctatcaacctaccgtaacgatcataccgataaaaataatacgcgtcacgaacgatacgattatccgaccacatactaaaaatactatccgaatacaactccgaatcgaacaaacgattacctaccgaatctataacatacgaaatacgaatatccaaattcgctacgataatataaacgccgatcaacctaccgataatactataactataactccgaatctaacgcgaactactaatacgaataaattcgccgttatcgttccaaatataatcgcgatcaaacaacaaactattcaaatactaactctataactacccgacaaaaatataaacgataataaattcataacgaccgaaactacgcaacgtttcccgatacaaacgatcgcgaatatactccaccaacgatatatcgccgaatttcatacctaccaaataaccgctaccgtaaatcaaccattccacgacgaacaaactatccgatatacaacgattcgccaacccctacgcgttatacgcatatctaatctcatactaccaaaacaatacttccgtctacgaataatacaccgtctaacgctcaccgatcaaccgactttctcatcttactattataccccgcaccgataccttcgtaattaactatatttacaacaacaattcgtatctaccccgtctaaatcccttcgaacgatataaaaatcgtcgctaaacgtaaatcgacttccctcgaaatatcgccgacgaaacaattaacacaatctatacgaactaaaaaataactcaaaaacccgcaaataacccgataccacttttatatatttcttttaacttcttta

SEQ ID NO: 17253 - DNA, 574 bp, Artificial Sequence
  chemically treated genomic DNA (Homo sapiens) CpG-island No: 17253
taattcggtggtttttagtattagttcggtagcgcgggttaatcgttcgtagcgacgtatcgtaggtaattgcgttattttggttttaaagttatttagcgtggttagttagcgagttaggcgcgtggttattatattatttttggtgttgttagacggtagagtttttgttagcgagtggcgatattggcgtcgagatcgtttttatcggcggagattttatagtcgttaggatggagggtgggatcgtttcgtaagcgttagttatgtaaatttaaggtagcgtcgagtatattatttatacgttgtagattattcgggtgtacgcgtagttgtggtttatcgttgaataacggtttttgttgtaataattgttggatttgtttgattagtgtcgagttatttatcgttggcgtttgatcgatgatttgacgtgtcgtttttagcgttatttgtattaggcgcgacgttattatattattaagtgtattaagggtagtttgaaattcgttgattagttgttgtattcgggtatgaattggcgtttgttgagatttcgtttttgttagatttt

SEQ ID NO: 17254 - DNA, 574 bp, Artificial Sequence
  chemically treated genomic DNA (Homo sapiens) CpG-island No: 17254
aaaatctaacaaaaacgaaatctcaacaaacgccaattcatacccgaatacaacaactaatcaacgaatttcaaactacccttaatacacttaataatataataacgtcgcgcctaatacaaataacgctaaaaacgacacgtcaaatcatcgatcaaacgccaacgataaataactcgacactaatcaaacaaatccaacaattattacaacaaaaaccgttattcaacgataaaccacaactacgcgtacacccgaataatctacaacgtataaataatatactcgacgctaccttaaatttacataactaacgcttacgaaacgatcccaccctccatcctaacgactataaaatctccgccgataaaaacgatctcgacgccaatatcgccactcgctaacaaaaactctaccgtctaacaacaccaaaaataatataataaccacgcgcctaactcgctaactaaccacgctaaataactttaaaaccaaaataacgcaattacctacgatacgtcgctacgaacgattaacccgcgctaccgaactaatactaaaaaccaccgaatta

SEQ ID NO: 17255 - DNA, 574 bp, Artificial Sequence
  chemically treated genomic DNA (Homo sapiens) CpG-island No: 17255
aaggtttggtagaggcgaagttttaataagcgttaatttatgttcggatgtagtaattggttagcgaattttaaattatttttgatgtatttgatagtgtgatagcgtcgcgtttgatgtagatggcgttggaggcggtacgttaggttatcggttagacgttaacggtggataattcggtattgattaaatagatttaatagttgttgtagtaagaatcgttatttagcggtaaattatagttgcgcgtgtattcggatgatttgtaacgtgtggatgatatgttcggcgttattttaagtttgtatggttggcgtttgcggggcgattttattttttattttggcggttgtaaagttttcgtcgatgaaggcgatttcgacgttagtgtcgttattcgttggtaagaattttgtcgtttggtagtattaggagtggtgtaatgattacgcgtttgattcgttggttaattacgttggataattttgaagttaaaatggcgtagttgtttgcggtacgtcgttacgggcgattaattcgcgttatcgggttggtgttggaagttatcggatta

SEQ ID NO: 17256 - DNA, 574 bp, Artificial Sequence
  chemically treated genomic DNA (Homo sapiens) CpG-island No: 17256
taatccgataacttccaacaccaacccgataacgcgaattaatcgcccgtaacgacgtaccgcaaacaactacgccattttaacttcaaaattatccaacgtaattaaccaacgaatcaaacgcgtaatcattacaccactcctaatactaccaaacgacaaaattcttaccaacgaataacgacactaacgtcgaaatcgccttcatcgacgaaaactttacaaccgccaaaataaaaaataaaatcgccccgcaaacgccaaccatacaaacttaaaataacgccgaacatatcatccacacgttacaaatcatccgaatacacgcgcaactataatttaccgctaaataacgattcttactacaacaactattaaatctatttaatcaataccgaattatccaccgttaacgtctaaccgataacctaacgtaccgcctccaacgccatctacatcaaacgcgacgctatcacactatcaaatacatcaaaaataatttaaaattcgctaaccaattactacatccgaacataaattaacgcttattaaaacttcgcctctaccaaacctt

SEQ ID NO: 17257 - DNA, 1117 bp, Artificial Sequence
  chemically treated genomic DNA (Homo sapiens) CpG-island No: 17257
cgaagagttggtattgttggaaattttcgatatcggtaaatcgattcgttatagtttgcgtgatgatattttcggcgcggcgcgcgttattcgttggtacgtcgaagcgatcgataaagtgtatggcgaagtggcgattattagtagttatgagttggcgatgatcgtgcgtgaatcggtcggcgtgattgtcgttatcgtgtcgtggaatttttcgttgttgttgatttgttggaaattcggttcggcgttggcggcgggaaatagcgtgattttaaaatcgtttgaaaaattatcgtttagtgcgattcgtttcgcggggttggcgaaagaagtaggtttgtcggatggtgtgttgaacgtggtgacgggttttggttatgaagtcgggtaggcgttgtcgcgttataacgatatcgacgttattgtttttatcggtttaattcgtatcgggaaatagttgttgaaagatgcgggcgatagtaatatgaaacgcgtttggttggaagcgggcggtaaaagcgttaatatcgttttcgttgattgttcggatttgtaataggcggtaagcgttatcgtagtaggtattttttataattaggggataggtgtgtatcgtcggaacgcgtttgttgttggaagagagtatcgtcgatgaatttttagttttgttaaaatagtaggcgtaaaattggtagtcgggttatttatttgatttcgtaattattatgggtattttaatcgattgcgtttacgtcgattcggtttatagttttattcgggaaggcgaaagtataagggtaattggttgttggatggtcgtaacgtcgggttggttgtcgttatcggttcgattatttttgtggatgtggattcgaatgcgtttttaagtcgcgaagagattttcggttcggtgttggtggttacgcgttttatattagaagaataggcgttatagtttgttaacgatagttagtacggttttggcgcggcggtatggacgcgcgattttttcgcgcgtatcgtatgagtcgacgtttgagagtcggtttcgttttcgttaataattataacgataggcgatatgatcgtgtcgtttggcggtataagtagagcg

SEQ ID NO: 17258 - DNA, 1117 bp, Artificial Sequence
  chemically treated genomic DNA (Homo sapiens) CpG-island No: 17258
cgctctacttataccgccaaacgacacgatcatatcgcctatcgttataattattaacgaaaacgaaaccgactctcaaacgtcgactcatacgatacgcgcgaaaaaatcgcgcgtccataccgccgcgccaaaaccgtactaactatcgttaacaaactataacgcctattcttctaatataaaacgcgtaaccaccaacaccgaaccgaaaatctcttcgcgacttaaaaacgcattcgaatccacatccacaaaaataatcgaaccgataacgacaaccaacccgacgttacgaccatccaacaaccaattacccttatactttcgccttcccgaataaaactataaaccgaatcgacgtaaacgcaatcgattaaaatacccataataattacgaaatcaaataaataacccgactaccaattttacgcctactattttaacaaaactaaaaattcatcgacgatactctcttccaacaacaaacgcgttccgacgatacacacctatcccctaattataaaaaatacctactacgataacgcttaccgcctattacaaatccgaacaatcaacgaaaacgatattaacgcttttaccgcccgcttccaaccaaacgcgtttcatattactatcgcccgcatctttcaacaactatttcccgatacgaattaaaccgataaaaacaataacgtcgatatcgttataacgcgacaacgcctacccgacttcataaccaaaacccgtcaccacgttcaacacaccatccgacaaacctacttctttcgccaaccccgcgaaacgaatcgcactaaacgataatttttcaaacgattttaaaatcacgctatttcccgccgccaacgccgaaccgaatttccaacaaatcaacaacaacgaaaaattccacgacacgataacgacaatcacgccgaccgattcacgcacgatcatcgccaactcataactactaataatcgccacttcgccatacactttatcgatcgcttcgacgtaccaacgaataacgcgcgccgcgccgaaaatatcatcacgcaaactataacgaatcgatttaccgatatcgaaaatttccaacaataccaactcttcg

SEQ ID NO: 17259 - DNA, 1117 bp, Artificial Sequence
  chemically treated genomic DNA (Homo sapiens) CpG-island No: 17259
cgttttgtttatatcgttaaacggtacggttatatcgtttgtcgttgtagttattgacgaagacggaatcggtttttaggcgtcggtttatgcggtgcgcgcgggagagtcgcgcgtttatatcgtcgcgttaaggtcgtattggttgtcgttggtaagttgtagcgtttgtttttttgatgtgaaacgcgtgattattagtatcggatcgaaaattttttcgcgatttaaggacgtattcgggtttatatttataaagatggtcgggtcgatggcggtagttagttcggcgttacggttatttaataattagttgtttttgtgttttcgttttttcgaataaagttatggatcgagtcggcgtgggcgtagtcgattaaggtgtttatggtggttgcgggattaagtggatggttcggttgttagttttgcgtttgttgttttaatagggttaagaatttatcggcgatgtttttttttagtaataggcgcgtttcggcgatgtatatttgttttttggttgtagaaaatgtttgttgcggtggcgtttgtcgtttgttgtaaattcgggtagttagcgaaaacgatgttggcgtttttgtcgttcgtttttagttagacgcgttttatgttgttgtcgttcgtattttttagtagttgtttttcggtacgggttgaatcggtaaaggtaatggcgtcgatatcgttatgacgcgatagcgtttgttcggttttatgattaaaattcgttattacgtttaatatattattcggtaagtttgtttttttcgttagtttcgcgagacgaatcgtattgagcggtgattttttagacggttttagaattacgttgtttttcgtcgttagcgtcgggtcgagtttttagtaagttagtaatagcgggaagttttacggtacgatggcggtaattacgtcgatcggtttacgtacgattatcgttagtttatggttattggtggtcgttatttcgttatatattttgtcgatcgtttcggcgtattagcgaatggcgcgcgtcgcgtcgggaatattattacgtagattgtgacgaatcggtttgtcggtgtcgagagtttttagtagtgttagtttttcg

SEQ ID NO: 17260 - DNA, 1117 bp, Artificial Sequence
  chemically treated genomic DNA (Homo sapiens) CpG-island No: 17260
cgaaaaactaacactactaaaaactctcgacaccgacaaaccgattcgtcacaatctacgtaataatattcccgacgcgacgcgcgccattcgctaatacgccgaaacgatcgacaaaatatataacgaaataacgaccaccaataaccataaactaacgataatcgtacgtaaaccgatcgacgtaattaccgccatcgtaccgtaaaacttcccgctattactaacttactaaaaactcgacccgacgctaacgacgaaaaacaacgtaattctaaaaccgtctaaaaaatcaccgctcaatacgattcgtctcgcgaaactaacgaaaaaaacaaacttaccgaataatatattaaacgtaataacgaattttaatcataaaaccgaacaaacgctatcgcgtcataacgatatcgacgccattacctttaccgattcaacccgtaccgaaaaacaactactaaaaaatacgaacgacaacaacataaaacgcgtctaactaaaaacgaacgacaaaaacgccaacatcgttttcgctaactacccgaatttacaacaaacgacaaacgccaccgcaacaaacattttctacaaccaaaaaacaaatatacatcgccgaaacgcgcctattactaaaaaaaaacatcgccgataaattcttaaccctattaaaacaacaaacgcaaaactaacaaccgaaccatccacttaatcccgcaaccaccataaacaccttaatcgactacgcccacgccgactcgatccataactttattcgaaaaaacgaaaacacaaaaacaactaattattaaataaccgtaacgccgaactaactaccgccatcgacccgaccatctttataaatataaacccgaatacgtccttaaatcgcgaaaaaattttcgatccgatactaataatcacgcgtttcacatcaaaaaaacaaacgctacaacttaccaacgacaaccaatacgaccttaacgcgacgatataaacgcgcgactctcccgcgcgcaccgcataaaccgacgcctaaaaaccgattccgtcttcgtcaataactacaacgacaaacgatataaccgtaccgtttaacgatataaacaaaacg

SEQ ID NO: 17261 - DNA, 618 bp, Artificial Sequence
  chemically treated genomic DNA (Homo sapiens) CpG-island No: 17261
gtttgaaggtgttgcgggatgtcgttttttcgcgcgtgaggttgcggttttgacggtgagttgggggcgcgttgtcgtcgtcggttagatttttttttattacggatatcggagtcggtgcgttttttatacgaatcgtggattttttttcgcgagtacgtattgttttttgcgtttacgttggttttttttttttacggacgcgcggcggttttttttttagggttaaggtcgcgttttttttttcgttcggggtttttattttttttttcgttcggttttggatttttttaggttttttcgtattttcgttcgtttcggacggtttcggtttttttttcgtttttatttttttgggtttcgttagatcggcgttttttttattttggatttttttagattttcggtttttttttttttcgtgttttttcgcgcgttttttatcgggcgtcgtgtttagggttaggatggtcggagttttaggggcgtagttcggattttcgggtcgttttttttgtcgcgtttttcggggtttcgcgttttttgggatgggttcggaaaggggtggggagtttttttaaaatataaaaatggaggttttttttgtttgatgtatat

SEQ ID NO: 17262 - DNA, 618 bp, Artificial Sequence
  chemically treated genomic DNA (Homo sapiens) CpG-island No: 17262
atatacatcaaacaaaaaaaacctccatttttatattttaaaaaaactccccacccctttccgaacccatcccaaaaaacgcgaaaccccgaaaaacgcgacaaaaaaaacgacccgaaaatccgaactacgcccctaaaactccgaccatcctaaccctaaacacgacgcccgataaaaaacgcgcgaaaaaacacgaaaaaaaaaaaaaccgaaaatctaaaaaaatccaaaataaaaaaaacgccgatctaacgaaacccaaaaaaataaaaacgaaaaaaaaaccgaaaccgtccgaaacgaacgaaaatacgaaaaaacctaaaaaaatccaaaaccgaacgaaaaaaaaaataaaaaccccgaacgaaaaaaaaaacgcgaccttaaccctaaaaaaaaaaccgccgcgcgtccgtaaaaaaaaaaaaccaacgtaaacgcaaaaaacaatacgtactcgcgaaaaaaaatccacgattcgtataaaaaacgcaccgactccgatatccgtaataaaaaaaaatctaaccgacgacgacaacgcgcccccaactcaccgtcaaaaccgcaacctcacgcgcgaaaaaacgacatcccgcaacaccttcaaac

SEQ ID NO: 17263 - DNA, 618 bp, Artificial Sequence
  chemically treated genomic DNA (Homo sapiens) CpG-island No: 17263
atgtgtattaaatagaaaaaatttttatttttatattttggggaagttttttattttttttcgggtttattttaggggacgcgagatttcgaggagcgcggtaagaagagcggttcgggggttcggattgcgtttttaggatttcggttattttggttttaggtacggcgttcggtagaaagcgcgcgggagggtacgagggggaggaaggtcggagatttgaggagatttaaggtgggagggacgtcggtttgacggggtttaagggggtaggggcggggaagggatcgaggtcgttcgaggcggacgggggtgcgggagggtttgagggggtttaaggtcgggcgaggggaagggtgggaatttcgaacgggggagagggcgcggttttggttttggggaggaggtcgtcgcgcgttcgtgaggggaggggattagcgtaaacgtaggaggtagtgcgtgttcgcggggaagagtttacgattcgtgtggaggacgtatcggtttcggtgttcgtgatgggagagggtttggtcggcgacgataacgcgtttttaatttatcgttagagtcgtagttttacgcgcgaaggaacggtatttcgtagtatttttagat

SEQ ID NO: 17264 - DNA, 618 bp, Artificial Sequence
  chemically treated genomic DNA (Homo sapiens) CpG-island No: 17264
atctaaaaatactacgaaataccgttccttcgcgcgtaaaactacgactctaacgataaattaaaaacgcgttatcgtcgccgaccaaaccctctcccatcacgaacaccgaaaccgatacgtcctccacacgaatcgtaaactcttccccgcgaacacgcactacctcctacgtttacgctaatcccctcccctcacgaacgcgcgacgacctcctccccaaaaccaaaaccgcgccctctcccccgttcgaaattcccacccttcccctcgcccgaccttaaaccccctcaaaccctcccgcacccccgtccgcctcgaacgacctcgatcccttccccgcccctacccccttaaaccccgtcaaaccgacgtccctcccaccttaaatctcctcaaatctccgaccttcctccccctcgtaccctcccgcgcgctttctaccgaacgccgtacctaaaaccaaaataaccgaaatcctaaaaacgcaatccgaacccccgaaccgctcttcttaccgcgctcctcgaaatctcgcgtcccctaaaataaacccgaaaaaaaataaaaaacttccccaaaatataaaaataaaaattttttctatttaatacacat

SEQ ID NO: 17265 - DNA, 546 bp, Artificial Sequence
  chemically treated genomic DNA (Homo sapiens) CpG-island No: 17265
gttggcgttggacgttttaataggttagtatcgatgtttgatgcgacgtttgacgcgttttattaggtttataaattttcgtatttttcgtaggtcggataaggcgtttacgtcgtattcggtaatggtgtcgattgttcgatgcgacgtttgcgcgttttattaggtttataaatagttcgaatttttcgtaggtcggataaggcgtttacgtcgtattcggtaattggtgtatgatgtttgatgcgacgtttgcgcgttttattaggtttataaattttcgtattattcgtaggtcggataaggcgtttacgttgtattcggtaattggtgtcgattgtttgatgtgacgttggcgcgttttattaggtttatatattttcgtatttttcgtaggtcggataaggcgtttacgtcgtattcggtaatggtgtcgattgtttgatgcgacgtttgcgcgttttattaggtttatagttttataacgtattgaaattgttggttttgtaggtcggataaggcgttcgcgtcgtattcggtatttta

SEQ ID NO: 17266 - DNA, 546 bp, Artificial Sequence
  chemically treated genomic DNA (Homo sapiens) CpG-island No: 17266
taaaataccgaatacgacgcgaacgccttatccgacctacaaaaccaacaatttcaatacgttataaaactataaacctaataaaacgcgcaaacgtcgcatcaaacaatcgacaccattaccgaatacgacgtaaacgccttatccgacctacgaaaaatacgaaaatatataaacctaataaaacgcgccaacgtcacatcaaacaatcgacaccaattaccgaatacaacgtaaacgccttatccgacctacgaataatacgaaaatttataaacctaataaaacgcgcaaacgtcgcatcaaacatcatacaccaattaccgaatacgacgtaaacgccttatccgacctacgaaaaattcgaactatttataaacctaataaaacgcgcaaacgtcgcatcgaacaatcgacaccattaccgaatacgacgtaaacgccttatccgacctacgaaaaatacgaaaatttataaacctaataaaacgcgtcaaacgtcgcatcaaacatcgatactaacctattaaaacgtccaacgccaac

SEQ ID NO: 17267 - DNA, 546 bp, Artificial Sequence
  chemically treated genomic DNA (Homo sapiens) CpG-island No: 17267
taaaatgtcggatgcggcgcgaacgttttattcggtttataaaattagtaattttaatacgttgtaaaattgtaggtttgataagacgcgtaagcgtcgtattaggtagtcggtattattgtcggatgcggcgtaaacgttttattcggtttacggagggtgcgggaatatgtaggtttgataagacgcgttagcgttatattaggtagtcggtattaattgtcggatgtagcgtaaacgttttattcggtttacggatggtgcgggaatttgtaggtttgataagacgcgtaagcgtcgtattaggtattatgtattaattgtcggatgcggcgtaaacgttttattcggtttacggagggttcggattatttgtaggtttgataagacgcgtaagcgtcgtatcgggtagtcggtattattgtcggatgcggcgtaaacgttttattcggtttacggagggtgcgggaatttgtaggtttgataagacgcgttaagcgtcgtattaggtatcggtgttggtttattaagacgtttagcgttagt

SEQ ID NO: 17268 - DNA, 546 bp, Artificial Sequence
  chemically treated genomic DNA (Homo sapiens) CpG-island No: 17268
actaacgctaaacgtcttaataaaccaacaccgatacctaatacgacgcttaacgcgtcttatcaaacctacaaattcccgcaccctccgtaaaccgaataaaacgtttacgccgcatccgacaataataccgactacccgatacgacgcttacgcgtcttatcaaacctacaaataatccgaaccctccgtaaaccgaataaaacgtttacgccgcatccgacaattaatacataatacctaatacgacgcttacgcgtcttatcaaacctacaaattcccgcaccatccgtaaaccgaataaaacgtttacgctacatccgacaattaataccgactacctaatataacgctaacgcgtcttatcaaacctacatattcccgcaccctccgtaaaccgaataaaacgtttacgccgcatccgacaataataccgactacctaatacgacgcttacgcgtcttatcaaacctacaattttacaacgtattaaaattactaattttataaaccgaataaaacgttcgcgccgcatccgacatttta

SEQ ID NO: 17269 - DNA, 703 bp, Artificial Sequence
  chemically treated genomic DNA (Homo sapiens) CpG-island No: 17269
  unsure (645..646, 648, 663, 665, 676..677, 684, 689, 692, 694, 700..)
ggtttaggcgatttagagacgttttaatattagattcgttggtatcgcgtagtgcgttttgttcggcgatagatttttgtagatgtagatttgtcgcgcgattaaagattattaggtttagtagcgagttgtcgtttagacggttagcgtcgtgtatcgatatataagcgattttattaacggtaaatagtttcggaataattatattttcgttttttttatttatagttagtgtttgatcggtaattttggtcggaatatcgtttattatgtagtgataggttgggataatcggaatcggtttttttatcggatcgacgtgagcgaaggtacgggaaagttttaggatattcggtagacgggattcgagaatttttttatttaggtgatcgagttttagtttcgcgtgtggtttttacggattattatagtcgcgatttttacggatttcgattatgatggaacgcgtaattacgttacggttcgttaggtttttggcgttcggcgtataacgttttataaaacgttcgttatgtttgtttagtagataatcgtttttattacggtaattttcggtgattagtacgttcgtatcggtaatgtcggtcgggtggaattgttatatttttatattttgtatcggtnnancgtcggttacggtantnagtttatgttnngattatncgttncgntncggtgnntt

SEQ ID NO: 17270 - DNA, 703 bp, Artificial Sequence
  chemically treated genomic DNA (Homo sapiens) CpG-island No: 17270
  unsure (3..4, 10, 12, 15, 20, 27..28, 39, 41, 56, 58..)
aanncaccgnancgnaacgnataatcnnaacataaactnantaccgtaaccgacgntnnaccgatacaaaatataaaaatataacaattccacccgaccgacattaccgatacgaacgtactaatcaccgaaaattaccgtaataaaaacgattatctactaaacaaacataacgaacgttttataaaacgttatacgccgaacgccaaaaacctaacgaaccgtaacgtaattacgcgttccatcataatcgaaatccgtaaaaatcgcgactataataatccgtaaaaaccacacgcgaaactaaaactcgatcacctaaataaaaaaattctcgaatcccgtctaccgaatatcctaaaactttcccgtaccttcgctcacgtcgatccgataaaaaaaccgattccgattatcccaacctatcactacataataaacgatattccgaccaaaattaccgatcaaacactaactataaataaaaaaaacgaaaatataattattccgaaactatttaccgttaataaaatcgcttatatatcgatacacgacgctaaccgtctaaacgacaactcgctactaaacctaataatctttaatcgcgcgacaaatctacatctacaaaaatctatcgccgaacaaaacgcactacgcgataccaacgaatctaatattaaaacgtctctaaatcgcctaaacc

SEQ ID NO: 17271 - DNA, 703 bp, Artificial Sequence
  chemically treated genomic DNA (Homo sapiens) CpG-island No: 17271
  unsure (3..4, 10, 12, 15, 20, 27..28, 39, 41, 56, 58..)
aanntatcgngncgnaacgngtagttnnggtatgggttnantatcgtagtcggcgntnnatcggtgtaggatatggaaatgtggtagttttattcgatcggtattgtcggtgcgggcgtattggttatcgaaggttgtcgtggtgaaggcggttatttgttgaataaatatggcgaacgttttatggagcgttatgcgtcgaacgttaaagatttggcgggtcgtgacgtggttgcgcgttttattatgatcgaaattcgtgaaggtcgcggttgtgatggttcgtgggggttatacgcgaaattgaaattcgattatttgggtaaagaagttttcgaatttcgtttgtcgggtattttggagttttttcgtattttcgtttacgtcgattcggtgaaagagtcgatttcggttattttaatttgttattatatgatgggcggtatttcgattaaagttatcggttaggtattgattgtgaatgagaaaggcgaagatgtggttgtttcgggattgtttgtcgttggtgaaatcgtttgtgtatcggtatacggcgttaatcgtttgggcggtaattcgttgttggatttggtggtttttggtcgcgcggtaggtttgtatttgtaagagtttatcgtcgagtagggcgtattgcgcgatgttagcgagtttgatgttgaagcgtttttggatcgtttgaatt

SEQ ID NO: 17272 - DNA, 703 bp, Artificial Sequence
  chemically treated genomic DNA (Homo sapiens) CpG-island No: 17272
  unsure (645..646, 648, 663, 665, 676..677, 684, 689, 692, 694, 700..)
aattcaaacgatccaaaaacgcttcaacatcaaactcgctaacatcgcgcaatacgccctactcgacgataaactcttacaaatacaaacctaccgcgcgaccaaaaaccaccaaatccaacaacgaattaccgcccaaacgattaacgccgtataccgatacacaaacgatttcaccaacgacaaacaatcccgaaacaaccacatcttcgcctttctcattcacaatcaatacctaaccgataactttaatcgaaataccgcccatcatataataacaaattaaaataaccgaaatcgactctttcaccgaatcgacgtaaacgaaaatacgaaaaaactccaaaatacccgacaaacgaaattcgaaaacttctttacccaaataatcgaatttcaatttcgcgtataacccccacgaaccatcacaaccgcgaccttcacgaatttcgatcataataaaacgcgcaaccacgtcacgacccgccaaatctttaacgttcgacgcataacgctccataaaacgttcgccatatttattcaacaaataaccgccttcaccacgacaaccttcgataaccaatacgcccgcaccgacaataccgatcgaataaaactaccacatttccatatcctacaccgatnnancgccgactacgatantnaacccataccnnaactacncgttncgncncgatanntt

SEQ ID NO: 17273 - DNA, 517 bp, Artificial Sequence
  chemically treated genomic DNA (Homo sapiens) CpG-island No: 17273
gtttcgtcgttgttagagtttttgttaggtttgcgcgcgttgtgcgacgaatttggcgcgttgttgattatcgatgaagtgatgatcggttttcgcgtagcgttagttggcgtataggattattacggcgtagtgttagatttaatttgtttcggtaaaattatcgtcggtggaatgtcggtaggcgtattcggtggtcgtcgtgatgtaatggatgcgttggtttcgacgggttcggtttattaggcgggtacgtttttcggtaattcgattgcgatggtagcgggtttcgtttgtttgaatgaagtcgcgtagtcgggcgtttacgaaacgttggatgagttgataatacgtttggtagaaggtttgttggaagcggtagaagaagtcggaatttcgttggtcgttaattacgttggcggtatgttcggtattttttttatcgacgtcgagttcgtgacgtgttattaggatgtgatggtttgtgacgtggaacgttttaagcgttttttttata

SEQ ID NO: 17274 - DNA, 517 bp, Artificial Sequence
  chemically treated genomic DNA (Homo sapiens) CpG-island No: 17274
tataaaaaaaacgcttaaaacgttccacgtcacaaaccatcacatcctaataacacgtcacgaactcgacgtcgataaaaaaaataccgaacataccgccaacgtaattaacgaccaacgaaattccgacttcttctaccgcttccaacaaaccttctaccaaacgtattatcaactcatccaacgtttcgtaaacgcccgactacgcgacttcattcaaacaaacgaaacccgctaccatcgcaatcgaattaccgaaaaacgtacccgcctaataaaccgaacccgtcgaaaccaacgcatccattacatcacgacgaccaccgaatacgcctaccgacattccaccgacgataattttaccgaaacaaattaaatctaacactacgccgtaataatcctatacgccaactaacgctacgcgaaaaccgatcatcacttcatcgataatcaacaacgcgccaaattcgtcgcacaacgcgcgcaaacctaacaaaaactctaacaacgacgaaac

SEQ ID NO: 17275 - DNA, 517 bp, Artificial Sequence
  chemically treated genomic DNA (Homo sapiens) CpG-island No: 17275
tatggaagaaacgtttaaagcgttttacgttataggttattatattttgatagtacgttacggattcggcgtcggtaaagaaaatatcgaatatgtcgttaacgtggttaacgattagcggaatttcggttttttttgtcgtttttagtagattttttgttagacgtgttgttagtttatttagcgtttcgtgaacgttcggttgcgcgattttatttagataggcgaaattcgttgttatcgtaatcgggttatcggaaagcgtattcgtttgatagatcggattcgtcggggttagcgtatttattatattacgacgattatcgaatgcgtttatcggtattttatcggcgatgattttgtcgaggtaggttaaatttggtattacgtcgtaataattttgtgcgttagttagcgttacgcggaaatcggttattattttatcgatgattagtaacgcgttaaattcgtcgtatagcgcgcgtagatttggtaggaattttggtagcggcggaat

SEQ ID NO: 17276 - DNA, 517 bp, Artificial Sequence
  chemically treated genomic DNA (Homo sapiens) CpG-island No: 17276
attccgccgctaccaaaattcctaccaaatctacgcgcgctatacgacgaatttaacgcgttactaatcatcgataaaataataaccgatttccgcgtaacgctaactaacgcacaaaattattacgacgtaataccaaatttaacctacctcgacaaaatcatcgccgataaaataccgataaacgcattcgataatcgtcgtaatataataaatacgctaaccccgacgaatccgatctatcaaacgaatacgctttccgataacccgattacgataacaacgaatttcgcctatctaaataaaatcgcgcaaccgaacgttcacgaaacgctaaataaactaacaacacgtctaacaaaaaatctactaaaaacgacaaaaaaaaccgaaattccgctaatcgttaaccacgttaacgacatattcgatattttctttaccgacgccgaatccgtaacgtactatcaaaatataataacctataacgtaaaacgctttaaacgtttcttccata

SEQ ID NO: 17277 - DNA, 566 bp, Artificial Sequence
  chemically treated genomic DNA (Homo sapiens) CpG-island No: 17277
atttagtagcggacgtagtagaaaatcgtcgaggcgtagggtttgtattttcgttatatagtgtgaacgattggttttttttatacgttcgttaaatcgcgtttgttgacgaaattgttggataacgtttatgttattgatgatttcgttaaagtcgtcgttgatattcgttaaataggcgcgtatacgacggataatcggcgtgttgtaacgttggtatattattattattattagtattatcgggaaaattattatcgttattagtgttattcgttagtcgaggttgaatatcgttattagtatcgcgtttattagcgcggtattgcgtaggatagttgttattacggttacgtttagatcgcggattattttagtgttattagtgacgcgggagattattgttcgacgggttgggttttaattcgtttaatgttggcgtatttattttttttcgtcgttttattgtgtttagttatgcgtcgtatcgcgcgttgcgtatgtttcgggatcgtggtttattgcggcgttgtgttttcggggttttgttatggtaacgttgagtt

SEQ ID NO: 17278 - DNA, 566 bp, Artificial Sequence
  chemically treated genomic DNA (Homo sapiens) CpG-island No: 17278
aactcaacgttaccataacaaaaccccgaaaacacaacgccgcaataaaccacgatcccgaaacatacgcaacgcgcgatacgacgcataactaaacacaataaaacgacgaaaaaaaataaatacgccaacattaaacgaattaaaacccaacccgtcgaacaataatctcccgcgtcactaataacactaaaataatccgcgatctaaacgtaaccgtaataacaactatcctacgcaataccgcgctaataaacgcgatactaataacgatattcaacctcgactaacgaataacactaataacgataataattttcccgataatactaataataataataatataccaacgttacaacacgccgattatccgtcgtatacgcgcctatttaacgaatatcaacgacgactttaacgaaatcatcaataacataaacgttatccaacaatttcgtcaacaaacgcgatttaacgaacgtataaaaaaaaccaatcgttcacactatataacgaaaatacaaaccctacgcctcgacgattttctactacgtccgctactaaat

SEQ ID NO: 17279 - DNA, 566 bp, Artificial Sequence
  chemically treated genomic DNA (Homo sapiens) CpG-island No: 17279
ggtttaacgttgttatggtaaaatttcgaaggtatagcgtcgtaatgggttacggtttcgggatatacgtagcgcgcgatacggcgtatagttaggtatagtgggacgacggagggaggtgggtacgttagtattaagcgagttgagatttaattcgtcggatagtgatttttcgcgttattaatgatattgaagtgattcgcgatttggacgtgatcgtagtggtaattgttttgcgtagtgtcgcgttggtgggcgcgatgttggtggcgatgtttagtttcgattggcgaatggtattggtggcgataatgattttttcggtggtgttggtggtaatggtgatatattagcgttatagtacgtcgattgttcgtcgtgtgcgcgtttatttggcggatattaacgacggttttaacgaaattattaatggtatgagcgttatttagtagtttcgttagtaggcgcgatttggcgaacgtatgggggaggttagtcgtttatattatatggcgaggatgtaaattttgcgtttcgacggttttttgttgcgttcgttgttgagt

SEQ ID NO: 17280 - DNA, 566 bp, Artificial Sequence
  chemically treated genomic DNA (Homo sapiens) CpG-island No: 17280
actcaacaacgaacgcaacaaaaaaccgtcgaaacgcaaaatttacatcctcgccatataatataaacgactaacctcccccatacgttcgccaaatcgcgcctactaacgaaactactaaataacgctcataccattaataatttcgttaaaaccgtcgttaatatccgccaaataaacgcgcacacgacgaacaatcgacgtactataacgctaatatatcaccattaccaccaacaccaccgaaaaaatcattatcgccaccaataccattcgccaatcgaaactaaacatcgccaccaacatcgcgcccaccaacgcgacactacgcaaaacaattaccactacgatcacgtccaaatcgcgaatcacttcaatatcattaataacgcgaaaaatcactatccgacgaattaaatctcaactcgcttaatactaacgtacccacctccctccgtcgtcccactatacctaactatacgccgtatcgcgcgctacgtatatcccgaaaccgtaacccattacgacgctataccttcgaaattttaccataacaacgttaaacc

SEQ ID NO: 17281 - DNA, 502 bp, Artificial Sequence
  chemically treated genomic DNA (Homo sapiens) CpG-island No: 17281
agcgtgttaggcgcgttttataggtttttattttacgatgtagcgtttgttgttttacgagatcggttattcgcgttagacgggttttgcgttcggtaattattttacgtagtcgtcgtttaaaattttgatgttgaatacgtttacgttgttagcgggtaattttcggtggtgtattgttttattcgcgtaatgattaggcggaggttttacgcgcgatggtttttagttgtgtcgttagatgtttcgttagttaggttatttgcggtagttgttgttgtttaattgtatgacgaagcgtagttagattatcgttcgtttcgtcgagataagtttgtagtgttgtcgtacgagtttgaaaaagatgtttgtcgaaacgagtatttagcgtggcgaattgtgatatcggggtataacgttgacgtagcgtagcgagttgtttttttagtttttttagtagtagggcggtttttacgataagattttaatgaaaatgataatt

SEQ ID NO: 17282 - DNA, 502 bp, Artificial Sequence
  chemically treated genomic DNA (Homo sapiens) CpG-island No: 17282
aattatcattttcattaaaatcttatcgtaaaaaccgccctactactaaaaaaactaaaaaaacaactcgctacgctacgtcaacgttataccccgatatcacaattcgccacgctaaatactcgtttcgacaaacatctttttcaaactcgtacgacaacactacaaacttatctcgacgaaacgaacgataatctaactacgcttcgtcatacaattaaacaacaacaactaccgcaaataacctaactaacgaaacatctaacgacacaactaaaaaccatcgcgcgtaaaacctccgcctaatcattacgcgaataaaacaatacaccaccgaaaattacccgctaacaacgtaaacgtattcaacatcaaaattttaaacgacgactacgtaaaataattaccgaacgcaaaacccgtctaacgcgaataaccgatctcgtaaaacaacaaacgctacatcgtaaaataaaaacctataaaacgcgcctaacacgct

SEQ ID NO: 17283 - DNA, 502 bp, Artificial Sequence
  chemically treated genomic DNA (Homo sapiens) CpG-island No: 17283
aattattatttttattgaggttttatcgtgaaaatcgttttgttgttggaaaaattggaaggatagttcgttacgttgcgttagcgttgtgtttcggtgttatagttcgttacgttaagtgttcgtttcgataggtattttttttagattcgtgcgataatattataggtttgtttcgacgaggcgggcgataatttggttgcgtttcgttatgtagttgagtagtaatagttgtcgtaagtggtttggttggcggaatatttggcggtataattggaagttatcgcgcgtgaagttttcgtttggttattgcgcgagtgggatagtgtattatcgaaaattgttcgttggtagcgtaaacgtatttagtattaggattttgagcggcggttacgtgagatggttgtcgaacgtagagttcgtttggcgcgggtgatcgatttcgtggaatagtaaacgttgtatcgtgaagtggaagtttatgaagcgcgtttggtacgtt

SEQ ID NO: 17284 - DNA, 502 bp, Artificial Sequence
  chemically treated genomic DNA (Homo sapiens) CpG-island No: 17284
aacgtaccaaacgcgcttcataaacttccacttcacgatacaacgtttactattccacgaaatcgatcacccgcgccaaacgaactctacgttcgacaaccatctcacgtaaccgccgctcaaaatcctaatactaaatacgtttacgctaccaacgaacaattttcgataatacactatcccactcgcgcaataaccaaacgaaaacttcacgcgcgataacttccaattataccgccaaatattccgccaaccaaaccacttacgacaactattactactcaactacataacgaaacgcaaccaaattatcgcccgcctcgtcgaaacaaacctataatattatcgcacgaatctaaaaaaaatacctatcgaaacgaacacttaacgtaacgaactataacaccgaaacacaacgctaacgcaacgtaacgaactatccttccaatttttccaacaacaaaacgattttcacgataaaacctcaataaaaataataatt

SEQ ID NO: 17285 - DNA, 692 bp, Artificial Sequence
  chemically treated genomic DNA (Homo sapiens) CpG-island No: 17285
atgtgatgttgtttatttcggatttcgttggcgcgaaggaattggatttgattatttcgcgtttggaagataaatttatcgcgttgttggcgatgatcggtaaatcgacgttatcgttgggtttggcggtaaaagcggtgttggatattttcgtagaacgcgaagtttgttcgatgtattttgcgtcgatttttagtatcgttaatattttgatgatgggtgacgcgttggcgatggcggttatgtaggcgcgcggatttaatgaagaagattttgttcgtttttatttagtcggggtattgggcgttcgtttgttgaataaagtgtattatttgatgcgtcgtgacgatgttattttataggtggcgttaatcgttagcgtgatggatgcgatgttggaatttagtcgtatcggtttggggttggtggcggtatgtgacgtttaataataggtataaggcgtttttatcgacggcgatttacgtcgttggttggttggcggcggcgtatttattacgttagttaatgaagcgatgacggtcggcggtattacgttgtaatcgtaaagtcgcgttatcgacgttaaagagattttgatgaagcgtaaaattattgtcgtatcggtggtggatgaaaacgggaaatttatcggcgtaataaaattgtaggatttttattaagggcggggatta

SEQ ID NO: 17286 - DNA, 692 bp, Artificial Sequence
  chemically treated genomic DNA (Homo sapiens) CpG-island No: 17286
taatccccgcccttaataaaaatcctacaattttattacgccgataaatttcccgttttcatccaccaccgatacgacaataattttacgcttcatcaaaatctctttaacgtcgataacgcgactttacgattacaacgtaataccgccgaccgtcatcgcttcattaactaacgtaataaatacgccgccgccaaccaaccaacgacgtaaatcgccgtcgataaaaacgccttatacctattattaaacgtcacataccgccaccaaccccaaaccgatacgactaaattccaacatcgcatccatcacgctaacgattaacgccacctataaaataacatcgtcacgacgcatcaaataatacactttattcaacaaacgaacgcccaataccccgactaaataaaaacgaacaaaatcttcttcattaaatccgcgcgcctacataaccgccatcgccaacgcgtcacccatcatcaaaatattaacgatactaaaaatcgacgcaaaatacatcgaacaaacttcgcgttctacgaaaatatccaacaccgcttttaccgccaaacccaacgataacgtcgatttaccgatcatcgccaacaacgcgataaatttatcttccaaacgcgaaataatcaaatccaattccttcgcgccaacgaaatccgaaataaacaacatcacat

SEQ ID NO: 17287 - DNA, 692 bp, Artificial Sequence
  chemically treated genomic DNA (Homo sapiens) CpG-island No: 17287
taattttcgtttttgatagaaattttgtagttttattgcgtcggtgagtttttcgtttttatttattatcggtgcggtagtgattttgcgttttattaggatttttttggcgtcgatggcgcgattttgcgattgtaacgtggtgtcgtcgatcgttatcgttttattgattggcgtggtgagtgcgtcgtcgttaattagttagcgacgtaaatcgtcgtcggtaaagacgttttgtatttgttgttgagcgttatatatcgttattagttttagatcggtgcggttgagttttagtatcgtatttattacgttggcggttaacgttatttgtgggatggtatcgttacggcgtattagatgatgtattttatttagtaagcgagcgtttagtgtttcggttgggtgggagcgggtaaaattttttttattaaattcgcgcgtttgtatgatcgttatcgttagcgcgttatttattattagggtattgacggtgttggaggtcggcgtaaggtgtatcgggtaggtttcgcgttttacggagatatttagtatcgtttttgtcgttaggtttagcggtgacgtcggtttgtcggttatcgttagtagcgcgatagatttattttttagacgcggaataattagatttagttttttcgcgttaacggagttcgagataaatagtattatat

SEQ ID NO: 17288 - DNA, 692 bp, Artificial Sequence
  chemically treated genomic DNA (Homo sapiens) CpG-island No: 17288
atataatactatttatctcgaactccgttaacgcgaaaaaactaaatctaattattccgcgtctaaaaaataaatctatcgcgctactaacgataaccgacaaaccgacgtcaccgctaaacctaacgacaaaaacgatactaaatatctccgtaaaacgcgaaacctacccgatacaccttacgccgacctccaacaccgtcaataccctaataataaataacgcgctaacgataacgatcatacaaacgcgcgaatttaataaaaaaaattttacccgctcccacccaaccgaaacactaaacgctcgcttactaaataaaatacatcatctaatacgccgtaacgataccatcccacaaataacgttaaccgccaacgtaataaatacgatactaaaactcaaccgcaccgatctaaaactaataacgatatataacgctcaacaacaaatacaaaacgtctttaccgacgacgatttacgtcgctaactaattaacgacgacgcactcaccacgccaatcaataaaacgataacgatcgacgacaccacgttacaatcgcaaaatcgcgccatcgacgccaaaaaaatcctaataaaacgcaaaatcactaccgcaccgataataaataaaaacgaaaaactcaccgacgcaataaaactacaaaatttctatcaaaaacgaaaatta

SEQ ID NO: 17289 - DNA, 674 bp, Artificial Sequence
  chemically treated genomic DNA (Homo sapiens) CpG-island No: 17289
tgtttatggcgggttgttggttttattattattgtgggtacgtcggtgtcggttaagtgtatcgtttcgtcgttcgtgtcgtcgttgttgaatatatttgtttgtaacggtacgttaatttttgtcgttacggtttcgatttaggcggtaagttttggcggcgtaattagcgatttgtcgtttaatattagtatcggttcgttattaatttggcgatggttagtcgcgttataattaaagtttttcgtttagtaggcggtattaagtataatggcgacgttcggcgatatcgcgcgggtggtagtttgttcgtcgcgtaattttattttttcgttggaatttgttattagttatattttcgtaggtagttcggcgtcgtgtagttcgcgtagtaacgttattagtagatagtaatcgaggcggttattaaaggttttttttattattcgttggtgagggagaatttgaaaagtggtattaaacgtgacgcgatcgtcgggacgaattttcgtttgtattatttcgttataggagcgcgtattaatgtttacgcgtatggcgttgacgttatttttttgtcggtcgtcgttaagtaggtttggaattttgtattttttacgggtggtgatgcgtatcggttgtagttggcgggtagttatgcgtacgttgttaat

SEQ ID NO: 17290 - DNA, 674 bp, Artificial Sequence
  chemically treated genomic DNA (Homo sapiens) CpG-island No: 17290
attaacaacgtacgcataactacccgccaactacaaccgatacgcatcaccacccgtaaaaaatacaaaattccaaacctacttaacgacgaccgacaaaaaaataacgtcaacgccatacgcgtaaacattaatacgcgctcctataacgaaataatacaaacgaaaattcgtcccgacgatcgcgtcacgtttaataccacttttcaaattctccctcaccaacgaataataaaaaaaacctttaataaccgcctcgattactatctactaataacgttactacgcgaactacacgacgccgaactacctacgaaaatataactaataacaaattccaacgaaaaaataaaattacgcgacgaacaaactaccacccgcgcgatatcgccgaacgtcgccattatacttaataccgcctactaaacgaaaaactttaattataacgcgactaaccatcgccaaattaataacgaaccgatactaatattaaacgacaaatcgctaattacgccgccaaaacttaccgcctaaatcgaaaccgtaacgacaaaaattaacgtaccgttacaaacaaatatattcaacaacgacgacacgaacgacgaaacgatacacttaaccgacaccgacgtacccacaataataataaaaccaacaacccgccataaaca

SEQ ID NO: 17291 - DNA, 674 bp, Artificial Sequence
  chemically treated genomic DNA (Homo sapiens) CpG-island No: 17291
gttggtaacgtacgtatggttgttcgttagttgtagtcggtgcgtattattattcgtgaagagtgtaaaattttaggtttgtttgacggcgatcggtaggggaatgacgttagcgttatgcgcgtggatattggtgcgcgtttttatgacgaagtgatgtaggcgggaattcgtttcggcgatcgcgttacgtttgatattattttttaggtttttttttattagcgagtgatggggaaagtttttgatgatcgtttcggttgttatttgttggtgacgttattgcgcgaattgtacgacgtcgaattatttgcggaagtgtggttggtggtaagttttagcgaagaggtgggattacgcggcgggtaaattgttattcgcgcggtgtcgtcggacgtcgttattgtgtttgatatcgtttgttgggcgaaaaattttgattatggcgcggttaattatcgttagattggtaacgggtcgatgttggtgttaagcgataagtcgttgattgcgtcgttaaaatttatcgtttgggtcgaaatcgtggcggtagaaattggcgtgtcgttgtaggtagatatgtttagtaacggcggtacggacggcggggcggtgtatttaatcggtatcggcgtgtttatagtggtgatggggttagtaattcgttatggata

SEQ ID NO: 17292 - DNA, 674 bp, Artificial Sequence
  chemically treated genomic DNA (Homo sapiens) CpG-island No: 17292
tatccataacgaattactaaccccatcaccactataaacacgccgataccgattaaatacaccgccccgccgtccgtaccgccgttactaaacatatctacctacaacgacacgccaatttctaccgccacgatttcgacccaaacgataaattttaacgacgcaatcaacgacttatcgcttaacaccaacatcgacccgttaccaatctaacgataattaaccgcgccataatcaaaatttttcgcccaacaaacgatatcaaacacaataacgacgtccgacgacaccgcgcgaataacaatttacccgccgcgtaatcccacctcttcgctaaaacttaccaccaaccacacttccgcaaataattcgacgtcgtacaattcgcgcaataacgtcaccaacaaataacaaccgaaacgatcatcaaaaactttccccatcactcgctaataaaaaaaaacctaaaaaataatatcaaacgtaacgcgatcgccgaaacgaattcccgcctacatcacttcgtcataaaaacgcgcaccaatatccacgcgcataacgctaacgtcattcccctaccgatcgccgtcaaacaaacctaaaattttacactcttcacgaataataatacgcaccgactacaactaacgaacaaccatacgtacgttaccaac

SEQ ID NO: 17293 - DNA, 687 bp, Artificial Sequence
  chemically treated genomic DNA (Homo sapiens) CpG-island No: 17293
taggttattgatgttcggggtcgacgaataggaagcgtattagcgtttaagttaatggttgcgcgatgaatttttttacgtgcgatgcgtcgttggcggaagttaaatttgacgaacgtggaattattgtcggttttattgattaatttgaattcgtaaattattcgcgttcgtatcgtgtgtagcggtagtgtaggcggtattttgacgtcgattttttttttagattttaatgcgttgggtaattttttcgtagttaaaggcgttgacgtcgagtaattcgtattggaaaacggtttgacgttggtattgaaaaatattgagtttcgtttgttggatagcgacggtgttattagcgcgattttggaagtttatcgatttttggttggcgatatttttttggcgcgaatatttattggtaggcgttagcgtcggattaagttgcgtcgaagtaattgttgttagcgcgaattatttttgcgaagagttttttcgttttagtagtagttatttgtaagaacgtgttttggacgtacgcgacgtttgtttttagttattttagtaaatttacggtgagtaacgtttttcggtatcgggtaaattgacgtagttcgttatttgtatggttgatgaattgatttttagttagtttttcgaattggataaaaattattttaaaggattgtt

SEQ ID NO: 17294 - DNA, 687 bp, Artificial Sequence
  chemically treated genomic DNA (Homo sapiens) CpG-island No: 17294
aacaatcctttaaaataatttttatccaattcgaaaaactaactaaaaatcaattcatcaaccatacaaataacgaactacgtcaatttacccgataccgaaaaacgttactcaccgtaaatttactaaaataactaaaaacaaacgtcgcgtacgtccaaaacacgttcttacaaataactactactaaaacgaaaaaactcttcgcaaaaataattcgcgctaacaacaattacttcgacgcaacttaatccgacgctaacgcctaccaataaatattcgcgccaaaaaaatatcgccaaccaaaaatcgataaacttccaaaatcgcgctaataacaccgtcgctatccaacaaacgaaactcaatatttttcaataccaacgtcaaaccgttttccaatacgaattactcgacgtcaacgcctttaactacgaaaaaattacccaacgcattaaaatctaaaaaaaaaatcgacgtcaaaataccgcctacactaccgctacacacgatacgaacgcgaataatttacgaattcaaattaatcaataaaaccgacaataattccacgttcgtcaaatttaacttccgccaacgacgcatcgcacgtaaaaaaattcatcgcgcaaccattaacttaaacgctaatacgcttcctattcgtcgaccccgaacatcaataaccta

SEQ ID NO: 17295 - DNA, 687 bp, Artificial Sequence
  chemically treated genomic DNA (Homo sapiens) CpG-island No: 17295
aataattttttgaggtgatttttatttagttcgaggaattggttgggggttagtttattagttatataaatggcgggttgcgttagtttgttcggtgtcgggaagcgttgtttatcgtagatttgttggagtaattggaagtagacgtcgcgtacgtttagggtacgtttttgtaggtagttgttgttggaacgggaaaatttttcgtaaaagtgattcgcgttggtaataattgtttcggcgtagtttaattcggcgttgacgtttgttagtaaatgttcgcgttagggaagtatcgttagttagggatcggtgagtttttagaatcgcgttggtagtatcgtcgttatttagtagacgaaatttaatgttttttagtattagcgttaggtcgttttttagtgcggattgttcggcgttaacgtttttggttgcgggaagattatttagcgtattgagatttaaagaagagatcggcgttagaatgtcgtttgtattatcgttgtatacggtgcgggcgcggataatttgcggatttagattggttagtgaaatcggtagtggttttacgttcgttagatttaattttcgttagcggcgtatcgtacgtgggggaatttatcgcgtagttattggtttaaacgttggtgcgttttttgttcgtcggtttcggatattagtaatttg

SEQ ID NO: 17296 - DNA, 687 bp, Artificial Sequence
  chemically treated genomic DNA (Homo sapiens) CpG-island No: 17296
caaattactaatatccgaaaccgacgaacaaaaaacgcaccaacgtttaaaccaataactacgcgataaattcccccacgtacgatacgccgctaacgaaaattaaatctaacgaacgtaaaaccactaccgatttcactaaccaatctaaatccgcaaattatccgcgcccgcaccgtatacaacgataatacaaacgacattctaacgccgatctcttctttaaatctcaatacgctaaataatcttcccgcaaccaaaaacgttaacgccgaacaatccgcactaaaaaacgacctaacgctaatactaaaaaacattaaatttcgtctactaaataacgacgatactaccaacgcgattctaaaaactcaccgatccctaactaacgatacttccctaacgcgaacatttactaacaaacgtcaacgccgaattaaactacgccgaaacaattattaccaacgcgaatcacttttacgaaaaattttcccgttccaacaacaactacctacaaaaacgtaccctaaacgtacgcgacgtctacttccaattactccaacaaatctacgataaacaacgcttcccgacaccgaacaaactaacgcaacccgccatttatataactaataaactaacccccaaccaattcctcgaactaaataaaaatcacctcaaaaaattatt

SEQ ID NO: 17297 - DNA, 510 bp, Artificial Sequence
  chemically treated genomic DNA (Homo sapiens) CpG-island No: 17297
tattatttagggcgttcgtttgttggaataaacgttggtttgggcgtagtagaaattagagttagttaatacgttgtaatcgattttggaaaaattgtattaggcgtagacgtttagttaataagaaagttattagttgtttttagcggtggtgcgtggcgagttgaagtcggaataattggcggcggcgttggtgagtatgaaaattcgcggtgagtattcgaacgagatcgtcggggtagtaatcgcgttattggaaaacgtagcgtcgttttcgcgttcggattatttgtttgttgatatcgtcggtattggcggtgacggtagtaatagtattaatatttttatcgttagtgcgtttgtcgtcgcggtttgtgggttgaaagtggcgaaatacggtaatcgtagcgtttttagtaaatttggttcgttcgatttgttggcggcgttcggtattaattttgatatgaacgtcgataaatcgcgttaggcgttggatgagttaggtgt

SEQ ID NO: 17298 - DNA, 510 bp, Artificial Sequence
  chemically treated genomic DNA (Homo sapiens) CpG-island No: 17298
acacctaactcatccaacgcctaacgcgatttatcgacgttcatatcaaaattaataccgaacgccgccaacaaatcgaacgaaccaaatttactaaaaacgctacgattaccgtatttcgccactttcaacccacaaaccgcgacgacaaacgcactaacgataaaaatattaatactattactaccgtcaccgccaataccgacgatatcaacaaacaaataatccgaacgcgaaaacgacgctacgttttccaataacgcgattactaccccgacgatctcgttcgaatactcaccgcgaattttcatactcaccaacgccgccgccaattattccgacttcaactcgccacgcaccaccgctaaaaacaactaataactttcttattaactaaacgtctacgcctaatacaatttttccaaaatcgattacaacgtattaactaactctaatttctactacgcccaaaccaacgtttattccaacaaacgaacgccctaaataata

SEQ ID NO: 17299 - DNA, 510 bp, Artificial Sequence
  chemically treated genomic DNA (Homo sapiens) CpG-island No: 17299
atatttaatttatttagcgtttggcgcgatttatcggcgtttatattaagattaatatcgaacgtcgttagtagatcggacgaattagatttattggagacgttacggttgtcgtgtttcgttatttttagtttataggtcgcggcgataaacgtattggcggtagaaatattgatattgttgttgtcgttatcgttagtatcgacgatattagtaaatagataattcgggcgcgggaacggcgttgcgttttttagtagcgcggttgttgtttcggcgatttcgttcgggtgtttatcgcgaatttttatgtttattagcgtcgtcgttagttgtttcggttttagttcgttacgtattatcgttgaaaatagttggtggtttttttgttggttaagcgtttgcgtttgatatagtttttttagaatcggttgtagcgtgttggttggttttagtttttgttgcgtttaggttagcgtttgttttagtaggcgagcgttttgggtggtg

SEQ ID NO: 17300 - DNA, 510 bp, Artificial Sequence
  chemically treated genomic DNA (Homo sapiens) CpG-island No: 17300
caccacccaaaacgctcgcctactaaaacaaacgctaacctaaacgcaacaaaaactaaaaccaaccaacacgctacaaccgattctaaaaaaactatatcaaacgcaaacgcttaaccaacaaaaaaaccaccaactattttcaacgataatacgtaacgaactaaaaccgaaacaactaacgacgacgctaataaacataaaaattcgcgataaacacccgaacgaaatcgccgaaacaacaaccgcgctactaaaaaacgcaacgccgttcccgcgcccgaattatctatttactaatatcgtcgatactaacgataacgacaacaacaatatcaatatttctaccgccaatacgtttatcgccgcgacctataaactaaaaataacgaaacacgacaaccgtaacgtctccaataaatctaattcgtccgatctactaacgacgttcgatattaatcttaatataaacgccgataaatcgcgccaaacgctaaataaattaaatat

SEQ ID NO: 17301 - DNA, 525 bp, Artificial Sequence
  chemically treated genomic DNA (Homo sapiens) CpG-island No: 17301
gtttttcgtacgttttttcgcgtcgcggtgtttgtgggtcggtttttagacgcgttcgtcggtttttgggtttttattggttggacgtgggtttgtttcgcgttcgcgcgttcgttcgttttttatttgtttttaattcggtaggaattttatattagttaggaggagaaggacggtgcgcgcgggtgcgggtttggtcggttggggtcggcgcgggggcggcgaggggcgtcgggcggcgtcggtttgcgagcgggtcgggggcgtcgcgggtcgttttgttttataaggggtcgtgtcgttttcgtcgtcgggcgggtgtcgggcggatcgcggcggtggcggcggcggttgcgattggtttaggcgttttattcggggattgggttcggcgttgttcgttcgttttaaaggtattaatatggcggaggtgagtagggaaatcgggtaggagtagtcgggttggagcgggcgttcggcggtttttcgcgattttcgagttagtttgggggattcggggttttt

SEQ ID NO: 17302 - DNA, 525 bp, Artificial Sequence
  chemically treated genomic DNA (Homo sapiens) CpG-island No: 17302
aaaaaccccgaatcccccaaactaactcgaaaatcgcgaaaaaccgccgaacgcccgctccaacccgactactcctacccgatttccctactcacctccgccatattaatacctttaaaacgaacgaacaacgccgaacccaatccccgaataaaacgcctaaaccaatcgcaaccgccgccgccaccgccgcgatccgcccgacacccgcccgacgacgaaaacgacacgaccccttataaaacaaaacgacccgcgacgcccccgacccgctcgcaaaccgacgccgcccgacgcccctcgccgcccccgcgccgaccccaaccgaccaaacccgcacccgcgcgcaccgtccttctcctcctaactaatataaaattcctaccgaattaaaaacaaataaaaaacgaacgaacgcgcgaacgcgaaacaaacccacgtccaaccaataaaaacccaaaaaccgacgaacgcgtctaaaaaccgacccacaaacaccgcgacgcgaaaaaacgtacgaaaaac

SEQ ID NO: 17303 - DNA, 525 bp, Artificial Sequence
  chemically treated genomic DNA (Homo sapiens) CpG-island No: 17303
aagagtttcggattttttaggttggttcgggggtcgcggggagtcgtcgggcgttcgttttagttcggttgtttttgttcggtttttttgtttattttcgttatattggtatttttagggcgaacgagtagcgtcgagtttagttttcggatggggcgtttgagttaatcgtagtcgtcgtcgttatcgtcgcggttcgttcggtattcgttcggcggcggaggcggtacggttttttatagggtagggcggttcgcgacgttttcggttcgttcgtaagtcgacgtcgttcggcgtttttcgtcgttttcgcgtcggttttagtcggttagattcgtattcgcgcgtatcgtttttttttttttggttggtgtaaagtttttgtcgaattggaggtaagtgggggacggacggacgcgcgggcgcgggatagatttacgtttagttagtggaggtttaagagtcggcgggcgcgtttgggaatcgatttatagatatcgcggcgcgggagggcgtgcgggaggt

SEQ ID NO: 17304 - DNA, 525 bp, Artificial Sequence
  chemically treated genomic DNA (Homo sapiens) CpG-island No: 17304
acctcccgcacgccctcccgcgccgcgatatctataaatcgattcccaaacgcgcccgccgactcttaaacctccactaactaaacgtaaatctatcccgcgcccgcgcgtccgtccgtcccccacttacctccaattcgacaaaaactttacaccaaccaaaaaaaaaaaaacgatacgcgcgaatacgaatctaaccgactaaaaccgacgcgaaaacgacgaaaaacgccgaacgacgtcgacttacgaacgaaccgaaaacgtcgcgaaccgccctaccctataaaaaaccgtaccgcctccgccgccgaacgaataccgaacgaaccgcgacgataacgacgacgactacgattaactcaaacgccccatccgaaaactaaactcgacgctactcgttcgccctaaaaataccaatataacgaaaataaacaaaaaaaccgaacaaaaacaaccgaactaaaacgaacgcccgacgactccccgcgacccccgaaccaacctaaaaaatccgaaactctt

SEQ ID NO: 17305 - DNA, 804 bp, Artificial Sequence
  chemically treated genomic DNA (Homo sapiens) CpG-island No: 17305
agttcgtagtacgtgatgggtagcgtttggtttagggggagtagacgatttagacgacggttagcggggttggcggcggcgcggggaggagggggtcggatttgggagattatcgttcgttttcgtttcgtttcggagtttattagtaggttttttacgttgatggggtttcggtatcgacggcgaatcgtttttttcgtcgggtttaggaggagattgggtaattttttcgtcggtcgttgttgatttatgttgttcggtcgggcgttttgtttttttcgtattttacgagttttttcgttttttcgcgtttagttcgagtatcgttttttacgcgtcgatttttaagggtttagtatttaaggggttcgcggtttttttcgaggcgtcgttcggttaggtcgtttcgttcgttagtaaacgcggtacggttttacgtgttcgggagttttcgacgtagacggaaaaagaggagggagattcgcggattttaagtcgttcggttcgttattttttcgtatgcgtagtatatcgtttttttttgcgtatgttcgtcgttgtcggagcgtttttacgtatcgattttttttcggcggttgtcgttcgggaaattcggatcgcggaatttacggagaggttggtaaaggaaaaggaagaggtggagtcgaattcgatattaagtttatcgatatcgtcgatttcgagggggggttcggtatttagtttttgttttttttagtgagggttaattgcgcgtttggcgtaattatggttatatgattataatttcgagtttggcgtaat

SEQ ID NO: 17306 - DNA, 804 bp, Artificial Sequence
  chemically treated genomic DNA (Homo sapiens) CpG-island No: 17306
attacgccaaactcgaaattataatcatataaccataattacgccaaacgcgcaattaaccctcactaaaaaaaacaaaaactaaataccgaaccccccctcgaaatcgacgatatcgataaacttaatatcgaattcgactccacctcttccttttcctttaccaacctctccgtaaattccgcgatccgaatttcccgaacgacaaccgccgaaaaaaaatcgatacgtaaaaacgctccgacaacgacgaacatacgcaaaaaaaaacgatatactacgcatacgaaaaaataacgaaccgaacgacttaaaatccgcgaatctccctcctctttttccgtctacgtcgaaaactcccgaacacgtaaaaccgtaccgcgtttactaacgaacgaaacgacctaaccgaacgacgcctcgaaaaaaaccgcgaaccccttaaatactaaacccttaaaaatcgacgcgtaaaaaacgatactcgaactaaacgcgaaaaaacgaaaaaactcgtaaaatacgaaaaaaacaaaacgcccgaccgaacaacataaatcaacaacgaccgacgaaaaaattacccaatctcctcctaaacccgacgaaaaaaacgattcgccgtcgataccgaaaccccatcaacgtaaaaaacctactaataaactccgaaacgaaacgaaaacgaacgataatctcccaaatccgaccccctcctccccgcgccgccgccaaccccgctaaccgtcgtctaaatcgtctactccccctaaaccaaacgctacccatcacgtactacgaact

SEQ ID NO: 17307 - DNA, 804 bp, Artificial Sequence
  chemically treated genomic DNA (Homo sapiens) CpG-island No: 17307
attacgttaagttcggaattatggttatatgattatgattacgttaagcgcgtaattaatttttattaaagggaataaaagttgggtatcgggttttttttcgaggtcgacggtatcgataagtttgatatcgaattcggttttatttttttttttttttttgttagttttttcgtggatttcgcggttcgggtttttcgggcggtagtcgtcgggagaggatcggtgcgtgggagcgtttcggtagcggcgggtatgcgtagaggggggcggtgtattgcgtatgcgggaagatggcgggtcgggcgatttgagattcgcgggtttttttttttttttttcgtttgcgtcgggagttttcgggtacgtgaggtcgtgtcgcgtttattggcgggcgggacggtttagtcgggcggcgtttcggaggaagtcgcggattttttaggtgttgggtttttggaaatcggcgcgtggggggcggtgttcgagttgagcgcgagagggcgggagagttcgtggggtgcgaggggagtaggacgttcggtcgggtagtatgagttagtagcggtcggcgaggaagttatttagtttttttttggattcgacggaggagacggttcgtcgtcggtgtcgagattttattaacgtggagggtttgttggtaagtttcgggacgggacggggacgggcggtggttttttaaattcggttttttttttttcgcgtcgtcgttaatttcgttggtcgtcgtttgggtcgtttgttttttttgggttaggcgttgtttattacgtgttgcgaatt

SEQ ID NO: 17308 - DNA, 804 bp, Artificial Sequence
  chemically treated genomic DNA (Homo sapiens) CpG-island No: 17308
aattcgcaacacgtaataaacaacgcctaacccaaaaaaaacaaacgacccaaacgacgaccaacgaaattaacgacgacgcgaaaaaaaaaaaaccgaatttaaaaaaccaccgcccgtccccgtcccgtcccgaaacttaccaacaaaccctccacgttaataaaatctcgacaccgacgacgaaccgtctcctccgtcgaatccaaaaaaaaactaaataacttcctcgccgaccgctactaactcatactacccgaccgaacgtcctactcccctcgcaccccacgaactctcccgccctctcgcgctcaactcgaacaccgccccccacgcgccgatttccaaaaacccaacacctaaaaaatccgcgacttcctccgaaacgccgcccgactaaaccgtcccgcccgccaataaacgcgacacgacctcacgtacccgaaaactcccgacgcaaacgaaaaaaaaaaaaaaaaacccgcgaatctcaaatcgcccgacccgccatcttcccgcatacgcaatacaccgcccccctctacgcatacccgccgctaccgaaacgctcccacgcaccgatcctctcccgacgactaccgcccgaaaaacccgaaccgcgaaatccacgaaaaaactaacaaaaaaaaaaaaaaaaataaaaccgaattcgatatcaaacttatcgataccgtcgacctcgaaaaaaaacccgatacccaacttttattccctttaataaaaattaattacgcgcttaacgtaatcataatcatataaccataattccgaacttaacgtaat

SEQ ID NO: 17309 - DNA, 815 bp, Artificial Sequence
  chemically treated genomic DNA (Homo sapiens) CpG-island No: 17309
cgcgcgggttcggattaatacgtcgggggagttcggtttacgttttttttggattttcgtttcgtttttttcgtggggaggggcgcgttaggcggatttggtatttttcggttgttgggtttcgtcgggagttacgcggggaggtttaggtagtcgggacgtaggtagcgttttcgtcgaggttgcgagttcgtggtcgttcgggggaggcgcgtaggttttgtcggacgtagaaggaattcgaaggaggcggggtggagggcggtgcggggtcggggaggggcgaggcgagtggcgagtggacgtcgggttcggtttcgggtaatttcgaggggcgttttttttcggggtttcggaggttttgcgatttcgcggtcgttttagtcgtttattggggataaggttcgagttaggcgttttcgcgaggcggggtttatagcgcgtttagtaggcgttttttgtcgtagggacgcgggggagcggcgtttgaatagtttcggtgggaattagcgttcgaagttggtgattcggggtgcgtagggtttaatcgggcgattttttggattttcgttagtttcgtttcgatttcgttttttttattcgttagcgagttcgtaattttcggtttcggttcgcgtttttagttttaggtttcggtttcgtttcgtttttgtttaggtatcgtttatttcgggttttgggtttttttttttttcgcggtttcgttttttgttcgtttttgattgtatttcgtttttaggcgttagtttcgtttatttgggtttttggtttcgtttaggtttttgtttttcggg

SEQ ID NO: 17310 - DNA, 815 bp, Artificial Sequence
  chemically treated genomic DNA (Homo sapiens) CpG-island No: 17310
cccgaaaaacaaaaacctaaacgaaaccaaaaacccaaataaacgaaactaacgcctaaaaacgaaatacaatcaaaaacgaacaaaaaacgaaaccgcgaaaaaaaaaaaaacccaaaacccgaaataaacgatacctaaacaaaaacgaaacgaaaccgaaacctaaaactaaaaacgcgaaccgaaaccgaaaattacgaactcgctaacgaataaaaaaaacgaaatcgaaacgaaactaacgaaaatccaaaaaatcgcccgattaaaccctacgcaccccgaatcaccaacttcgaacgctaattcccaccgaaactattcaaacgccgctcccccgcgtccctacgacaaaaaacgcctactaaacgcgctataaaccccgcctcgcgaaaacgcctaactcgaaccttatccccaataaacgactaaaacgaccgcgaaatcgcaaaacctccgaaaccccgaaaaaaaacgcccctcgaaattacccgaaaccgaacccgacgtccactcgccactcgcctcgcccctccccgaccccgcaccgccctccaccccgcctccttcgaattccttctacgtccgacaaaacctacgcgcctcccccgaacgaccacgaactcgcaacctcgacgaaaacgctacctacgtcccgactacctaaacctccccgcgtaactcccgacgaaacccaacaaccgaaaaataccaaatccgcctaacgcgcccctccccacgaaaaaaacgaaacgaaaatccaaaaaaaacgtaaaccgaactcccccgacgtattaatccgaacccgcgcg

SEQ ID NO: 17311 - DNA, 815 bp, Artificial Sequence
  chemically treated genomic DNA (Homo sapiens) CpG-island No: 17311
ttcgagggataagaatttgggcgggattagaagtttagataggcggggttggcgtttgggggcggggtatagttagaggcgggtagggggcggagtcgcgagggagaggagggtttagagttcggagtgggcggtgtttgagtaggggcggggcggggtcggggtttggagttggggacgcgggtcggggtcgggagttgcggattcgttggcgggtgggaggagcggagtcggggcgaggttggcggagatttaggggatcgttcggttgggttttgcgtatttcggattattagtttcgggcgttggtttttatcgaggttgtttaggcgtcgttttttcgcgtttttgcgataggaggcgtttgttgggcgcgttatggatttcgtttcgcggagacgtttggttcgggttttgtttttagtgagcggttggagcggtcgcggggtcgtagagttttcgggatttcgaggaagggcgtttttcggagttgttcgaggtcgggttcggcgtttattcgttattcgtttcgttttttttcggtttcgtatcgttttttatttcgtttttttcgggttttttttgcgttcggtagagtttgcgcgtttttttcggacggttacggattcgtagtttcggcgaggacgttgtttgcgtttcgattgtttggattttttcgcgtggttttcggcgaagtttagtagtcggagggtgttaggttcgtttgacgcgtttttttttacgggaagaacggggcgggggtttaggagggacgtaagtcgggttttttcggcgtgttgattcgaattcgcgcg

SEQ ID NO: 17312 - DNA, 815 bp, Artificial Sequence
  chemically treated genomic DNA (Homo sapiens) CpG-island No: 17312
cgcgcgaattcgaatcaacacgccgaaaaaacccgacttacgtccctcctaaacccccgccccgttcttcccgtaaaaaaaaacgcgtcaaacgaacctaacaccctccgactactaaacttcgccgaaaaccacgcgaaaaaatccaaacaatcgaaacgcaaacaacgtcctcgccgaaactacgaatccgtaaccgtccgaaaaaaacgcgcaaactctaccgaacgcaaaaaaaacccgaaaaaaacgaaataaaaaacgatacgaaaccgaaaaaaaacgaaacgaataacgaataaacgccgaacccgacctcgaacaactccgaaaaacgcccttcctcgaaatcccgaaaactctacgaccccgcgaccgctccaaccgctcactaaaaacaaaacccgaaccaaacgtctccgcgaaacgaaatccataacgcgcccaacaaacgcctcctatcgcaaaaacgcgaaaaaacgacgcctaaacaacctcgataaaaaccaacgcccgaaactaataatccgaaatacgcaaaacccaaccgaacgatcccctaaatctccgccaacctcgccccgactccgctcctcccacccgccaacgaatccgcaactcccgaccccgacccgcgtccccaactccaaaccccgaccccgccccgcccctactcaaacaccgcccactccgaactctaaaccctcctctccctcgcgactccgccccctacccgcctctaactataccccgcccccaaacgccaaccccgcctatctaaacttctaatcccgcccaaattcttatccctcgaa

SEQ ID NO: 17313 - DNA, 619 bp, Artificial Sequence
  chemically treated genomic DNA (Homo sapiens) CpG-island No: 17313
aggagcgcggtaagaagagcggttcgggggttcggattgcgtttttaggatttcggttattttggttttaggtacggcgttcggtagaaagcgcgcgggagggtacgagggggaggaaggtcggagatttgaggagatttaaggtgggagggacgtcggtttgacggggtttaagggggtaggggcggggaagggatcgaggtcgttcgaggcggacgggggtgcgggagggtttgagggggtttaaggtcgggcgaggggaagggtgggaatttcgaacgggggagagggcgcggttttggttttggggaggaggtcgtcgcgcgttcgtgaggggaggggattagcgtaaacgtaggaggtagtgcgtgttcgcggggaagagtttacgattcgtgtggaggacgtatcggtttcggtgttcgtgatgggagagggttttggtcggcgacgatacgcgttttttatttatcgttagagtcgtagttttacgcgcgaaggaacggtatttcgtagtatttttagataaagggttgtttcgtttcgtttgcgtagtcgttaatttttgggggtttttgttttttagttttcgtttttatagtcgagttcgttaattttg

SEQ ID NO: 17314 - DNA, 619 bp, Artificial Sequence
  chemically treated genomic DNA (Homo sapiens) CpG-island No: 17314
caaaattaacgaactcgactataaaaacgaaaactaaaaaacaaaaacccccaaaaattaacgactacgcaaacgaaacgaaacaaccctttatctaaaaatactacgaaataccgttccttcgcgcgtaaaactacgactctaacgataaataaaaaacgcgtatcgtcgccgaccaaaaccctctcccatcacgaacaccgaaaccgatacgtcctccacacgaatcgtaaactcttccccgcgaacacgcactacctcctacgtttacgctaatcccctcccctcacgaacgcgcgacgacctcctccccaaaaccaaaaccgcgccctctcccccgttcgaaattcccacccttcccctcgcccgaccttaaaccccctcaaaccctcccgcacccccgtccgcctcgaacgacctcgatcccttccccgcccctacccccttaaaccccgtcaaaccgacgtccctcccaccttaaatctcctcaaatctccgaccttcctccccctcgtaccctcccgcgcgctttctaccgaacgccgtacctaaaaccaaaataaccgaaatcctaaaaacgcaatccgaacccccgaaccgctcttcttaccgcgctcct

SEQ ID NO: 17315 - DNA, 619 bp, Artificial Sequence
  chemically treated genomic DNA (Homo sapiens) CpG-island No: 17315
taggattggcgaattcggttgtgggggcgggaattgaggggtaggagtttttagggattggcggttgcgtagacggggcggggtagttttttgtttgaaggtgttgcgggatgtcgttttttcgcgcgtgaggttgcggttttgacggtgagtggggggcgcgtgtcgtcgtcggttaggatttttttttattacggatatcggagtcggtgcgttttttatacgaatcgtggattttttttcgcgagtacgtattgttttttgcgtttacgttggttttttttttttacggacgcgcggcggttttttttttagggttaaggtcgcgttttttttttcgttcggggtttttattttttttttcgttcggttttggatttttttaggttttttcgtattttcgttcgtttcggacggtttcggtttttttttcgtttttatttttttgggtttcgttagatcggcgttttttttattttggatttttttagattttcggtttttttttttttcgtgttttttcgcgcgttttttatcgggcgtcgtgtttagggttaggatggtcggagttttaggggcgtagttcggattttcgggtcgttttttttgtcgcgttttt

SEQ ID NO: 17316 - DNA, 619 bp, Artificial Sequence
  chemically treated genomic DNA (Homo sapiens) CpG-island No: 17316
aaaaacgcgacaaaaaaaacgacccgaaaatccgaactacgcccctaaaactccgaccatcctaaccctaaacacgacgcccgataaaaaacgcgcgaaaaaacacgaaaaaaaaaaaaaccgaaaatctaaaaaaatccaaaataaaaaaaacgccgatctaacgaaacccaaaaaaataaaaacgaaaaaaaaaccgaaaccgtccgaaacgaacgaaaatacgaaaaaacctaaaaaaatccaaaaccgaacgaaaaaaaaaataaaaaccccgaacgaaaaaaaaaacgcgaccttaaccctaaaaaaaaaaccgccgcgcgtccgtaaaaaaaaaaaaccaacgtaaacgcaaaaaacaatacgtactcgcgaaaaaaaatccacgattcgtataaaaaacgcaccgactccgatatccgtaataaaaaaaaatcctaaccgacgacgacacgcgccccccactcaccgtcaaaaccgcaacctcacgcgcgaaaaaacgacatcccgcaacaccttcaaacaaaaaactaccccgccccgtctacgcaaccgccaatccctaaaaactcctacccctcaattcccgcccccacaaccgaattcgccaatccta

SEQ ID NO: 17317 - DNA, 1092 bp, Artificial Sequence
  chemically treated genomic DNA (Homo sapiens) CpG-island No: 17317
gggtacgcggcgattcggttgaattagggcgttttgtagttttcgaggcgaggaggcgtttggttttttcgtttcgtttttagaagggagaggagaggtggttttcgagtgggagttagtttaggatgcgggttgtgttacgcgcggaggttcggggattttatcgtcgttttttcgaggttcgtttcgttttttacgattcgtttttgtaatttttcgcgtgggttttcggtcgcggcgatttttgtttcgcgttattgcgcgcgttcgttcgttgatagaggtttcgagggcggtagggcggggtttcggcgtcgggggcggggtttttagcgggcgggcggggttttggcgtcgcgaggtggcggtagtagagcggcgtagaagggagggggcggttggtcgcgcggaaggagtgagttatttgatcgttgttttcgtcgttcgtcgggcgttttcgttttagttagtcgggtcgcgtcgcgttttagttttggtgagtggttcggtcgtttcgtcggttttttttcgggagggttggcgcggttagggtcgcgggtttgtgaggggaggtcggcggataggtttagtgaaggcgcgggcgggtcgggggcggttttttttgggttgggcggggcgcggggggtacgtatcggggttcgcggggggcgtcggcggtcgggattttggaagtggtcgcgacgtcggaaggggcgtttcgtcggcggtcgaattttttgtattgtcggagttgttgtttattcgcgcgcgtcgtattttattcggggcgggcgggggttgggggtcgcggggtttttgttttatttttttttttgttttcgggcgttagttcggtttttcgttcgcggttcgttcgggttgtgatatattagtatcgttttcgcggttggggtttcgtattgtttttcgtcgttttttatcgtatgtttagtttcgcgtttatttagttcggtggttgtcgcgcgtggaatcgcgtaagaaaagtcgagtttgtggttggggagagaaggttatcgtgttgagttggatttagcgaagattggttttggggatcggagagtttaggatttt

SEQ ID NO: 17318 - DNA, 1092 bp, Artificial Sequence
  chemically treated genomic DNA (Homo sapiens) CpG-island No: 17318
aaaatcctaaactctccgatccccaaaaccaatcttcgctaaatccaactcaacacgataaccttctctccccaaccacaaactcgacttttcttacgcgattccacgcgcgacaaccaccgaactaaataaacgcgaaactaaacatacgataaaaaacgacgaaaaacaatacgaaaccccaaccgcgaaaacgatactaatatatcacaacccgaacgaaccgcgaacgaaaaaccgaactaacgcccgaaaacaaaaaaaaaaataaaacaaaaaccccgcgacccccaacccccgcccgccccgaataaaatacgacgcgcgcgaataaacaacaactccgacaatacaaaaaattcgaccgccgacgaaacgccccttccgacgtcgcgaccacttccaaaatcccgaccgccgacgccccccgcgaaccccgatacgtaccccccgcgccccgcccaacccaaaaaaaaccgcccccgacccgcccgcgccttcactaaacctatccgccgacctcccctcacaaacccgcgaccctaaccgcgccaaccctcccgaaaaaaaaccgacgaaacgaccgaaccactcaccaaaactaaaacgcgacgcgacccgactaactaaaacgaaaacgcccgacgaacgacgaaaacaacgatcaaataactcactccttccgcgcgaccaaccgccccctcccttctacgccgctctactaccgccacctcgcgacgccaaaaccccgcccgcccgctaaaaaccccgcccccgacgccgaaaccccgccctaccgccctcgaaacctctatcaacgaacgaacgcgcgcaataacgcgaaacaaaaatcgccgcgaccgaaaacccacgcgaaaaattacaaaaacgaatcgtaaaaaacgaaacgaacctcgaaaaaacgacgataaaatccccgaacctccgcgcgtaacacaacccgcatcctaaactaactcccactcgaaaaccacctctcctctcccttctaaaaacgaaacgaaaaaaccaaacgcctcctcgcctcgaaaactacaaaacgccctaattcaaccgaatcgccgcgtaccc

SEQ ID NO: 17319 - DNA, 1092 bp, Artificial Sequence
  chemically treated genomic DNA (Homo sapiens) CpG-island No: 17319
ggagttttgggtttttcggtttttaaaattagttttcgttaaatttagtttagtacggtggttttttttttttagttataaattcggttttttttacgcgattttacgcgcgatagttatcgggttgagtagacgcgaggttgggtatgcggtgggaggcggcggaggataatacggggttttagtcgcgagggcggtgttgatgtgttatagttcgggcgggtcgcgggcgaggggtcgggttggcgttcgagggtagggaggggggtggggtagggatttcgcggtttttagttttcgttcgtttcgggtaaagtacggcgcgcgcgggtaaataatagtttcggtagtgtagggggttcggtcgtcgacgggacgtttttttcggcgtcgcggttatttttaggatttcggtcgtcggcgtttttcgcgggtttcgatacgtgtttttcgcgtttcgtttagtttagaaagagtcgttttcggttcgttcgcgtttttattggatttgttcgtcggtttttttttataggttcgcggttttgatcgcgttaattttttcggagaagggtcggcgggacggtcgagttatttattagagttgaggcgcggcgcggttcgattgattgaagcgagagcgttcggcgggcggcgagggtagcggttaggtgatttatttttttcgcgcggttagtcgtttttttttttttgcgtcgttttgttgtcgttatttcgcggcgttaaaatttcgttcgttcgttgaaggtttcgttttcggcgtcgaagtttcgttttgtcgttttcgaagtttttgttagcgaacgagcgcgcgtaatagcgcggggtaggggtcgtcgcggtcggaagtttacgcggggggttgtagggacgggtcgtaaggggcggggcgggtttcgaggaggcggcggtggggttttcggattttcgcgcgtggtatagttcgtattttgaattgatttttattcgaggattatttttttttttttttttgagggcggaacggaaaggttaagcgttttttcgtttcgggagttgtaggacgttttaatttagtcgagtcgtcgcgtgttt

SEQ ID NO: 17320 - DNA, 1092 bp, Artificial Sequence
  chemically treated genomic DNA (Homo sapiens) CpG-island No: 17320
aaacacgcgacgactcgactaaattaaaacgtcctacaactcccgaaacgaaaaaacgcttaacctttccgttccgccctcaaaaaaaaaaaaaaaaataatcctcgaataaaaatcaattcaaaatacgaactataccacgcgcgaaaatccgaaaaccccaccgccgcctcctcgaaacccgccccgccccttacgacccgtccctacaaccccccgcgtaaacttccgaccgcgacgacccctaccccgcgctattacgcgcgctcgttcgctaacaaaaacttcgaaaacgacaaaacgaaacttcgacgccgaaaacgaaaccttcaacgaacgaacgaaattttaacgccgcgaaataacgacaacaaaacgacgcaaaaaaaaaaaaacgactaaccgcgcgaaaaaaataaatcacctaaccgctaccctcgccgcccgccgaacgctctcgcttcaatcaatcgaaccgcgccgcgcctcaactctaataaataactcgaccgtcccgccgacccttctccgaaaaaattaacgcgatcaaaaccgcgaacctataaaaaaaaaccgacgaacaaatccaataaaaacgcgaacgaaccgaaaacgactctttctaaactaaacgaaacgcgaaaaacacgtatcgaaacccgcgaaaaacgccgacgaccgaaatcctaaaaataaccgcgacgccgaaaaaaacgtcccgtcgacgaccgaaccccctacactaccgaaactattatttacccgcgcgcgccgtactttacccgaaacgaacgaaaactaaaaaccgcgaaatccctaccccacccccctccctaccctcgaacgccaacccgacccctcgcccgcgacccgcccgaactataacacatcaacaccgccctcgcgactaaaaccccgtattatcctccgccgcctcccaccgcatacccaacctcgcgtctactcaacccgataactatcgcgcgtaaaatcgcgtaaaaaaaaccgaatttataactaaaaaaaaaaaaccaccgtactaaactaaatttaacgaaaactaattttaaaaaccgaaaaacccaaaactcc

SEQ ID NO: 17321 - DNA, 509 bp, Artificial Sequence
  chemically treated genomic DNA (Homo sapiens) CpG-island No: 17321
tattatattagttttgaaaattcggttttcgagttcgatgttattgttgcgtaaacggagtagttttttggtcgataatggtcgtcgttcgcgtattttgatcgttaagatgggttaggatggatacgatcgcggcgcgatagtgatcgttagcgtttatttcgatttcggatttcgacgtagatttaagttcgatgttttttatatttgaagagatcgttcgatttggatcgtacgaaaacgacgtttacgtagtgggcgtatttttattggttgtcggttataaaacgttgatttcggaattggtacgaagcgttgaataatatatggggacgcgaagatatttgcgtggtcgacgggtggtagttatttcgtcgataggattacgtttttttgtaagagcgcggtagtggcggcgatttatggtttaggtatatttatgttcgatagtgtgcgcgacgtattgaatttgataagttagtattatgattaatgaagttacgttggta

SEQ ID NO: 17322 - DNA, 509 bp, Artificial Sequence
  chemically treated genomic DNA (Homo sapiens) CpG-island No: 17322
taccaacgtaacttcattaatcataatactaacttatcaaattcaatacgtcgcgcacactatcgaacataaatatacctaaaccataaatcgccgccactaccgcgctcttacaaaaaaacgtaatcctatcgacgaaataactaccacccgtcgaccacgcaaatatcttcgcgtccccatatattattcaacgcttcgtaccaattccgaaatcaacgttttataaccgacaaccaataaaaatacgcccactacgtaaacgtcgttttcgtacgatccaaatcgaacgatctcttcaaatataaaaaacatcgaacttaaatctacgtcgaaatccgaaatcgaaataaacgctaacgatcactatcgcgccgcgatcgtatccatcctaacccatcttaacgatcaaaatacgcgaacgacgaccattatcgaccaaaaaactactccgtttacgcaacaataacatcgaactcgaaaaccgaattttcaaaactaatataata

SEQ ID NO: 17323 - DNA, 509 bp, Artificial Sequence
  chemically treated genomic DNA (Homo sapiens) CpG-island No: 17323
tgttagcgtggttttattaattatgatgttggtttattagatttagtacgtcgcgtatattgtcgagtataggtgtatttggattataaatcgtcgttattgtcgcgtttttgtaggaaggcgtaattttgtcggcggaatgattgttattcgtcgattacgtagatattttcgcgtttttatgtgttgtttagcgtttcgtattagtttcgggattagcgttttatgatcggtagttagtgaggatgcgtttattacgtgaacgtcgttttcgtacggtttaggtcgggcgatttttttaggtgtagagaatatcgggtttaaatttacgtcgaaattcgagatcggaataggcgttggcgattattatcgcgtcgcgatcgtgtttattttggtttattttagcgattagaatgcgcgggcgacgattattgtcggttaaggaattgtttcgtttgcgtaataatggtatcgaattcggaggtcgagtttttagaattagtatgata

SEQ ID NO: 17324 - DNA, 509 bp, Artificial Sequence
  chemically treated genomic DNA (Homo sapiens) CpG-island No: 17324
tatcatactaattctaaaaactcgacctccgaattcgataccattattacgcaaacgaaacaattccttaaccgacaataatcgtcgcccgcgcattctaatcgctaaaataaaccaaaataaacacgatcgcgacgcgataataatcgccaacgcctattccgatctcgaatttcgacgtaaatttaaacccgatattctctacacctaaaaaaatcgcccgacctaaaccgtacgaaaacgacgttcacgtaataaacgcatcctcactaactaccgatcataaaacgctaatcccgaaactaatacgaaacgctaaacaacacataaaaacgcgaaaatatctacgtaatcgacgaataacaatcattccgccgacaaaattacgccttcctacaaaaacgcgacaataacgacgatttataatccaaatacacctatactcgacaatatacgcgacgtactaaatctaataaaccaacatcataattaataaaaccacgctaaca

SEQ ID NO: 17325 - DNA, 545 bp, Artificial Sequence
  chemically treated genomic DNA (Homo sapiens) CpG-island No: 17325
cgggtgagcgtagtatattcgtttaggttatgacgttggtggaaaggcgttatcgcgttattaggtattaagtacgtagttgtttgatgttattatgtcgtattgcggtaatattttgcgattgggcgttatcggtattttcggcgcggggaaaagtattttttttgaggtttttggtatgttgttgattcgagagggattaaaggtcgcggttattgcggtcgattttagtagttcggttattggcggtagtattttcggggataaaattcgtatgaatgatttggcgcgtgtcgaagcggcgtttattcgttcggtattatttttcggttatttgggcggtgttagttagcgagcgcgggaattaatgttgttatgcgaagtagcgggttatgacgtagtgattgtcgaaacggttggcgtcgggtagtcggaaatagaagtcgttcgtatggtggattgttttatttcgttgtaaattgtcggtggcggcgatgatttgtagggtattaaaaaagggttgatggaagtggttgatttgatcg

SEQ ID NO: 17326 - DNA, 545 bp, Artificial Sequence
  chemically treated genomic DNA (Homo sapiens) CpG-island No: 17326
cgatcaaatcaaccacttccatcaacccttttttaataccctacaaatcatcgccgccaccgacaatttacaacgaaataaaacaatccaccatacgaacgacttctatttccgactacccgacgccaaccgtttcgacaatcactacgtcataacccgctacttcgcataacaacattaattcccgcgctcgctaactaacaccgcccaaataaccgaaaaataataccgaacgaataaacgccgcttcgacacgcgccaaatcattcatacgaattttatccccgaaaatactaccgccaataaccgaactactaaaatcgaccgcaataaccgcgacctttaatccctctcgaatcaacaacataccaaaaacctcaaaaaaaatacttttccccgcgccgaaaataccgataacgcccaatcgcaaaatattaccgcaatacgacataataacatcaaacaactacgtacttaatacctaataacgcgataacgcctttccaccaacgtcataacctaaacgaatatactacgctcacccg

SEQ ID NO: 17327 - DNA, 545 bp, Artificial Sequence
  chemically treated genomic DNA (Homo sapiens) CpG-island No: 17327
cgattagattagttatttttattagtttttttttaatgttttgtagattatcgtcgttatcggtaatttgtaacgagataaaatagtttattatgcgggcgatttttgttttcgattgttcgacgttaatcgtttcgataattattacgttataattcgttgtttcgtataatagtattaattttcgcgttcgttgattggtatcgtttagatgatcggaggatggtatcgggcgaataaacgtcgtttcggtacgcgttaggttatttatgcgggttttattttcgagaatgttatcgttagtgatcgggttgttgggatcgatcgtaataatcgcgatttttaatttttttcgaattaataatatgttaaaggttttaagaaaggtattttttttcgcgtcgggggtgtcggtaacgtttagtcgtagggtgttatcgtagtacggtataatggtattaagtagttgcgtatttagtgtttgatgacgcggtgacgtttttttattagcgttatggtttgggcgagtgtgttacgtttattcg

SEQ ID NO: 17328 - DNA, 545 bp, Artificial Sequence
  chemically treated genomic DNA (Homo sapiens) CpG-island No: 17328
cgaataaacgtaacacactcgcccaaaccataacgctaataaaaaaacgtcaccgcgtcatcaaacactaaatacgcaactacttaataccattataccgtactacgataacaccctacgactaaacgttaccgacacccccgacgcgaaaaaaaatacctttcttaaaacctttaacatattattaattcgaaaaaaattaaaaatcgcgattattacgatcgatcccaacaacccgatcactaacgataacattctcgaaaataaaacccgcataaataacctaacgcgtaccgaaacgacgtttattcgcccgataccatcctccgatcatctaaacgataccaatcaacgaacgcgaaaattaatactattatacgaaacaacgaattataacgtaataattatcgaaacgattaacgtcgaacaatcgaaaacaaaaatcgcccgcataataaactattttatctcgttacaaattaccgataacgacgataatctacaaaacattaaaaaaaaactaataaaaataactaatctaatcg

SEQ ID NO: 17329 - DNA, 927 bp, Artificial Sequence
  chemically treated genomic DNA (Homo sapiens) CpG-island No: 17329
gtcgtttcggtttttcgcgagaattcggagattcgaattaggtagtagaggtaggattttttcggaaacgcgtttttttcgtcgtttcgacgttttcgcggttttgttagttaagcgagagtcgacgcgggtcgcgttttcgggtcgttttcggcggcgtcggcggtcgttatttttggcgttttggtcgcggtcgttatttattttaggtcgtcgcggtttttagttttcggtttcgttaggttcggttcgcgaaggcgtttgtcgtttcgttttggttcggcgtttcggcgagttttttttttcgattagcggcgtttacggcgtagcggcggacgcgaggttacgggcggacgggcgcgcgcgggtggcgggcgggcgtggggtcgggtcgtttttgcgtttcgtcgtcgtttttttcgtcgtcgtttttcgagttcggggttttgttgtaatgtttgcgaggttgattttgagcgtttcgtttatcgttcgttcgtagtcgcgttttttttttcgtcgtcgagttcgtcgcggtttagttttttttttcgtcgttttacgttatttagttttttagttaagttttttaattttttttttttttttttttttattgttattcggttaggaggaagtcgcgcggattcgggcggtttataggagttgcggaattttttttgtttcgtggatttttttttcgtttgtttttcgggtgttttagacggggttgtaagattcggaggtagcgagaggatcgcgttttcgagagaggggttgtacggcgcgttcgggtcgtttttcgggtttttagttttgtttagtcgttcgcgatcgttgtaggcgtttggatagttttttttggggatcggggaaagcgtttttgggatttaggtcgaatgttttcgtttgggtatagtttggggg

SEQ ID NO: 17330 - DNA, 927 bp, Artificial Sequence
  chemically treated genomic DNA (Homo sapiens) CpG-island No: 17330
cccccaaactatacccaaacgaaaacattcgacctaaatcccaaaaacgctttccccgatccccaaaaaaaactatccaaacgcctacaacgatcgcgaacgactaaacaaaactaaaaacccgaaaaacgacccgaacgcgccgtacaacccctctctcgaaaacgcgatcctctcgctacctccgaatcttacaaccccgtctaaaacacccgaaaaacaaacgaaaaaaaaatccacgaaacaaaaaaaattccgcaactcctataaaccgcccgaatccgcgcgacttcctcctaaccgaataacaataaaaaaaaaaaaaaaaaaaaaattaaaaaacttaactaaaaaactaaataacgtaaaacgacgaaaaaaaaaactaaaccgcgacgaactcgacgacgaaaaaaaaaacgcgactacgaacgaacgataaacgaaacgctcaaaatcaacctcgcaaacattacaacaaaaccccgaactcgaaaaacgacgacgaaaaaaacgacgacgaaacgcaaaaacgacccgaccccacgcccgcccgccacccgcgcgcgcccgtccgcccgtaacctcgcgtccgccgctacgccgtaaacgccgctaatcgaaaaaaaaaactcgccgaaacgccgaaccaaaacgaaacgacaaacgccttcgcgaaccgaacctaacgaaaccgaaaactaaaaaccgcgacgacctaaaataaataacgaccgcgaccaaaacgccaaaaataacgaccgccgacgccgccgaaaacgacccgaaaacgcgacccgcgtcgactctcgcttaactaacaaaaccgcgaaaacgtcgaaacgacgaaaaaaacgcgtttccgaaaaaatcctacctctactacctaattcgaatctccgaattctcgcgaaaaaccgaaacgac

SEQ ID NO: 17331 - DNA, 927 bp, Artificial Sequence
  chemically treated genomic DNA (Homo sapiens) CpG-island No: 17331
tttttaggttgtgtttaaacgggagtattcggtttgggttttaagagcgtttttttcggtttttaggaggagttgtttaggcgtttgtagcggtcgcgggcggttggatagagttgggagttcgggggacggttcgggcgcgtcgtgtagtttttttttcggggacgcggttttttcgttgttttcgggttttgtagtttcgtttgggatattcggagagtaggcgagaaggaaatttacgaaatagagggggtttcgtagtttttgtgagtcgttcggattcgcgcggtttttttttgatcgggtgataatgggagggagggggagaaaagggttaagaaatttggttgaagagttgaatggcgtggggcggcgaggggagggattgggtcgcggcggattcggcggcggagggaggagcgcggttgcgggcgggcggtgagcgaggcgtttaaagttagtttcgtagatattgtagtagagtttcgaattcgggaggcggcggcggaggaggcggcggcgaggcgtagggacgattcggttttacgttcgttcgttattcgcgcgcgttcgttcgttcgtggtttcgcgttcgtcgttgcgtcgtgagcgtcgttggtcggagggaagagttcgtcggggcgtcgggttaggacggggcggtaggcgttttcgcggatcgagtttgacggagtcggaggttgggagtcgcggcggtttggggtgagtgacggtcgcggttagggcgttaggagtagcggtcgtcggcgtcgtcggaaacggttcgggagcgcggttcgcgtcggttttcgtttggttggtagggtcgcgggggcgtcggggcggcggggagggcgcgttttcggggaaattttgtttttgttgtttggttcgagttttcgggttttcgcggggggtcggggcggt

SEQ ID NO: 17332 - DNA, 927 bp, Artificial Sequence
  chemically treated genomic DNA (Homo sapiens) CpG-island No: 17332
accgccccgaccccccgcgaaaacccgaaaactcgaaccaaacaacaaaaacaaaatttccccgaaaacgcgccctccccgccgccccgacgcccccgcgaccctaccaaccaaacgaaaaccgacgcgaaccgcgctcccgaaccgtttccgacgacgccgacgaccgctactcctaacgccctaaccgcgaccgtcactcaccccaaaccgccgcgactcccaacctccgactccgtcaaactcgatccgcgaaaacgcctaccgccccgtcctaacccgacgccccgacgaactcttccctccgaccaacgacgctcacgacgcaacgacgaacgcgaaaccacgaacgaacgaacgcgcgcgaataacgaacgaacgtaaaaccgaatcgtccctacgcctcgccgccgcctcctccgccgccgcctcccgaattcgaaactctactacaatatctacgaaactaactttaaacgcctcgctcaccgcccgcccgcaaccgcgctcctccctccgccgccgaatccgccgcgacccaatccctcccctcgccgccccacgccattcaactcttcaaccaaatttcttaacccttttctccccctccctcccattatcacccgatcaaaaaaaaaccgcgcgaatccgaacgactcacaaaaactacgaaaccccctctatttcgtaaatttccttctcgcctactctccgaatatcccaaacgaaactacaaaacccgaaaacaacgaaaaaaccgcgtccccgaaaaaaaaactacacgacgcgcccgaaccgtcccccgaactcccaactctatccaaccgcccgcgaccgctacaaacgcctaaacaactcctcctaaaaaccgaaaaaaacgctcttaaaacccaaaccgaatactcccgtttaaacacaacctaaaaa

SEQ ID NO: 17333 - DNA, 563 bp, Artificial Sequence
  chemically treated genomic DNA (Homo sapiens) CpG-island No: 17333
tttttttcgatttcgtatttgtttgttttcgagggtgaacgttaagtagtagattttatttttttattaatatttgcggcgtattcggggaggaggagcgggaaacggcgagggatttgagttagggttagagcgtggggcgaggggcgtgttttcgaggtgagtgtatttttttgcgtgatgcgttggtttggttgcgttgtggtgattaagggtgcggggtagtgaggggagtttttcgattcggtttcgcggttttttttgacgtttttttcgttcggttatcgttgattcgggttgattgcgcgcgaggtttttcgggcgcgtatttttttttttttttttacgttacggattagaaaatagatttcgggaggagaggggacggggggttgaaattcggttttcgaggttattttttcggggagcggtcgggtagttttcggaggtttttcggttcgggttcgcgttattaatttttatgcgtagtagttgggtttgaggtttcgattacggggttggtttcggtttggagggattgagggtggcgaggttcgaggttt

SEQ ID NO: 17334 - DNA, 563 bp, Artificial Sequence
  chemically treated genomic DNA (Homo sapiens) CpG-island No: 17334
aaacctcgaacctcgccaccctcaatccctccaaaccgaaaccaaccccgtaatcgaaacctcaaacccaactactacgcataaaaattaataacgcgaacccgaaccgaaaaacctccgaaaactacccgaccgctccccgaaaaaataacctcgaaaaccgaatttcaaccccccgtcccctctcctcccgaaatctattttctaatccgtaacgtaaaaaaaaaaaaaaaaatacgcgcccgaaaaacctcgcgcgcaatcaacccgaatcaacgataaccgaacgaaaaaaacgtcaaaaaaaaccgcgaaaccgaatcgaaaaactcccctcactaccccgcacccttaatcaccacaacgcaaccaaaccaacgcatcacgcaaaaaaatacactcacctcgaaaacacgcccctcgccccacgctctaaccctaactcaaatccctcgccgtttcccgctcctcctccccgaatacgccgcaaatattaataaaaaaataaaatctactacttaacgttcaccctcgaaaacaaacaaatacgaaatcgaaaaaaa

SEQ ID NO: 17335 - DNA, 563 bp, Artificial Sequence
  chemically treated genomic DNA (Homo sapiens) CpG-island No: 17335
gggtttcgagtttcgttatttttagtttttttaggtcggggttaatttcgtagtcgaggttttaggtttagttgttgcgtatgggggttgatggcgcgggttcggatcggagagttttcgagggttattcgatcgtttttcgggagggtgatttcgggggtcgggttttagtttttcgtttttttttttttcggggtttgttttttgattcgtaacgtggggggaggagagggggtgcgcgttcgggaggtttcgcgcgtagttagttcgagttaacggtaatcgagcgagggaagcgttaggaagggtcgcgaagtcgggtcggggggttttttttattgtttcgtatttttagttattatagcgtagttagattagcgtattacgtagggaagtgtatttatttcgggaatacgtttttcgttttacgttttggttttggtttaagtttttcgtcgtttttcgtttttttttttcgggtgcgtcgtaggtattagtggagagatgggatttgttgtttagcgtttattttcggaagtagatagatacgaagtcgggggagg

SEQ ID NO: 17336 - DNA, 563 bp, Artificial Sequence
  chemically treated genomic DNA (Homo sapiens) CpG-island No: 17336
cctcccccgacttcgtatctatctacttccgaaaataaacgctaaacaacaaatcccatctctccactaatacctacgacgcacccgaaaaaaaaaaacgaaaaacgacgaaaaacttaaaccaaaaccaaaacgtaaaacgaaaaacgtattcccgaaataaatacacttccctacgtaatacgctaatctaactacgctataataactaaaaatacgaaacaataaaaaaaaccccccgacccgacttcgcgacccttcctaacgcttccctcgctcgattaccgttaactcgaactaactacgcgcgaaacctcccgaacgcgcaccccctctcctccccccacgttacgaatcaaaaaacaaaccccgaaaaaaaaaaaaacgaaaaactaaaacccgacccccgaaatcaccctcccgaaaaacgatcgaataaccctcgaaaactctccgatccgaacccgcgccatcaacccccatacgcaacaactaaacctaaaacctcgactacgaaattaaccccgacctaaaaaaactaaaaataacgaaactcgaaaccc

SEQ ID NO: 17337 - DNA, 630 bp, Artificial Sequence
  chemically treated genomic DNA (Homo sapiens) CpG-island No: 17337
gttgggcgtaaacgggcgttttattcggcgttaattgtgtttgacgtagttaacgttttgttattggtaaggataaaagtgaaatgttgtcgtcgcgttttagtaacgtatagtcggaatggacgatagttagtattcgattaaaattttgattgttcgtcgtaagtgtaggtttttgcggtttcggcgtttttaatttttgtatcggcgcgggcgtttgtaaaagttggcgatatattttattttgttgtttttggtagtttggttgcgtattcggttagggggtagtcggacgattgtttgatgttggcgtaggagtgtagcgcggagttatcggtttacgagttgtcggttttgtaaagtgattgcgtttcgtcgttacgcggtttttcggaatggaacgcggtgtaggttggggtttatcgtttagcggtagcggcgtttttagttgttgttgtagtacgtttagtacgttttgatagataaaattatgtattagacgcgattgatggaaacgtatttcgtgtttggcggggtgtacgttgacgtttatttgatgtgggtcgatttttagatataatataaatgtcggttgttgatcggtttttagttgttattcgtaggtcggat

SEQ ID NO: 17338 - DNA, 630 bp, Artificial Sequence
  chemically treated genomic DNA (Homo sapiens) CpG-island No: 17338
atccgacctacgaataacaactaaaaaccgatcaacaaccgacatttatattatatctaaaaatcgacccacatcaaataaacgtcaacgtacaccccgccaaacacgaaatacgtttccatcaatcgcgtctaatacataattttatctatcaaaacgtactaaacgtactacaacaacaactaaaaacgccgctaccgctaaacgataaaccccaacctacaccgcgttccattccgaaaaaccgcgtaacgacgaaacgcaatcactttacaaaaccgacaactcgtaaaccgataactccgcgctacactcctacgccaacatcaaacaatcgtccgactaccccctaaccgaatacgcaaccaaactaccaaaaacaacaaaataaaatatatcgccaacttttacaaacgcccgcgccgatacaaaaattaaaaacgccgaaaccgcaaaaacctacacttacgacgaacaatcaaaattttaatcgaatactaactatcgtccattccgactatacgttactaaaacgcgacgacaacatttcacttttatccttaccaataacaaaacgttaactacgtcaaacacaattaacgccgaataaaacgcccgtttacgcccaac

SEQ ID NO: 17339 - DNA, 630 bp, Artificial Sequence
  chemically treated genomic DNA (Homo sapiens) CpG-island No: 17339
gttcggtttgcgaatgataattgggggtcgattagtaatcggtatttgtgttgtatttggagatcgatttatattaggtggacgttaacgtgtatttcgttaaatacgaagtgcgtttttattagtcgcgtttggtgtatgattttatttattagggcgtgttgagcgtgttataatagtaattggaaacgtcgttatcgttggacgatgaattttaatttgtatcgcgttttatttcggaaaatcgcgtggcggcggggcgtaattattttgtagaatcggtagttcgtgagtcggtagtttcgcgttatatttttgcgttagtattaggtagtcgttcggttgttttttggtcgaatgcgtagttaggttattagaaatagtaaggtgaagtgtatcgttagtttttgtaaacgttcgcgtcgatgtaaaaattaaaagcgtcggaatcgtaggaatttgtatttgcggcgaatagttagagttttggtcgggtattgattatcgtttatttcgattgtgcgttgttggagcgcgacggtaatattttatttttatttttgttagtggtagaacgttggttgcgttaggtataattgacgtcgggtgaagcgttcgtttgcgtttagt

SEQ ID NO: 17340 - DNA, 630 bp, Artificial Sequence
  chemically treated genomic DNA (Homo sapiens) CpG-island No: 17340
actaaacgcaaacgaacgcttcacccgacgtcaattatacctaacgcaaccaacgttctaccactaacaaaaataaaaataaaatattaccgtcgcgctccaacaacgcacaatcgaaataaacgataatcaatacccgaccaaaactctaactattcgccgcaaatacaaattcctacgattccgacgcttttaatttttacatcgacgcgaacgtttacaaaaactaacgatacacttcaccttactatttctaataacctaactacgcattcgaccaaaaaacaaccgaacgactacctaatactaacgcaaaaatataacgcgaaactaccgactcacgaactaccgattctacaaaataattacgccccgccgccacgcgattttccgaaataaaacgcgatacaaattaaaattcatcgtccaacgataacgacgtttccaattactattataacacgctcaacacgccctaataaataaaatcatacaccaaacgcgactaataaaaacgcacttcgtatttaacgaaatacacgttaacgtccacctaatataaatcgatctccaaatacaacacaaataccgattactaatcgacccccaattatcattcgcaaaccgaac

SEQ ID NO: 17341 - DNA, 1283 bp, Artificial Sequence
  chemically treated genomic DNA (Homo sapiens) CpG-island No: 17341
tagtttcggggtttcgcgttttttttcgttttattgtttagttagttcgggcgcgtttagggtattcgtttcgcgtatttttaagtttacgcgggtttcggtttagattgtcgcgttttattcggttcgcgttatattttatcggtttatttagtaacggtttttggattcgcggttttttttttgttttttattttttagtttacgagagtcgtagcgttgcgtcgtttggagaggggttattcgtttcggaatcgacgtgagcgcggggtcggttcgtggaggcggttgagggattttttatttttagttcgttcgttcggagtcgaatttcgaatttcgttttattgattcgcgtttttagtttatttcgcgttcgcgttcgcgtttcgttattttcgtcgcgtcgtttttttttttcgttttttcgttttttcggttttttttttcgcggcgcggtttttacgcgtagtcgaattcggcgtcgtttttattagagtcgagtcggcggttttatcgaacggtcgcgtttgtcgtcgtcgtagttgtagaatttttcgtatttttttttcgtttcgttttttagttttaggcgttcgggtttttttttttttttttttttttttttttcgtttttttcgcgttttttttttttgtagttagagttcggttcgttagtcgggtcggtaggagggcggcggcggtataattatgagttttgagggcggttacggcggtagtcggtgtcgcggggcggagagcggggacgtcgagtttttttcgtaatttttttcgtcgtcgtcgtcgacgtcgtcgtcgggagagtcggtttcggttttcgcggtttcgcgttatttgtcgtcgttgttcgcgtttttcgagattttcgagcgcgtcgcggggttaagcgagtcgttaggggaggtggtttcgcggtgtaggggagcggacgagttgtcgttttcgtttttgtttttgtagttcgtcggttaggaagtggcggcggtcggcgatttcggggaaggttcgaggcgtttttcggaggcggtagtagcgaaaggcggtttcggggagtttgaggtcggcgcgggcggcgagcgcgagcggcggggcgtcggagattagttcgagacgcgttcggtgtgtagtagtcgtagtagtagtagtggcggcggcgattagcgcgttgggtattagtattagtattattagtttatttgtaagatttgtttttagggcgcggagtaggtaaggttcggcgagatttcgaagtagtcggtggt

SEQ ID NO: 17342 - DNA, 1283 bp, Artificial Sequence
  chemically treated genomic DNA (Homo sapiens) CpG-island No: 17342
accaccgactacttcgaaatctcgccgaaccttacctactccgcgccctaaaaacaaatcttacaaataaactaataatactaatactaatacccaacgcgctaatcgccgccgccactactactactacgactactacacaccgaacgcgtctcgaactaatctccgacgccccgccgctcgcgctcgccgcccgcgccgacctcaaactccccgaaaccgcctttcgctactaccgcctccgaaaaacgcctcgaaccttccccgaaatcgccgaccgccgccacttcctaaccgacgaactacaaaaacaaaaacgaaaacgacaactcgtccgctcccctacaccgcgaaaccacctcccctaacgactcgcttaaccccgcgacgcgctcgaaaatctcgaaaaacgcgaacaacgacgacaaataacgcgaaaccgcgaaaaccgaaaccgactctcccgacgacgacgtcgacgacgacgacgaaaaaaattacgaaaaaaactcgacgtccccgctctccgccccgcgacaccgactaccgccgtaaccgccctcaaaactcataattataccgccgccgccctcctaccgacccgactaacgaaccgaactctaactacaaaaaaaaaaaacgcgaaaaaaacgaaaaaaaaaaaaaaaaaaaaaaaaaaaaacccgaacgcctaaaactaaaaaacgaaacgaaaaaaaaatacgaaaaattctacaactacgacgacgacaaacgcgaccgttcgataaaaccgccgactcgactctaataaaaacgacgccgaattcgactacgcgtaaaaaccgcgccgcgaaaaaaaaaaccgaaaaaacgaaaaaacgaaaaaaaaaaacgacgcgacgaaaataacgaaacgcgaacgcgaacgcgaaataaactaaaaacgcgaatcaataaaacgaaattcgaaattcgactccgaacgaacgaactaaaaataaaaaatccctcaaccgcctccacgaaccgaccccgcgctcacgtcgattccgaaacgaataacccctctccaaacgacgcaacgctacgactctcgtaaactaaaaaataaaaaacaaaaaaaaaaccgcgaatccaaaaaccgttactaaataaaccgataaaatataacgcgaaccgaataaaacgcgacaatctaaaccgaaacccgcgtaaacttaaaaatacgcgaaacgaataccctaaacgcgcccgaactaactaaacaataaaacgaaaaaaaacgcgaaaccccgaaacta

SEQ ID NO: 17343 - DNA, 1283 bp, Artificial Sequence
  chemically treated genomic DNA (Homo sapiens) CpG-island No: 17343
gttatcggttgtttcggggtttcgtcgggttttatttgtttcgcgttttggaagtagattttgtagatgggttggtggtgttggtgttggtgtttagcgcgttggtcgtcgtcgttattgttgttgttgcggttgttgtatatcgagcgcgtttcgggttggttttcggcgtttcgtcgttcgcgttcgtcgttcgcgtcggttttagatttttcggggtcgtttttcgttgttgtcgttttcgggaggcgtttcggatttttttcggagtcgtcggtcgtcgttattttttggtcggcgggttgtaggggtaggggcggaggcggtagttcgttcgtttttttgtatcgcggggttattttttttagcggttcgtttggtttcgcggcgcgttcgggggtttcgggggacgcgggtagcggcggtaggtagcgcggggtcgcggggatcggggtcggttttttcggcggcggcgtcggcggcggcggcgggggaggttgcgggggaggttcggcgttttcgtttttcgtttcgcgatatcgattgtcgtcgtggtcgtttttaaagtttatggttgtgtcgtcgtcgtttttttgtcggttcggttggcgggtcgggttttggttgtagggaaagagagcgcggagggggcgggagggagaggggaaaaggagggagggggttcggacgtttggggttagggggcgggacggggaggggatgcggaaggttttgtagttgcggcggcggtaggcgcggtcgttcggtggagtcgtcggttcggttttgatggaggcggcgtcgaattcggttgcgcgtgagagtcgcgtcgcggaagggggggtcggagaagcgagggggcgggagggaggagcggcgcggcgggggtgacggggcgcgggcgcgggcgcggggtgggttgggggcgcggattagtgggacggagttcggggttcggtttcgagcgggcgggttggaagtgggggattttttagtcgtttttacgggtcggtttcgcgtttacgtcggtttcggggcggatgatttttttttaaacggcgtagcgttgcggttttcgtgagttgggaagtagggggtaggggagaggtcgcgggtttagaaatcgttattggatgggtcggtgggatgtggcgcgggtcgggtggggcgcgatagtttgagtcgagattcgcgtgggtttaagggtgcgcgaggcgggtgttttgggcgcgttcgaattggttgagtagtggagcgggaaagggcgcgggatttcgggattg

SEQ ID NO: 17344 - DNA, 1283 bp, Artificial Sequence
  chemically treated genomic DNA (Homo sapiens) CpG-island No: 17344
caatcccgaaatcccgcgccctttcccgctccactactcaaccaattcgaacgcgcccaaaacacccgcctcgcgcacccttaaacccacgcgaatctcgactcaaactatcgcgccccacccgacccgcgccacatcccaccgacccatccaataacgatttctaaacccgcgacctctcccctaccccctacttcccaactcacgaaaaccgcaacgctacgccgtttaaaaaaaaatcatccgccccgaaaccgacgtaaacgcgaaaccgacccgtaaaaacgactaaaaaatcccccacttccaacccgcccgctcgaaaccgaaccccgaactccgtcccactaatccgcgcccccaacccaccccgcgcccgcgcccgcgccccgtcacccccgccgcgccgctcctccctcccgccccctcgcttctccgacccccccttccgcgacgcgactctcacgcgcaaccgaattcgacgccgcctccatcaaaaccgaaccgacgactccaccgaacgaccgcgcctaccgccgccgcaactacaaaaccttccgcatcccctccccgtcccgccccctaaccccaaacgtccgaaccccctccctccttttcccctctccctcccgccccctccgcgctctctttccctacaaccaaaacccgacccgccaaccgaaccgacaaaaaaacgacgacgacacaaccataaactttaaaaacgaccacgacgacaatcgatatcgcgaaacgaaaaacgaaaacgccgaacctcccccgcaacctcccccgccgccgccgccgacgccgccgccgaaaaaaccgaccccgatccccgcgaccccgcgctacctaccgccgctacccgcgtcccccgaaacccccgaacgcgccgcgaaaccaaacgaaccgctaaaaaaaataaccccgcgatacaaaaaaacgaacgaactaccgcctccgcccctacccctacaacccgccgaccaaaaaataacgacgaccgacgactccgaaaaaaatccgaaacgcctcccgaaaacgacaacaacgaaaaacgaccccgaaaaatctaaaaccgacgcgaacgacgaacgcgaacgacgaaacgccgaaaaccaacccgaaacgcgctcgatatacaacaaccgcaacaacaacaataacgacgacgaccaacgcgctaaacaccaacaccaacaccaccaacccatctacaaaatctacttccaaaacgcgaaacaaataaaacccgacgaaaccccgaaacaaccgataac

SEQ ID NO: 17345 - DNA, 1131 bp, Artificial Sequence
  chemically treated genomic DNA (Homo sapiens) CpG-island No: 17345
aattaaatcgaacgtttttgtagttttttcgttagttttgcgggagtttattcgtttaacgcggtttcgttttttttttaggtttcgtttatcgtcgagtttaggttcggtttttgacgaagttcgtcggaaattatcgaagttttttttttttttttttttttttcgttttttgtttttttttttttttttattcgggttttttcggtcgtgattttttttttttttttttttttttttttattgaaattaagatggaggttcgcggtagtcgtcggcgttcgtgatttcggaggtttcgtcggttacgggttttcgttttcgcgattgcgcgttcgggaggcgcgtgttgttgttcgcgtttcggtcggcgttcgggaggtcgtggtttcgcgttttcgtttttcggttagttcgcggttatcgggcggagttttcgtttatgtgggcgcgttttttgggtcgagtcgtcgtcgtcgtttttcgtcgtttcggggttttgcgttcgcgcgtcgggcgcgggtagttgggtgttcggcgtcgttaggttcggcgcggagcgggcggtacgcggcgttaggggcgcggggttcgaggcgggcgcggtcgcgggcgtcgtcgtagttatgagcggtagtagcggcggagtcgtcgttttcgtcgcgtttttcggtttcgtcgcggcggttagcgcggttggttcgggttgcgggggcggtgtcggcgagggggtagaggaggcggttaaggatttggtcgatatcgcggttttttttcgattcggtgagtgtaattgcggtcggttcgtttagcggcgttgttttaagcgttcggtcgattcgtcgcggagttgtcgagtttcggttatcgcgcgttggtgtcggtcgttcgttcgtcggggttcgtaggtttttcgttgggatattggtttatgcgcgggggtgtcggttaaattcggtgttcgttgtcggtagcggcggcggatttggcgaatgtataattgttttttgagttttttgttagggagatttcggtagcgatcgaacggataggtgggcggattgttcgcgagtagacggtataacggggagtatattaattaaaaaaggatagagtaagaaaagaaacgaa

SEQ ID NO: 17346 - DNA, 1131 bp, Artificial Sequence
  chemically treated genomic DNA (Homo sapiens) CpG-island No: 17346
ttcgtttcttttcttactctatccttttttaattaatatactccccgttataccgtctactcgcgaacaatccgcccacctatccgttcgatcgctaccgaaatctccctaacaaaaaactcaaaaaacaattatacattcgccaaatccgccgccgctaccgacaacgaacaccgaatttaaccgacacccccgcgcataaaccaatatcccaacgaaaaacctacgaaccccgacgaacgaacgaccgacaccaacgcgcgataaccgaaactcgacaactccgcgacgaatcgaccgaacgcttaaaacaacgccgctaaacgaaccgaccgcaattacactcaccgaatcgaaaaaaaaccgcgatatcgaccaaatccttaaccgcctcctctaccccctcgccgacaccgcccccgcaacccgaaccaaccgcgctaaccgccgcgacgaaaccgaaaaacgcgacgaaaacgacgactccgccgctactaccgctcataactacgacgacgcccgcgaccgcgcccgcctcgaaccccgcgcccctaacgccgcgtaccgcccgctccgcgccgaacctaacgacgccgaacacccaactacccgcgcccgacgcgcgaacgcaaaaccccgaaacgacgaaaaacgacgacgacgactcgacccaaaaaacgcgcccacataaacgaaaactccgcccgataaccgcgaactaaccgaaaaacgaaaacgcgaaaccacgacctcccgaacgccgaccgaaacgcgaacaacaacacgcgcctcccgaacgcgcaatcgcgaaaacgaaaacccgtaaccgacgaaacctccgaaatcacgaacgccgacgactaccgcgaacctccatcttaatttcaataaaaaaaaaaaaaaaaaaaaaaaaaaaatcacgaccgaaaaaacccgaataaaaaaaaaaaaaaaaacaaaaaacgaaaaaaaaaaaaaaaaaaaaaaaacttcgataatttccgacgaacttcgtcaaaaaccgaacctaaactcgacgataaacgaaacctaaaaaaaaaacgaaaccgcgttaaacgaataaactcccgcaaaactaacgaaaaaactacaaaaacgttcgatttaatt

SEQ ID NO: 17347 - DNA, 1131 bp, Artificial Sequence
  chemically treated genomic DNA (Homo sapiens) CpG-island No: 17347
ttcgtttttttttttgttttgtttttttttggttggtgtgtttttcgttgtgtcgtttgttcgcgggtagttcgtttatttattcgttcggtcgttgtcgggatttttttaatagggggtttaggaggtagttgtgtattcgttaagttcgtcgtcgttgtcggtagcggatatcggatttggtcggtattttcgcgtatgaattagtgttttagcgagaagtttgcgggtttcgacggacggacggtcggtattagcgcgcggtggtcggagttcggtagtttcgcggcgggtcggtcgagcgtttggggtagcgtcgttgggcgggtcggtcgtagttgtatttatcggatcggaagaaggtcgcgatgtcggttaggtttttggtcgttttttttgttttttcgtcggtatcgttttcgtagttcgagttagtcgcgttggtcgtcgcggcggggtcggaggacgcggcgggggcggcggtttcgtcgttgttgtcgtttatggttgcggcggcgttcgcggtcgcgttcgtttcgggtttcgcgtttttagcgtcgcgtgtcgttcgtttcgcgtcgggtttggcggcgtcgagtatttagttgttcgcgttcggcgcgcggacgtagagtttcggggcggcggggggcggcggcggcggttcggtttaaggagcgcgtttatatagacgaggatttcgttcggtagtcgcgagttggtcgaggggcggaggcgcggagttacggtttttcgggcgtcggtcggagcgcgggtagtagtacgcgtttttcggacgcgtagtcgcgagggcgggggttcgtggtcggcgagattttcgggattacgggcgtcggcggttgtcgcgagtttttattttgattttaatggggaaggaaggaggggggagggggaaattacggtcgagggaattcgggtgaaaggaaaagggagaatagggaacggagaggaaggaaaaaaaagaggggtttcggtaattttcggcgaatttcgttaagggtcgagtttgggttcggcggtgggcggagtttgggggaggggcggggtcgcgttgggcggatgggttttcgtagggttggcggggaggttgtaggaacgttcggtttggtt

SEQ ID NO: 17348 - DNA, 1131 bp, Artificial Sequence
  chemically treated genomic DNA (Homo sapiens) CpG-island No: 17348
aaccaaaccgaacgttcctacaacctccccgccaaccctacgaaaacccatccgcccaacgcgaccccgcccctcccccaaactccgcccaccgccgaacccaaactcgacccttaacgaaattcgccgaaaattaccgaaacccctcttttttttccttcctctccgttccctattctcccttttcctttcacccgaattccctcgaccgtaatttccccctcccccctccttccttccccattaaaatcaaaataaaaactcgcgacaaccgccgacgcccgtaatcccgaaaatctcgccgaccacgaacccccgccctcgcgactacgcgtccgaaaaacgcgtactactacccgcgctccgaccgacgcccgaaaaaccgtaactccgcgcctccgcccctcgaccaactcgcgactaccgaacgaaatcctcgtctatataaacgcgctccttaaaccgaaccgccgccgccgccccccgccgccccgaaactctacgtccgcgcgccgaacgcgaacaactaaatactcgacgccgccaaacccgacgcgaaacgaacgacacgcgacgctaaaaacgcgaaacccgaaacgaacgcgaccgcgaacgccgccgcaaccataaacgacaacaacgacgaaaccgccgcccccgccgcgtcctccgaccccgccgcgacgaccaacgcgactaactcgaactacgaaaacgataccgacgaaaaaacaaaaaaaacgaccaaaaacctaaccgacatcgcgaccttcttccgatccgataaatacaactacgaccgacccgcccaacgacgctaccccaaacgctcgaccgacccgccgcgaaactaccgaactccgaccaccgcgcgctaataccgaccgtccgtccgtcgaaacccgcaaacttctcgctaaaacactaattcatacgcgaaaataccgaccaaatccgatatccgctaccgacaacgacgacgaacttaacgaatacacaactacctcctaaaccccctattaaaaaaatcccgacaacgaccgaacgaataaataaacgaactacccgcgaacaaacgacacaacgaaaaacacaccaaccaaaaaaaaacaaaacaaaaaaaaaaacgaa

SEQ ID NO: 17349 - DNA, 656 bp, Artificial Sequence
  chemically treated genomic DNA (Homo sapiens) CpG-island No: 17349
tcgcggggggaaatagtattggtttttcgtttttattagtcggtttttcgcgattgtgttttttaattaacgggttttcgatgaaaagtgttaaggaggtcgtcggattcgtttaagtggaatttttaagatgtttttcggggagtagttttaggaacgcgtttggattttaggagtagtttttcgtttcgttgtcgagtttcggaggttttcgtagttttggggttcgcgatttcgatagcgcgcggaggtttcgtttttttagggttcgttttttttttgttcggtttttgattggttgttcggcgcgttagtcggtatttattttcgttttacgtttttttcgttttttttagttcgttttagggaagcgagttcgggcgtcggcgggcggtcgtcgcgtttgatagattattgtagaattacgggtcgaaggatttagacgttcgattcgtagacgcggtacggtatgagcggcgataaggagttttacgcgggataagggagcgggagtcggtattggcgttttcgatagtaggtgagtttgggagtcgagagcggaggcgggggacggggggtagcgacgtaagagaattagttaaggacgggtagagggattagtagagtaagttaaggggatagtagttatttttcgg

SEQ ID NO: 17350 - DNA, 656 bp, Artificial Sequence
  chemically treated genomic DNA (Homo sapiens) CpG-island No: 17350
ccgaaaaataactactatccccttaacttactctactaatccctctacccgtccttaactaattctcttacgtcgctaccccccgtcccccgcctccgctctcgactcccaaactcacctactatcgaaaacgccaataccgactcccgctcccttatcccgcgtaaaactccttatcgccgctcataccgtaccgcgtctacgaatcgaacgtctaaatccttcgacccgtaattctacaataatctatcaaacgcgacgaccgcccgccgacgcccgaactcgcttccctaaaacgaactaaaaaaaacgaaaaaaacgtaaaacgaaaataaataccgactaacgcgccgaacaaccaatcaaaaaccgaacaaaaaaaaaacgaaccctaaaaaaacgaaacctccgcgcgctatcgaaatcgcgaaccccaaaactacgaaaacctccgaaactcgacaacgaaacgaaaaactactcctaaaatccaaacgcgttcctaaaactactccccgaaaaacatcttaaaaattccacttaaacgaatccgacgacctccttaacacttttcatcgaaaacccgttaattaaaaaacacaatcgcgaaaaaccgactaataaaaacgaaaaaccaatactatttccccccgcga

SEQ ID NO: 17351 - DNA, 656 bp, Artificial Sequence
  chemically treated genomic DNA (Homo sapiens) CpG-island No: 17351
tcgaggagtggttgttgtttttttggtttgttttgttgatttttttgttcgtttttgattggtttttttgcgtcgttgtttttcgtttttcgttttcgttttcggtttttaggtttatttgttgtcgggagcgttagtatcgattttcgtttttttgtttcgcgtggggttttttgtcgtcgtttatgtcgtgtcgcgtttgcggatcgggcgtttgggtttttcggttcgtggttttgtagtggtttgttagacgcgacggtcgttcgtcggcgttcgggttcgtttttttgaggcgggttggggagggcgggggaggcgtagggcggggatgggtatcgattgacgcgtcgggtagttaattagaggtcgggtaggggaggagcgggttttagaggggcggggttttcgcgcgttgtcggggtcgcgggttttagaattgcggagattttcgaggttcggtagcggggcgggaagttatttttggggtttaggcgcgtttttgaggttgtttttcgggaaatattttgggaattttatttgggcggattcggcgatttttttggtattttttatcgaaggttcgttgattgggaagtataatcgcggagggtcggttgatgagggcgaggaattagtgttgttttttttcgcgg

SEQ ID NO: 17352 - DNA, 656 bp, Artificial Sequence
  chemically treated genomic DNA (Homo sapiens) CpG-island No: 17352
ccgcgaaaaaaaacaacactaattcctcgccctcatcaaccgaccctccgcgattatacttcccaatcaacgaaccttcgataaaaaataccaaaaaaatcgccgaatccgcccaaataaaattcccaaaatatttcccgaaaaacaacctcaaaaacgcgcctaaaccccaaaaataacttcccgccccgctaccgaacctcgaaaatctccgcaattctaaaacccgcgaccccgacaacgcgcgaaaaccccgcccctctaaaacccgctcctcccctacccgacctctaattaactacccgacgcgtcaatcgatacccatccccgccctacgcctcccccgccctccccaacccgcctcaaaaaaacgaacccgaacgccgacgaacgaccgtcgcgtctaacaaaccactacaaaaccacgaaccgaaaaacccaaacgcccgatccgcaaacgcgacacgacataaacgacgacaaaaaaccccacgcgaaacaaaaaaacgaaaatcgatactaacgctcccgacaacaaataaacctaaaaaccgaaaacgaaaacgaaaaacgaaaaacaacgacgcaaaaaaaccaatcaaaaacgaacaaaaaaatcaacaaaacaaaccaaaaaaacaacaaccactcctcga

SEQ ID NO: 17353 - DNA, 871 bp, Artificial Sequence
  chemically treated genomic DNA (Homo sapiens) CpG-island No: 17353
gtaatcgtttgttcgattcggagttgtattcggatagcgtttttagtatgtggtcggataatcgtatcgttcgtgacgcgtattatttttatcggtatgatcgttacggtaggttgatagagaaaatcgattttatttcggaaggggttattcgtacggatgatgagcgtatttatcggtattattacgatagttagtatcggttggtgtattatacgcggatataatatgtagagtcgttggtcgaaagtcgttatttttacgattcgttgggtcgtagggtggtaaaacgggtatggcggcgtgaacgggatttgacgggttggatgtcgttgttacggaaatcgtaagtgatttggtacggttgggacggcgatcgtttgatttacgatatagaacgatagaattcgtatttagacgatttattagtcggggagttttacgttatttattagggtcgaaatcgttatcggtgagttggcgaaaacgtagcgtcgtagtttggcggatgttttttagtagttcggcggcgaagacggtggtagtgtggtgttttcgtcggtgttggtgtagatgttcgatcggttggaaagtgaaattttggttgatcgggtgagtgaggaaagtcgtcgttggttggtatcgtgcggtttgatcgtggagtagatgtaaaattagatggattcggtgtatacgtcggcgcgaaaaatttatttgtattattgcgattatcgcggtttgtcgttggcgtttattagtacggaaggggtaatagcgtggtgcgtagaatatgatgaatggggtaatttgttgaatgaagagaattcgtattagttgtagtagtttattcggttgtcggggtagtagtatg

SEQ ID NO: 17354 - DNA, 871 bp, Artificial Sequence
  chemically treated genomic DNA (Homo sapiens) CpG-island No: 17354
catactactaccccgacaaccgaataaactactacaactaatacgaattctcttcattcaacaaattaccccattcatcatattctacgcaccacgctattaccccttccgtactaataaacgccaacgacaaaccgcgataatcgcaataatacaaataaatttttcgcgccgacgtatacaccgaatccatctaattttacatctactccacgatcaaaccgcacgataccaaccaacgacgactttcctcactcacccgatcaaccaaaatttcactttccaaccgatcgaacatctacaccaacaccgacgaaaacaccacactaccaccgtcttcgccgccgaactactaaaaaacatccgccaaactacgacgctacgttttcgccaactcaccgataacgatttcgaccctaataaataacgtaaaactccccgactaataaatcgtctaaatacgaattctatcgttctatatcgtaaatcaaacgatcgccgtcccaaccgtaccaaatcacttacgatttccgtaacaacgacatccaacccgtcaaatcccgttcacgccgccatacccgttttaccaccctacgacccaacgaatcgtaaaaataacgactttcgaccaacgactctacatattatatccgcgtataatacaccaaccgatactaactatcgtaataataccgataaatacgctcatcatccgtacgaataaccccttccgaaataaaatcgattttctctatcaacctaccgtaacgatcataccgataaaaataatacgcgtcacgaacgatacgattatccgaccacatactaaaaacgctatccgaatacaactccgaatcgaacaaacgattac

SEQ ID NO: 17355 - DNA, 871 bp, Artificial Sequence
  chemically treated genomic DNA (Homo sapiens) CpG-island No: 17355
tatattgttgtttcggtagtcggataagttgttgtagttgatgcgggttttttttatttagtaggttgttttatttattatattttgcgtattacgttgttgtttttttcgtgttgatgagcgttagcggtaggtcgcgatggtcgtagtggtataggtggatttttcgcgtcggcgtgtatatcgggtttatttggttttgtatttgttttacggttaggtcgtacgatgttagttagcggcggttttttttatttattcggttagttaggattttattttttagtcggtcgagtatttgtattagtatcggcgggaatattatattgttatcgttttcgtcgtcggattgttgaagggtattcgttaggttgcggcgttgcgttttcgttagtttatcggtggcggtttcgattttgatgagtggcgtgaagtttttcggttgataaatcgtttggatgcgggttttgtcgttttgtatcgtaggttaggcggtcgtcgttttagtcgtattaggttatttgcggttttcgtgatagcgatatttagttcgttaggtttcgtttacgtcgttatattcgttttgttattttgcggtttagcgggtcgtaaagatagcgattttcgattagcggttttgtatattgtgttcgcgtgtagtgtattagtcggtgttgattgtcgtaatggtatcggtgggtgcgtttattattcgtgcggataatttttttcgggatgaggtcggttttttttgttagtttgtcgtgacggttatatcggtaaagatagtgcgcgttacgggcgatacggttattcggttatatgttgagggcgttgttcgggtgtagtttcgggtcgggtaggcggttat

SEQ ID NO: 17356 - DNA, 871 bp, Artificial Sequence
  chemically treated genomic DNA (Homo sapiens) CpG-island No: 17356
ataaccgcctacccgacccgaaactacacccgaacaacgccctcaacatataaccgaataaccgtatcgcccgtaacgcgcactatctttaccgatataaccgtcacgacaaactaacaaaaaaaaccgacctcatcccgaaaaaaattatccgcacgaataataaacgcacccaccgataccattacgacaatcaacaccgactaatacactacacgcgaacacaatatacaaaaccgctaatcgaaaatcgctatctttacgacccgctaaaccgcaaaataacaaaacgaatataacgacgtaaacgaaacctaacgaactaaatatcgctatcacgaaaaccgcaaataacctaatacgactaaaacgacgaccgcctaacctacgatacaaaacgacaaaacccgcatccaaacgatttatcaaccgaaaaacttcacgccactcatcaaaatcgaaaccgccaccgataaactaacgaaaacgcaacgccgcaacctaacgaatacccttcaacaatccgacgacgaaaacgataacaatataatattcccgccgatactaatacaaatactcgaccgactaaaaaataaaatcctaactaaccgaataaataaaaaaaaccgccgctaactaacatcgtacgacctaaccgtaaaacaaatacaaaaccaaataaacccgatatacacgccgacgcgaaaaatccacctataccactacgaccatcgcgacctaccgctaacgctcatcaacacgaaaaaaacaacaacgtaatacgcaaaatataataaataaaacaacctactaaataaaaaaaacccgcatcaactacaacaacttatccgactaccgaaacaacaatata

SEQ ID NO: 17357 - DNA, 1054 bp, Artificial Sequence
  chemically treated genomic DNA (Homo sapiens) CpG-island No: 17357
ttacgggttttcgttcggtttttatagcggtagcggatcgaattaggaaagtaattttcgttcggtttttttcgggttttaggtttaggaaggtcgggtcgtggggttttttcgggttttacgtaggggcggtggggcggggcgtagtgacgtaaagaggagtgacgcgacgacgtagcgcgacgcggtgacgtacgtttttttgttggtttagtagcgatagtagcggtcgtggaggtggcgttggggattgttttttttcggaggtcggagcggagtcgcgtttgattgaggcgggtagtaagcggttttttcgttttttttttttttttttcgcgtttttttcgtcgttattagtcgttaaacgttaatcgtcgtttttggggaggagtcgcggttcgcggggtcggagttaggtttgcgttcggatattagtcggagtcggagcgagagtcggggtttcggcgttttcgtttttttttcgtttcggttagcgttcgtcgggttttcgcgcgtcgcgttatggattcggacgagggttataattacgagttcgacgaggacgaggagtgtagtgaggaggatagcggcgtcgaggaggaggaggacgaagacgacgacgagtcggacgatgatattttggatttgggcgaggtggagttggtggagttcgggttgggcgtcggcggggagcgggacggattgttgtgcggggagacgggcggtggcggcggtagcgttttggggttcggcggtggcggcggcggcggcggcggcggtggtggtggcgggtcggggtatgagtaggaggaggattatcgttacgaggtgtttacggtcgagtagattttataatatatggtggaatgtattcgggaggttaacgaggttatttaggtgagggtggtcgtcgcgttagttggatcgggttcgacgggggagcggatttaggcggtacgcgcggtttcgagggataggtttgggtttggtgcgtagtttagttcggtgtttttcggttttgtttttttcgttgtttttgttggggatagagggt

SEQ ID NO: 17358 - DNA, 1054 bp, Artificial Sequence
  chemically treated genomic DNA (Homo sapiens) CpG-island No: 17358
accctctatccccaacaaaaacaacgaaaaaaacaaaaccgaaaaacaccgaactaaactacgcaccaaacccaaacctatccctcgaaaccgcgcgtaccgcctaaatccgctcccccgtcgaacccgatccaactaacgcgacgaccaccctcacctaaataacctcgttaacctcccgaatacattccaccatatattataaaatctactcgaccgtaaacacctcgtaacgataatcctcctcctactcataccccgacccgccaccaccaccgccgccgccgccgccgccgccaccgccgaaccccaaaacgctaccgccgccaccgcccgtctccccgcacaacaatccgtcccgctccccgccgacgcccaacccgaactccaccaactccacctcgcccaaatccaaaatatcatcgtccgactcgtcgtcgtcttcgtcctcctcctcctcgacgccgctatcctcctcactacactcctcgtcctcgtcgaactcgtaattataaccctcgtccgaatccataacgcgacgcgcgaaaacccgacgaacgctaaccgaaacgaaaaaaaaacgaaaacgccgaaaccccgactctcgctccgactccgactaatatccgaacgcaaacctaactccgaccccgcgaaccgcgactcctccccaaaaacgacgattaacgtttaacgactaataacgacgaaaaaaacgcgaaaaaaaaaaaaaaaaaacgaaaaaaccgcttactacccgcctcaatcaaacgcgactccgctccgacctccgaaaaaaaacaatccccaacgccacctccacgaccgctactatcgctactaaaccaacaaaaaaacgtacgtcaccgcgtcgcgctacgtcgtcgcgtcactcctctttacgtcactacgccccgccccaccgcccctacgtaaaacccgaaaaaaccccacgacccgaccttcctaaacctaaaacccgaaaaaaaccgaacgaaaattactttcctaattcgatccgctaccgctataaaaaccgaacgaaaacccgtaa

SEQ ID NO: 17359 - DNA, 1054 bp, Artificial Sequence
  chemically treated genomic DNA (Homo sapiens) CpG-island No: 17359
attttttatttttagtagaggtagcggagaagataaggtcgggaggtatcgggttaggttgcgtattaggtttaggtttgtttttcgggatcgcgcgtgtcgtttgaattcgttttttcgtcgggttcggtttagttggcgcggcggttatttttatttggatgatttcgttgatttttcggatatattttattatgtgttgtagaatttgttcggtcgtgagtatttcgtagcggtaattttttttttgtttatgtttcggttcgttattattatcgtcgtcgtcgtcgtcgtcgttatcgtcgggttttagagcgttgtcgtcgttatcgttcgttttttcgtatagtagttcgtttcgtttttcgtcgacgtttagttcgggttttattagttttatttcgtttagatttagggtattatcgttcggttcgtcgtcgttttcgtttttttttttttcggcgtcgttgttttttttattgtatttttcgttttcgtcgaattcgtagttgtagttttcgttcgagtttatggcgcgacgcgcgggggttcggcggacgttggtcgaggcggggagagggcggggacgtcgaggtttcggttttcgtttcggtttcggttgatgttcggacgtaggtttggtttcggtttcgcgagtcgcggtttttttttaggagcggcggttggcgtttgacggttggtggcggcggggagggcgcggaggagggagggagggagcgagggggtcgtttgttgttcgttttagttagacgcggtttcgtttcggttttcgagagaaaatagtttttaacgttatttttacggtcgttgttatcgttattgagttaataaaggggcgtgcgttatcgcgtcgcgttgcgtcgtcgcgttatttttttttgcgttattgcgtttcgttttatcgtttttgcgtggagttcggggagattttacggttcggtttttttgggtttgggattcgaggggagtcgagcgggaattgtttttttggttcgattcgttgtcgttgtgagggtcgagcggaaattcgtag

SEQ ID NO: 17360 - DNA, 1054 bp, Artificial Sequence
  chemically treated genomic DNA (Homo sapiens) CpG-island No: 17360
ctacgaatttccgctcgaccctcacaacgacaacgaatcgaaccaaaaaaacaattcccgctcgactcccctcgaatcccaaacccaaaaaaaccgaaccgtaaaatctccccgaactccacgcaaaaacgataaaacgaaacgcaataacgcaaaaaaaaataacgcgacgacgcaacgcgacgcgataacgcacgcccctttattaactcaataacgataacaacgaccgtaaaaataacgttaaaaactattttctctcgaaaaccgaaacgaaaccgcgtctaactaaaacgaacaacaaacgaccccctcgctccctccctccctcctccgcgccctccccgccgccaccaaccgtcaaacgccaaccgccgctcctaaaaaaaaaccgcgactcgcgaaaccgaaaccaaacctacgtccgaacatcaaccgaaaccgaaacgaaaaccgaaacctcgacgtccccgccctctccccgcctcgaccaacgtccgccgaacccccgcgcgtcgcgccataaactcgaacgaaaactacaactacgaattcgacgaaaacgaaaaatacaataaaaaaaacaacgacgccgaaaaaaaaaaaaacgaaaacgacgacgaaccgaacgataataccctaaatctaaacgaaataaaactaataaaacccgaactaaacgtcgacgaaaaacgaaacgaactactatacgaaaaaacgaacgataacgacgacaacgctctaaaacccgacgataacgacgacgacgacgacgacgataataataacgaaccgaaacataaacaaaaaaaaaattaccgctacgaaatactcacgaccgaacaaattctacaacacataataaaatatatccgaaaaatcaacgaaatcatccaaataaaaataaccgccgcgccaactaaaccgaacccgacgaaaaaacgaattcaaacgacacgcgcgatcccgaaaaacaaacctaaacctaatacgcaacctaacccgatacctcccgaccttatcttctccgctacctctactaaaaataaaaaat

SEQ ID NO: 17361 - DNA, 917 bp, Artificial Sequence
  chemically treated genomic DNA (Homo sapiens) CpG-island No: 17361
gttggttcggtttttggttgttttagatcgcgttgttttttagtttcgaggtagagagttgtttcggtgttatagttaaataagttcggcgtcgcgtagtttttgatacgcgcggaagggttcggttttgttttggttgtcgtcgttttgttattagtacggcgttgtattgggggcggggagtttgatgggagacgcgcgcggcgttgaggaggcggcggttcgggagagggagcgggagagggattgggcgcgggaggcgggaggcggggggatagaagggaggtttcgtcgtcggcggcgttcgtttttttcgttggggagtagttgttgtagtaggagtagagtaggagacgcgtagtcgtcgtcgtcgtcgtcgggggatgtggtcggcgtttgtttttagtcgcgtcgttttttgagtattagtcgtcgttgtagtcgtcgtcgtcgtttagtcgtgcggtgttaggtcgcgtttttttcgggcgttcgtcggttcgtatgtcgaggggtttcggggcgtagttgcgcgttcggcgtcgttttcgggttttttcggtttcgttatgggttgttgtagtttcgtttttttcgtcgcgtaggtgaggggttttcgtttttcggtcgttcgttcggatgtttttcgtgcgtcgcgtcgcgcggcgggcgttcgtcgttcgatatttttcgttgtttttagttttttttgagcgtatcgtgtagtttaaagatttttatttcgttttttcgttcgtcgggtttcgtcgatgttcgtgcgttggtttcgcggttgtcgatttaaaggcgtttttgcgcggcgtttagtgcgtttttagtttttttcggttttttttttagtcggttttttttttttagttatatttgagttgttcgtttcgttcgtttgtaggtag

SEQ ID NO: 17362 - DNA, 917 bp, Artificial Sequence
  chemically treated genomic DNA (Homo sapiens) CpG-island No: 17362
ctacctacaaacgaacgaaacgaacaactcaaatataactaaaaaaaaaaaaccgactaaaaaaaaaaccgaaaaaaactaaaaacgcactaaacgccgcgcaaaaacgcctttaaatcgacaaccgcgaaaccaacgcacgaacatcgacgaaacccgacgaacgaaaaaacgaaataaaaatctttaaactacacgatacgctcaaaaaaaactaaaaacaacgaaaaatatcgaacgacgaacgcccgccgcgcgacgcgacgcacgaaaaacatccgaacgaacgaccgaaaaacgaaaacccctcacctacgcgacgaaaaaaacgaaactacaacaacccataacgaaaccgaaaaaacccgaaaacgacgccgaacgcgcaactacgccccgaaacccctcgacatacgaaccgacgaacgcccgaaaaaaacgcgacctaacaccgcacgactaaacgacgacgacgactacaacgacgactaatactcaaaaaacgacgcgactaaaaacaaacgccgaccacatcccccgacgacgacgacgacgactacgcgtctcctactctactcctactacaacaactactccccaacgaaaaaaacgaacgccgccgacgacgaaacctcccttctatccccccgcctcccgcctcccgcgcccaatccctctcccgctccctctcccgaaccgccgcctcctcaacgccgcgcgcgtctcccatcaaactccccgcccccaatacaacgccgtactaataacaaaacgacgacaaccaaaacaaaaccgaacccttccgcgcgtatcaaaaactacgcgacgccgaacttatttaactataacaccgaaacaactctctacctcgaaactaaaaaacaacgcgatctaaaacaaccaaaaaccgaaccaac

SEQ ID NO: 17363 - DNA, 917 bp, Artificial Sequence
  chemically treated genomic DNA (Homo sapiens) CpG-island No: 17363
ttatttgtaggcgggcgggacgggtagtttaggtgtgattgggaggagggggtcgattggggaaggggtcgggaagagttgagggcgtattaggcgtcgcgtagaggcgtttttgagtcggtagtcgcggagttagcgtacgggtatcggcgggattcggcggacggaaaggcggagtgggggtttttggattgtacggtgcgtttaggggaggttggggatagcgagaggtatcgggcggcgggcgttcgtcgcgcgacgcggcgtacgggaggtattcgggcgggcggtcgggaggcgggagttttttatttgcgcggcggaggaggcggagttgtagtagtttatggcggggtcgaaggagttcggaggcggcgtcgggcgcgtagttacgtttcggagtttttcggtatgcgagtcggcgggcgttcggggagggcgcggtttggtatcgtacggttaggcggcggcggcggttgtagcggcggttggtatttaagaggcggcgcggttagaggtaggcgtcggttatatttttcggcggcggcggcggcggttacgcgttttttgttttgtttttgttgtagtagttgttttttagcggaaggggcgggcgtcgtcgacgacggagttttttttttgttttttcgtttttcgtttttcgcgtttagtttttttttcgttttttttttcgggtcgtcgtttttttagcgtcgcgcgcgttttttattagatttttcgtttttagtgtagcgtcgtgttggtggtagggcggcggtagttagaataaggtcgggttttttcgcgcgtgttagaggttgcgcggcgtcgggtttatttagttgtggtatcgaggtagttttttgtttcgaggttggagggtaacgcggtttgaggtagttaaagatcgggttaat

SEQ ID NO: 17364 - DNA, 917 bp, Artificial Sequence
  chemically treated genomic DNA (Homo sapiens) CpG-island No: 17364
attaacccgatctttaactacctcaaaccgcgttaccctccaacctcgaaacaaaaaactacctcgataccacaactaaataaacccgacgccgcgcaacctctaacacgcgcgaaaaaacccgaccttattctaactaccgccgccctaccaccaacacgacgctacactaaaaacgaaaaatctaataaaaaacgcgcgcgacgctaaaaaaacgacgacccgaaaaaaaaaacgaaaaaaaaactaaacgcgaaaaacgaaaaacgaaaaaacaaaaaaaaaactccgtcgtcgacgacgcccgccccttccgctaaaaaacaactactacaacaaaaacaaaacaaaaaacgcgtaaccgccgccgccgccgccgaaaaatataaccgacgcctacctctaaccgcgccgcctcttaaataccaaccgccgctacaaccgccgccgccgcctaaccgtacgataccaaaccgcgccctccccgaacgcccgccgactcgcataccgaaaaactccgaaacgtaactacgcgcccgacgccgcctccgaactccttcgaccccgccataaactactacaactccgcctcctccgccgcgcaaataaaaaactcccgcctcccgaccgcccgcccgaatacctcccgtacgccgcgtcgcgcgacgaacgcccgccgcccgatacctctcgctatccccaacctcccctaaacgcaccgtacaatccaaaaacccccactccgcctttccgtccgccgaatcccgccgatacccgtacgctaactccgcgactaccgactcaaaaacgcctctacgcgacgcctaatacgccctcaactcttcccgaccccttccccaatcgaccccctcctcccaatcacacctaaactacccgtcccgcccgcctacaaataa

SEQ ID NO: 17365 - DNA, 672 bp, Artificial Sequence
  chemically treated genomic DNA (Homo sapiens) CpG-island No: 17365
acgaaacgttagtagatttacgcgagaattatatatatttggggttggcgtcgttggacgtcgcggttttacggagatttagggtttaagtagagttaaggagcggcggtaatcgcgggggttattcggaagatcgcggagtttcggttttaggcgtcgtcgcggttgttaggttcgcgtattttttagttgcggtgagcgcgttgtttttatttcggtgttttatttttttcgcgttagttgtagacgtatttttttgttttcgggcgttttttttcgttttttttttttttttttttcgtttttagttttagttcggtacggcgtttttattattttttcgaagaacgtggtcgttatagtcgtttcgtgatcggttggatataattgtagcgtcgcgggatcgtacgtcggtttgcgcgagattacgtttttttatcgcgcgggtaataagtttcgtttcgtataggttacgtttttcgcgtatagtttaagttcgcggttatatttttatcgcgcgggcgttacgtttcgtttcgtatagggttcgtttttaggtatattttgagttcgcggttacgttttttatatcgttcgttcgcgttgttatgttttgggttagtagttttcgtagtttttttgtttttaaattatagattgggggagggggtt

SEQ ID NO: 17366 - DNA, 672 bp, Artificial Sequence
  chemically treated genomic DNA (Homo sapiens) CpG-island No: 17366
aaccccctcccccaatctataatttaaaaacaaaaaaactacgaaaactactaacccaaaacataacaacgcgaacgaacgatataaaaaacgtaaccgcgaactcaaaatatacctaaaaacgaaccctatacgaaacgaaacgtaacgcccgcgcgataaaaatataaccgcgaacttaaactatacgcgaaaaacgtaacctatacgaaacgaaacttattacccgcgcgataaaaaaacgtaatctcgcgcaaaccgacgtacgatcccgcgacgctacaattatatccaaccgatcacgaaacgactataacgaccacgttcttcgaaaaaataataaaaacgccgtaccgaactaaaactaaaaacgaaaaaaaaaaaaaaaaaaaacgaaaaaaaacgcccgaaaacaaaaaaatacgtctacaactaacgcgaaaaaaataaaacaccgaaataaaaacaacgcgctcaccgcaactaaaaaatacgcgaacctaacaaccgcgacgacgcctaaaaccgaaactccgcgatcttccgaataacccccgcgattaccgccgctccttaactctacttaaaccctaaatctccgtaaaaccgcgacgtccaacgacgccaaccccaaatatatataattctcgcgtaaatctactaacgtttcgt

SEQ ID NO: 17367 - DNA, 672 bp, Artificial Sequence
  chemically treated genomic DNA (Homo sapiens) CpG-island No: 17367
gatttttttttttaatttgtaatttaaaaataaaaaagttgcggggattgttggtttagggtatgatagcgcgggcgggcggtgtagagggcgtggtcgcgagtttagggtgtgtttgggagcgagttttgtgcggggcgggacgtagcgttcgcgcggtgggggtgtggtcgcgagtttgggttgtgcgcggagggcgtggtttgtgcggggcgggatttattgttcgcgcggtgagggagcgtggtttcgcgtaagtcggcgtgcggtttcgcggcgttgtagttgtgtttagtcggttacggggcggttatggcggttacgtttttcggagaggtggtgaaggcgtcgtgtcgagttgggattgaggacgaagaggaggaggaggaggggcggagggagacgttcgaggatagggaggtgcgtttgtagttggcgcggaagaggtgaggtatcgggataagggtagcgcgtttatcgtagttggaaggtgcgcgggtttggtagtcgcgacggcgtttaaggtcggggtttcgcggtttttcgagtggttttcgcggttgtcgtcgttttttggttttgtttgggttttgggttttcgtgaagtcgcggcgtttagcggcgttagttttaggtgtgtgtggttttcgcgtggatttgttggcgtttcgt

SEQ ID NO: 17368 - DNA, 672 bp, Artificial Sequence
  chemically treated genomic DNA (Homo sapiens) CpG-island No: 17368
acgaaacgccaacaaatccacgcgaaaaccacacacacctaaaactaacgccgctaaacgccgcgacttcacgaaaacccaaaacccaaacaaaaccaaaaaacgacgacaaccgcgaaaaccactcgaaaaaccgcgaaaccccgaccttaaacgccgtcgcgactaccaaacccgcgcaccttccaactacgataaacgcgctacccttatcccgatacctcacctcttccgcgccaactacaaacgcacctccctatcctcgaacgtctccctccgcccctcctcctcctcctcttcgtcctcaatcccaactcgacacgacgccttcaccacctctccgaaaaacgtaaccgccataaccgccccgtaaccgactaaacacaactacaacgccgcgaaaccgcacgccgacttacgcgaaaccacgctccctcaccgcgcgaacaataaatcccgccccgcacaaaccacgccctccgcgcacaacccaaactcgcgaccacacccccaccgcgcgaacgctacgtcccgccccgcacaaaactcgctcccaaacacaccctaaactcgcgaccacgccctctacaccgcccgcccgcgctatcataccctaaaccaacaatccccgcaacttttttatttttaaattacaaattaaaaaaaaaaatc

SEQ ID NO: 17369 - DNA, 545 bp, Artificial Sequence
  chemically treated genomic DNA (Homo sapiens) CpG-island No: 17369
tttcgtgtcggatttggtcgttttttttttcgtttttatattaaagttcggagattttatgtgtcgtttttagcgataagggattcggagtagcgacgattttagatttatcggttggacggggattaggattggggtggggtagggaagttgttatttttagggaacggcggcgatcgttatagcgtaggtcgcggattcgatcgcggtaggcgaagtggggtggggggagtggaaattagggagggtggggaagagggtaatacgtaagcgttaagggttaggtgtcgcggtggatgtcgggatacggagttttcggtagagaaagaaattggttaaatgagagaaagcgaattattaattttaggatgattcgcgtacgatttggttgttacgaaggttcggaggagggcgtttgcgggcggggtataacgagaagttatcggaagcggaagttaggtatggcgttcggggttcgggagtttgggtaatatagttttgtgtttattgggtgaagaggttgatttagggcggggaaaggagga

SEQ ID NO: 17370 - DNA, 545 bp, Artificial Sequence
  chemically treated genomic DNA (Homo sapiens) CpG-island No: 17370
tcctcctttccccgccctaaatcaacctcttcacccaataaacacaaaactatattacccaaactcccgaaccccgaacgccatacctaacttccgcttccgataacttctcgttataccccgcccgcaaacgccctcctccgaaccttcgtaacaaccaaatcgtacgcgaatcatcctaaaattaataattcgctttctctcatttaaccaatttctttctctaccgaaaactccgtatcccgacatccaccgcgacacctaacccttaacgcttacgtattaccctcttccccaccctccctaatttccactccccccaccccacttcgcctaccgcgatcgaatccgcgacctacgctataacgatcgccgccgttccctaaaaataacaacttccctaccccaccccaatcctaatccccgtccaaccgataaatctaaaatcgtcgctactccgaatcccttatcgctaaaaacgacacataaaatctccgaactttaatataaaaacgaaaaaaaaaacgaccaaatccgacacgaaa

SEQ ID NO: 17371 - DNA, 545 bp, Artificial Sequence
  chemically treated genomic DNA (Homo sapiens) CpG-island No: 17371
ttttttttttttcgttttaagttagtttttttatttagtgagtataaaattgtattgtttagattttcgggtttcgaacgttatatttggttttcgttttcggtggtttttcgttgtgtttcgttcgtaagcgttttttttcgggttttcgtgatagttaggtcgtgcgcgggttattttgggattggtagttcgtttttttttatttagttagtttttttttttatcggggatttcgtgtttcggtatttatcgcggtatttgatttttggcgtttgcgtgttgtttttttttttattttttttaatttttattttttttattttatttcgtttgtcgcggtcgggttcgcggtttgcgttgtagcggtcgtcgtcgttttttggaagtagtaatttttttattttattttagttttggttttcgtttagtcggtgagtttgaagtcgtcgttgtttcgagttttttgtcgttgggagcggtatatggggttttcggattttgatgtgggggcgggggaggaagcgattaggttcggtacgaag

SEQ ID NO: 17372 - DNA, 545 bp, Artificial Sequence
  chemically treated genomic DNA (Homo sapiens) CpG-island No: 17372
cttcgtaccgaacctaatcgcttcctcccccgcccccacatcaaaatccgaaaaccccatataccgctcccaacgacaaaaaactcgaaacaacgacgacttcaaactcaccgactaaacgaaaaccaaaactaaaataaaataaaaaaattactacttccaaaaaacgacgacgaccgctacaacgcaaaccgcgaacccgaccgcgacaaacgaaataaaataaaaaaaataaaaattaaaaaaaataaaaaaaaaaacaacacgcaaacgccaaaaatcaaataccgcgataaataccgaaacacgaaatccccgataaaaaaaaaaactaactaaataaaaaaaaacgaactaccaatcccaaaataacccgcgcacgacctaactatcacgaaaacccgaaaaaaaacgcttacgaacgaaacacaacgaaaaaccaccgaaaacgaaaaccaaatataacgttcgaaacccgaaaatctaaacaatacaattttatactcactaaataaaaaaactaacttaaaacgaaaaaaaaaaaa

SEQ ID NO: 17373 - DNA, 762 bp, Artificial Sequence
  chemically treated genomic DNA (Homo sapiens) CpG-island No: 17373
tttagcgtttaagcgcgcgtatagacgtgaacgtcgttagaggggggagggggtggggcgatgtttaagtgtttacgtattcgtagtgcgacgtacgtaggcgtagtacggtttttcgggcgatagcggtggcggtttttcggggtgttcggtttttttttatttaggtcggtttcggttcgattcgtttttagaaatttattgtttggggttgcggattttttcgtcgtgttttataaaagtaaagtttggggatttggggggagtcggaagtatcgtttcgagatttttaaatattatcggggaaacggaagtggtcgtcggtggtaggtttgggggagatcggaagtgacggttcgtggggaagtcgggggcggagtcgcggggtggtgggtgtgtgtgtgtgtgtgtgtgtgtgtgtgtgtgtgtttggttgtgggttagttgtgtcgttttgttggaatatcgtgggaaggtagtagacgcgggtagttagttagtaggttcgtcgtttcgtgagtgtcgtttcgggtttatagtgagttaggagggttcgatgggcgtggcgcgcgtgcgcgaaattatttttttcgtagagtgtggggcgattatcgttttcgcgttgttttaggatttttcgatttttggggcgtttgttttgtcgtgatcggtgatgatattagtttttggtttcgtgttttttttttaatttgattggttttttgtttattgtgattggcgtcgtggagttttttttatttt

SEQ ID NO: 17374 - DNA, 762 bp, Artificial Sequence
  chemically treated genomic DNA (Homo sapiens) CpG-island No: 17374
aaaataaaaaaaactccacgacgccaatcacaataaacaaaaaaccaatcaaattaaaaaaaaaacacgaaaccaaaaactaatatcatcaccgatcacgacaaaacaaacgccccaaaaatcgaaaaatcctaaaacaacgcgaaaacgataatcgccccacactctacgaaaaaaataatttcgcgcacgcgcgccacgcccatcgaaccctcctaactcactataaacccgaaacgacactcacgaaacgacgaacctactaactaactacccgcgtctactaccttcccacgatattccaacaaaacgacacaactaacccacaaccaaacacacacacacacacacacacacacacacacacacccaccaccccgcgactccgcccccgacttccccacgaaccgtcacttccgatctcccccaaacctaccaccgacgaccacttccgtttccccgataatatttaaaaatctcgaaacgatacttccgactccccccaaatccccaaactttacttttataaaacacgacgaaaaaatccgcaaccccaaacaataaatttctaaaaacgaatcgaaccgaaaccgacctaaataaaaaaaaaccgaacaccccgaaaaaccgccaccgctatcgcccgaaaaaccgtactacgcctacgtacgtcgcactacgaatacgtaaacacttaaacatcgccccaccccctcccccctctaacgacgttcacgtctatacgcgcgcttaaacgctaaa

SEQ ID NO: 17375 - DNA, 762 bp, Artificial Sequence
  chemically treated genomic DNA (Homo sapiens) CpG-island No: 17375
gaggtgggaggggttttacgacgttaattataataagtagggagttagttagattaggaaggaagtacgagattagagattagtgttattatcggttacggtaggataagcgttttagaggtcggaaaattttgggataacgcgaaagcggtggtcgttttatattttgcggagaaagtggtttcgcgtacgcgcgttacgtttatcgaatttttttaatttattatagattcgaaacggtatttacggggcgacggatttgttagttgattgttcgcgtttattgtttttttacggtgttttagtagaacggtataattaatttatagttaaatatatatatatatatatatatatatatatatatatttattatttcgcggtttcgttttcgatttttttacggatcgttattttcggttttttttaaatttgttatcgacggttattttcgttttttcgatagtatttggggatttcgaagcgatattttcggttttttttaggtttttaagttttatttttgtggggtacgacgagaaagttcgtagttttaaatagtgagtttttgagggcgagtcgggtcggggtcggtttaggtgggagggagtcgagtatttcgaggagtcgttatcgttgtcgttcgggggatcgtattacgtttgcgtgcgtcgtattacggatgcgtggatatttaagtatcgttttatttttttttttttttggcggcgtttacgtttgtgcgcgcgtttgagcgttaga

SEQ ID NO: 17376 - DNA, 762 bp, Artificial Sequence
  chemically treated genomic DNA (Homo sapiens) CpG-island No: 17376
tctaacgctcaaacgcgcgcacaaacgtaaacgccgccaaaaaaaaaaaaaaataaaacgatacttaaatatccacgcatccgtaatacgacgcacgcaaacgtaatacgatcccccgaacgacaacgataacgactcctcgaaatactcgactccctcccacctaaaccgaccccgacccgactcgccctcaaaaactcactatttaaaactacgaactttctcgtcgtaccccacaaaaataaaacttaaaaacctaaaaaaaaccgaaaatatcgcttcgaaatccccaaatactatcgaaaaaacgaaaataaccgtcgataacaaatttaaaaaaaaccgaaaataacgatccgtaaaaaaatcgaaaacgaaaccgcgaaataataaatatatatatatatatatatatatatatatatatatttaactataaattaattataccgttctactaaaacaccgtaaaaaaacaataaacgcgaacaatcaactaacaaatccgtcgccccgtaaataccgtttcgaatctataataaattaaaaaaattcgataaacgtaacgcgcgtacgcgaaaccactttctccgcaaaatataaaacgaccaccgctttcgcgttatcccaaaattttccgacctctaaaacgcttatcctaccgtaaccgataataacactaatctctaatctcgtacttccttcctaatctaactaactccctacttattataattaacgtcgtaaaacccctcccacctc

SEQ ID NO: 17377 - DNA, 870 bp, Artificial Sequence
  chemically treated genomic DNA (Homo sapiens) CpG-island No: 17377
ggttttttattcgttttacgattttttgtcgttcgtgtttatttttacgttcgttttcgtagtgtagttttttttttttttcggtgtaagtaaaagtcggtttggaggtttttattatagcgttttgtattttatattcgtgttttttcggtttttaattcgtatttattttagaaatagtattattttttttttttcggttcggttcggttttcgtaggggttaaaagtcgttatttttttagaagttttaagtttttaggatcgtatttttaagagcgcgtcggttcgtgttttcgtaggcgtttcgttgaaggggtaggggttaggttgggagacgacgaaggaataggcgtttttgacgagcgggacgtagttttcggacgtcgaggggttggcgttttcgtaggacggtttttattatttttattgtttcgtcggttatcggggtcgggcgttttttggcggcggggatttttagggtcgttcggttacgttgcgtagttttttgtatcgggcggggggcgtttacgggtcgggtattttcgagttgttgttcgagggcgtcgagacggtgattttagtgttggattcggttaggagataagggtacgggtttttttggtatacgagcgtggggttcggcggtttggtgtagtttcggaggggcgagagggtgtacgttaatattagttatttcgatatggtggatttcgcgagagggaagattttttttggggtcgtgatggtggggtgagggaatatgagtgcgtggtgcgagtgcgtgaatattgggggttcggacgtttaggattttatggtagtgggaaaaatgtaggagattgtttggaaattgattttgaatttgatg

SEQ ID NO: 17378 - DNA, 870 bp, Artificial Sequence
  chemically treated genomic DNA (Homo sapiens) CpG-island No: 17378
catcaaattcaaaatcaatttccaaacaatctcctacatttttcccactaccataaaatcctaaacgtccgaacccccaatattcacgcactcgcaccacgcactcatattccctcaccccaccatcacgaccccaaaaaaaatcttccctctcgcgaaatccaccatatcgaaataactaatattaacgtacaccctctcgcccctccgaaactacaccaaaccgccgaaccccacgctcgtataccaaaaaaacccgtacccttatctcctaaccgaatccaacactaaaatcaccgtctcgacgccctcgaacaacaactcgaaaatacccgacccgtaaacgccccccgcccgatacaaaaaactacgcaacgtaaccgaacgaccctaaaaatccccgccgccaaaaaacgcccgaccccgataaccgacgaaacaataaaaataataaaaaccgtcctacgaaaacgccaacccctcgacgtccgaaaactacgtcccgctcgtcaaaaacgcctattccttcgtcgtctcccaacctaacccctaccccttcaacgaaacgcctacgaaaacacgaaccgacgcgctcttaaaaatacgatcctaaaaacttaaaacttctaaaaaaataacgacttttaacccctacgaaaaccgaaccgaaccgaaaaaaaaaaaataatactatttctaaaataaatacgaattaaaaaccgaaaaaacacgaatataaaatacaaaacgctataataaaaacctccaaaccgacttttacttacaccgaaaaaaaaaaaaaactacactacgaaaacgaacgtaaaaataaacacgaacgacaaaaaatcgtaaaacgaataaaaaacc

SEQ ID NO: 17379 - DNA, 870 bp, Artificial Sequence
  chemically treated genomic DNA (Homo sapiens) CpG-island No: 17379
tattaggtttaaaattaatttttaaatagttttttatattttttttattgttatggggttttgggcgttcgggtttttaatatttacgtattcgtattacgtatttatatttttttattttattattacggttttaaagaaggttttttttttcgcgaagtttattatatcggggtgattgatgttgacgtatattttttcgttttttcggagttgtattaggtcgtcgaattttacgttcgtgtattagagaggttcgtatttttgttttttggtcgggtttagtattggagttatcgtttcggcgttttcgagtagtagttcgggagtgttcggttcgtaggcgtttttcgttcggtatagagagttgcgtagcgtgatcgagcggttttgggggttttcgtcgttagggggcgttcggtttcggtagtcgacgagatagtagaggtaatagaggtcgttttgcgggagcgttagtttttcggcgttcgagaattgcgtttcgttcgttagaaacgtttgttttttcgtcgttttttagtttagtttttgtttttttagcggagcgtttgcggagatacgggtcgacgcgtttttgggaatgcgattttaaaggtttgggatttttggggaagtggcggtttttagtttttgcgggagtcgagtcgggtcgggggaggagggatggtgttgtttttgggatgagtgcgagttgggggtcgagggaatacggatgtggggtgtagaacgttgtagtggggatttttaggtcggtttttgtttgtatcggagggaagaagaaattatattgcggggacgagcgtaagagtgggtacgagcgataaaaggtcgtgaagcgggtgggaaatt

SEQ ID NO: 17380 - DNA, 870 bp, Artificial Sequence
  chemically treated genomic DNA (Homo sapiens) CpG-island No: 17380
aatttcccacccgcttcacgaccttttatcgctcgtacccactcttacgctcgtccccgcaatataatttcttcttccctccgatacaaacaaaaaccgacctaaaaatccccactacaacgttctacaccccacatccgtattccctcgacccccaactcgcactcatcccaaaaacaacaccatccctcctcccccgacccgactcgactcccgcaaaaactaaaaaccgccacttccccaaaaatcccaaacctttaaaatcgcattcccaaaaacgcgtcgacccgtatctccgcaaacgctccgctaaaaaaacaaaaactaaactaaaaaacgacgaaaaaacaaacgtttctaacgaacgaaacgcaattctcgaacgccgaaaaactaacgctcccgcaaaacgacctctattacctctactatctcgtcgactaccgaaaccgaacgccccctaacgacgaaaacccccaaaaccgctcgatcacgctacgcaactctctataccgaacgaaaaacgcctacgaaccgaacactcccgaactactactcgaaaacgccgaaacgataactccaatactaaacccgaccaaaaaacaaaaatacgaacctctctaatacacgaacgtaaaattcgacgacctaatacaactccgaaaaaacgaaaaaatatacgtcaacatcaatcaccccgatataataaacttcgcgaaaaaaaaaaccttctttaaaaccgtaataataaaataaaaaaatataaatacgtaatacgaatacgtaaatattaaaaacccgaacgcccaaaaccccataacaataaaaaaaatataaaaaactatttaaaaattaattttaaacctaata

SEQ ID NO: 17381 - DNA, 619 bp, Artificial Sequence
  chemically treated genomic DNA (Homo sapiens) CpG-island No: 17381
cgaagtttattttgattaagtcgttgtgttcgaggtgtagttcgggtgagtttaaataagtcggcgaaagagttgcgcgttagatttttgagttgattgtattcgatgtcgagaaatttgaggttgcggtagttttggaagatgcgtacgggtataaattggatggcgttggttcgtatatgtagcgtggtgagtttcgtagttcgtggaagaggtcgcggcgagcgtttgtagtttgttgtacgagaggtttacgttgcgtaggttgggtatgggtcggaaggtggtgttgggtagttgggtgatttggttggaatttagcgtgagttttttaattcggcgtagtttttgaaaggcgtttttttgtacggagtagatgtgattgtgatttagatagagttacgtgagttgtattaatttcgtgaattggtcggcgcgtagtttcgagaggttgttgtagcgtagggataagtttagtaggtcggataggttgtggggcgtttcggtgaggttgagcgtttcgtagtatagtagtcgtttttcgtatcggtatagttgcgggtattcgttgggggcggcgggtagtatttgaaagtaggtttttagtagatataagatt

SEQ ID NO: 17382 - DNA, 619 bp, Artificial Sequence
  chemically treated genomic DNA (Homo sapiens) CpG-island No: 17382
aatcttatatctactaaaaacctactttcaaatactacccgccgcccccaacgaatacccgcaactataccgatacgaaaaacgactactatactacgaaacgctcaacctcaccgaaacgccccacaacctatccgacctactaaacttatccctacgctacaacaacctctcgaaactacgcgccgaccaattcacgaaattaatacaactcacgtaactctatctaaatcacaatcacatctactccgtacaaaaaaacgcctttcaaaaactacgccgaattaaaaaactcacgctaaattccaaccaaatcacccaactacccaacaccaccttccgacccatacccaacctacgcaacgtaaacctctcgtacaacaaactacaaacgctcgccgcgacctcttccacgaactacgaaactcaccacgctacatatacgaaccaacgccatccaatttatacccgtacgcatcttccaaaactaccgcaacctcaaatttctcgacatcgaatacaatcaactcaaaaatctaacgcgcaactctttcgccgacttatttaaactcacccgaactacacctcgaacacaacgacttaatcaaaataaacttcg

SEQ ID NO: 17383 - DNA, 619 bp, Artificial Sequence
  chemically treated genomic DNA (Homo sapiens) CpG-island No: 17383
ggttttgtgtttgttgggggtttgtttttagatgttgttcgtcgtttttagcgggtgttcgtagttgtgtcggtgcgaggggcggttgttgtattgcgaggcgtttaattttatcgaggcgttttataatttgttcggtttgttgggtttgtttttgcgttataatagtttttcggagttgcgcgtcggttagtttacggggttaatgtagtttacgtggttttatttggattataattatatttgtttcgtgtagggggacgttttttagaaattgcgtcgagttaaggaatttacgttgagttttaattagattatttaattgtttaatattatttttcggtttatgtttaatttgcgtagcgtggatttttcgtataataagttgtaggcgttcgtcgcgattttttttacgggttgcggaatttattacgttgtatatgcgggttaacgttatttagtttgtgttcgtgcgtattttttaggattgtcgtagttttaagtttttcgatatcggatataattagtttaagagtttggcgcgtaattttttcgtcggtttgtttaagtttattcgagttgtatttcgagtataacgatttggttaaggtgaatttcg

SEQ ID NO: 17384 - DNA, 619 bp, Artificial Sequence
  chemically treated genomic DNA (Homo sapiens) CpG-island No: 17384
cgaaattcaccttaaccaaatcgttatactcgaaatacaactcgaataaacttaaacaaaccgacgaaaaaattacgcgccaaactcttaaactaattatatccgatatcgaaaaacttaaaactacgacaatcctaaaaaatacgcacgaacacaaactaaataacgttaacccgcatatacaacgtaataaattccgcaacccgtaaaaaaaatcgcgacgaacgcctacaacttattatacgaaaaatccacgctacgcaaattaaacataaaccgaaaaataatattaaacaattaaataatctaattaaaactcaacgtaaattccttaactcgacgcaatttctaaaaaacgtccccctacacgaaacaaatataattataatccaaataaaaccacgtaaactacattaaccccgtaaactaaccgacgcgcaactccgaaaaactattataacgcaaaaacaaacccaacaaaccgaacaaattataaaacgcctcgataaaattaaacgcctcgcaatacaacaaccgcccctcgcaccgacacaactacgaacacccgctaaaaacgacgaacaacatctaaaaacaaacccccaacaaacacaaaacc

SEQ ID NO: 17385 - DNA, 553 bp, Artificial Sequence
  chemically treated genomic DNA (Homo sapiens) CpG-island No: 17385
gcggtcggcggatttggtaggcgtataatgttttattttgttgttcggttcggggttgtaagggcggtcggtaaggcggggaggcgatttttaggattcgtaagttttttaattacgtgtcggagttcgagtttcgtttttttgtcgtttttttttttttttgtagttcggattgtgacgttgtggggggaaaaaattttaaattcggggttcgcgattttttaggatttgatagtttggttaatgttcgttattggaaacgattattgatcggcgttattttttatttcgcggaaatagtttgttattcgcgtttcgggtagttgtagagagcgggtttatttatgttttgcgggcggcgggcggcgggcggcgggcggtggggaggtgcggacggcggcgcggggagcggcgagcggcgttcgggttttttttttttattaggtagtgtgcggcgcgagtttgtataggtatttattgtttattgagtgtcgtaagttgtttacgattgtgcgtttttttcgagtattttagatatgggtagattgaaaag

SEQ ID NO: 17386 - DNA, 553 bp, Artificial Sequence
  chemically treated genomic DNA (Homo sapiens) CpG-island No: 17386
cttttcaatctacccatatctaaaatactcgaaaaaaacgcacaatcgtaaacaacttacgacactcaataaacaataaatacctatacaaactcgcgccgcacactacctaataaaaaaaaaaaacccgaacgccgctcgccgctccccgcgccgccgtccgcacctccccaccgcccgccgcccgccgcccgccgcccgcaaaacataaataaacccgctctctacaactacccgaaacgcgaataacaaactatttccgcgaaataaaaaataacgccgatcaataatcgtttccaataacgaacattaaccaaactatcaaatcctaaaaaatcgcgaaccccgaatttaaaattttttccccccacaacgtcacaatccgaactacaaaaaaaaaaaaaaacgacaaaaaaacgaaactcgaactccgacacgtaattaaaaaacttacgaatcctaaaaatcgcctccccgccttaccgaccgcccttacaaccccgaaccgaacaacaaaataaaacattatacgcctaccaaatccgccgaccgc

SEQ ID NO: 17387 - DNA, 553 bp, Artificial Sequence
  chemically treated genomic DNA (Homo sapiens) CpG-island No: 17387
ttttttaatttgtttatgtttgaggtgttcggggaagacgtataatcgtgagtagtttacgatatttagtgagtagtaggtgtttgtgtaagttcgcgtcgtatattgtttggtggagggaaggagttcgggcgtcgttcgtcgtttttcgcgtcgtcgttcgtatttttttatcgttcgtcgttcgtcgttcgtcgttcgtaaagtatgagtgagttcgttttttgtagttgttcggggcgcgaatggtaggttgttttcgcggagtaaaaggtggcgtcggttagtggtcgtttttaatgacggatattaattagattgttagattttggggagtcgcgagtttcgagtttggagttttttttttttataacgttatagttcgaattgtagagggaaaggaaggcggtaggaaggcgaagttcgggtttcggtacgtagttgggaaatttgcgggttttagaagtcgttttttcgttttgtcggtcgtttttgtagtttcgagtcgagtagtaaagtgagatattgtgcgtttgttagattcgtcggtcgt

SEQ ID NO: 17388 - DNA, 553 bp, Artificial Sequence
  chemically treated genomic DNA (Homo sapiens) CpG-island No: 17388
acgaccgacgaatctaacaaacgcacaatatctcactttactactcgactcgaaactacaaaaacgaccgacaaaacgaaaaaacgacttctaaaacccgcaaatttcccaactacgtaccgaaacccgaacttcgccttcctaccgccttcctttccctctacaattcgaactataacgttataaaaaaaaaaaactccaaactcgaaactcgcgactccccaaaatctaacaatctaattaatatccgtcattaaaaacgaccactaaccgacgccaccttttactccgcgaaaacaacctaccattcgcgccccgaacaactacaaaaaacgaactcactcatactttacgaacgacgaacgacgaacgacgaacgataaaaaaatacgaacgacgacgcgaaaaacgacgaacgacgcccgaactccttccctccaccaaacaatatacgacgcgaacttacacaaacacctactactcactaaatatcgtaaactactcacgattatacgtcttccccgaacacctcaaacataaacaaattaaaaaa

SEQ ID NO: 17389 - DNA, 703 bp, Artificial Sequence
  chemically treated genomic DNA (Homo sapiens) CpG-island No: 17389
  unsure (641, 670..671, 678, 681, 687, 693)
tcgtatcgtcgtgtttttcggtttaagttttaatattcgggcgaattggcgtgttttattagttcggtagtatgaattattattcgttagttattttattggagacgacggaagatcgttgtcgaagcggcgttttatcgtttttagtatgacgttttgtattgttttattgttgaagtcgtcggtagtgatcgtttagtgtagtgttttacgattatagtagtttagcgcgaacgtgatacgtagttttttttcgttattatagtagaattcgaattcgttagagtattatcgttgattgtttttttttacggttattttgtttgtatgtgttcgtttcgatggcggtatagtaggttttcgtttaagtaatagcgtattttggcgtatgattcggtaaatacgtttggtattgatcgtaggtatattattaagttttgtttgtttgcgatagcgtttatattcgacgataattatacgttggtagttttcgatatatggtgtatacggagaagtatattcgtattattagtgtgacgattgcggcggttatttatttagttatcggttcgtttgagatgacgtgtaattgcgtacgcgatattcggagataatgggttgattaagtttatttttatttntcgggtaaataaaggggcgtgcgttattnnatttttntgnttcgtnttatanttaacggttg

SEQ ID NO: 17390 - DNA, 703 bp, Artificial Sequence
  chemically treated genomic DNA (Homo sapiens) CpG-island No: 17390
  unsure (11, 17, 23, 26, 33..34, 63)
caaccgttaantataanacgaancanaaaaatnnaataacgcacgcccctttatttacccganaaataaaaataaacttaatcaacccattatctccgaatatcgcgtacgcaattacacgtcatctcaaacgaaccgataactaaataaataaccgccgcaatcgtcacactaataatacgaatatacttctccgtatacaccatatatcgaaaactaccaacgtataattatcgtcgaatataaacgctatcgcaaacaaacaaaacttaataatatacctacgatcaataccaaacgtatttaccgaatcatacgccaaaatacgctattacttaaacgaaaacctactataccgccatcgaaacgaacacatacaaacaaaataaccgtaaaaaaaaacaatcaacgataatactctaacgaattcgaattctactataataacgaaaaaaaactacgtatcacgttcgcgctaaactactataatcgtaaaacactacactaaacgatcactaccgacgacttcaacaataaaacaatacaaaacgtcatactaaaaacgataaaacgccgcttcgacaacgatcttccgtcgtctccaataaaataactaacgaataataattcatactaccgaactaataaaacacgccaattcgcccgaatattaaaacttaaaccgaaaaacacgacgatacga

SEQ ID NO: 17391 - DNA, 703 bp, Artificial Sequence
  chemically treated genomic DNA (Homo sapiens) CpG-island No: 17391
  unsure (11, 17, 23, 26, 33..34, 63)
tagtcgttgantatggnacgggntanaaaagtnngatagcgtacgtttttttatttgttcggnggatgggagtaagtttagttagtttattgttttcgggtgtcgcgtgcgtagttgtacgttattttagacgaatcgatgattggatggatggtcgtcgtagtcgttatattgatgatacggatgtgttttttcgtatatattatgtatcgagagttgttaacgtatggttatcgtcgggtatgggcgttgtcgtagataggtagaatttgatggtatgtttgcgattaatgttaaacgtgtttatcggattatgcgttagaatgcgttgttgtttgagcgaaaatttgttgtatcgttatcgaaacgggtatatataggtagagtggtcgtgaaagaaagtaattagcgatggtgttttgacgggttcgagttttgttgtgataacggagagagattgcgtgttacgttcgcgttggattgttgtgatcgtgaggtattgtattgggcggttattatcggcggttttaatagtgaaatagtataggacgttatgttgggagcggtggaacgtcgtttcggtaacgatttttcgtcgtttttagtggagtggttgacggataatggtttatgttatcgggttaatgaaatacgttagttcgttcggatgttgggatttgaatcgaagaatacggcggtgcgg

SEQ ID NO: 17392 - DNA, 703 bp, Artificial Sequence
  chemically treated genomic DNA (Homo sapiens) CpG-island No: 17392
  unsure (641, 670..671, 678, 681, 687, 693)
ccgcaccgccgtattcttcgattcaaatcccaacatccgaacgaactaacgtatttcattaacccgataacataaaccattatccgtcaaccactccactaaaaacgacgaaaaatcgttaccgaaacgacgttccaccgctcccaacataacgtcctatactatttcactattaaaaccgccgataataaccgcccaatacaatacctcacgatcacaacaatccaacgcgaacgtaacacgcaatctctctccgttatcacaacaaaactcgaacccgtcaaaacaccatcgctaattactttctttcacgaccactctacctatatatacccgtttcgataacgatacaacaaattttcgctcaaacaacaacgcattctaacgcataatccgataaacacgtttaacattaatcgcaaacataccatcaaattctacctatctacgacaacgcccatacccgacgataaccatacgttaacaactctcgatacataatatatacgaaaaaacacatccgtatcatcaatataacgactacgacgaccatccatccaatcatcgattcgtctaaaataacgtacaactacgcacgcgacacccgaaaacaataaactaactaaacttactcccatccnccgaacaaataaaaaaacgtacgctatcnnacttttntancccgtnccatantcaacgacta

SEQ ID NO: 17393 - DNA, 655 bp, Artificial Sequence
  chemically treated genomic DNA (Homo sapiens) CpG-island No: 17393
  unsure (92)
gggagcgtatgcggggtgggggtgtcgtcggggggtcgcgcgggatattcggcggggtgggggggattggggttttcgtgggcgtttattanggttcggcgcgttatcgtaagtttttcggtagtggtttaatttcgcgtggagtgtggttttagaagtcggggcgcgcggatatttgtcgggtttcgggggagtttgggttgttttaggcgtcgcgcgcgtatcgtcgttgggttttgggcgtttattcggttttttttcgcggggagcggtttttttgttttcgacgggcggcgcgagtttcggattcggtgcgcgcgttaaggcggtcgggcggttttgggtgatatgagcgtggttcggcgtttcggggattcgcgttttttcggtgttcgcggttttcgggggtagatggtcgggagtttgtattttggagttcggtcgtcgtcggagaggttttgggatagcgtagggtcgggggttttgggtttaaaatttttttaggagcggagggagggcgttttgtgtgggggtttttgcgcggttttgatggtcgagcggtgtgatttttggtaagtcgtttttttgataagtttttttgtagttagtggtaatgtttatattcgttgggttgtcggaaagatttaatgttgcg

SEQ ID NO: 17394 - DNA, 655 bp, Artificial Sequence
  chemically treated genomic DNA (Homo sapiens) CpG-island No: 17394
  unsure (564)
cgcaacattaaatctttccgacaacccaacgaatataaacattaccactaactacaaaaaaacttatcaaaaaaacgacttaccaaaaatcacaccgctcgaccatcaaaaccgcgcaaaaacccccacacaaaacgccctccctccgctcctaaaaaaattttaaacccaaaacccccgaccctacgctatcccaaaacctctccgacgacgaccgaactccaaaatacaaactcccgaccatctacccccgaaaaccgcgaacaccgaaaaaacgcgaatccccgaaacgccgaaccacgctcatatcacccaaaaccgcccgaccgccttaacgcgcgcaccgaatccgaaactcgcgccgcccgtcgaaaacaaaaaaaccgctccccgcgaaaaaaaaccgaataaacgcccaaaacccaacgacgatacgcgcgcgacgcctaaaacaacccaaactcccccgaaacccgacaaatatccgcgcgccccgacttctaaaaccacactccacgcgaaattaaaccactaccgaaaaacttacgataacgcgccgaaccntaataaacgcccacgaaaaccccaatcccccccaccccgccgaatatcccgcgcgaccccccgacgacacccccaccccgcatacgctccc

SEQ ID NO: 17395 - DNA, 655 bp, Artificial Sequence
  chemically treated genomic DNA (Homo sapiens) CpG-island No: 17395
  unsure (564)
cgtagtattagattttttcgataatttagcgggtgtagatattgttattgattgtaaaggagtttgttaggggagcgatttgttaaaggttatatcgttcggttattagaatcgcgtagaagtttttatataaagcgtttttttttcgtttttggagaggttttaaatttaggattttcggttttgcgttgttttaaggttttttcgacggcggtcgggttttagggtgtaggttttcggttatttattttcgggagtcgcggatatcgagggagcgcgagttttcgagacgtcgggttacgtttatgttatttaagatcgttcggtcgttttggcgcgcgtatcgggttcggagttcgcgtcgttcgtcgagggtagaggggtcgtttttcgcgggggagagtcgggtgggcgtttaggatttagcggcggtacgcgcgcgacgtttgaggtagtttagattttttcggagttcggtaggtgttcgcgcgtttcggtttttgaggttatattttacgcggggttgggttattgtcgggggatttgcggtggcgcgtcggattntggtgggcgtttacggggattttagttttttttatttcgtcgagtgtttcgcgcggtttttcggcgatatttttatttcgtatgcgttttt

SEQ ID NO: 17396 - DNA, 655 bp, Artificial Sequence
  chemically treated genomic DNA (Homo sapiens) CpG-island No: 17396
  unsure (92)
aaaaacgcatacgaaataaaaatatcgccgaaaaaccgcgcgaaacactcgacgaaataaaaaaaactaaaatccccgtaaacgcccaccanaatccgacgcgccaccgcaaatcccccgacaataacccaaccccgcgtaaaatataacctcaaaaaccgaaacgcgcgaacacctaccgaactccgaaaaaatctaaactacctcaaacgtcgcgcgcgtaccgccgctaaatcctaaacgcccacccgactctcccccgcgaaaaacgacccctctaccctcgacgaacgacgcgaactccgaacccgatacgcgcgccaaaacgaccgaacgatcttaaataacataaacgtaacccgacgtctcgaaaactcgcgctccctcgatatccgcgactcccgaaaataaataaccgaaaacctacaccctaaaacccgaccgccgtcgaaaaaaccttaaaacaacgcaaaaccgaaaatcctaaatttaaaacctctccaaaaacgaaaaaaaaacgctttatataaaaacttctacgcgattctaataaccgaacgatataacctttaacaaatcgctcccctaacaaactcctttacaatcaataacaatatctacacccgctaaattatcgaaaaaatctaatactacg

SEQ ID NO: 17397 - DNA, 662 bp, Artificial Sequence
  chemically treated genomic DNA (Homo sapiens) CpG-island No: 17397
cggttatttaattattttagcgagaggcgtcgggatttttgagtttgggtttatcgcgttggggttggtcgggagagtcgcggacgttcgtcgttatgacgtggggtatataagacgaattcggcgtttcgagggttcggcgcgttagggagtgtttgcgttggtcggggagtttgtttgcggcgttcggcgttggtttcgcggcgttgtttttcgttaggtttcgtttcgttgggtttagtggggtttttagcgtagtgagggttttcggtttcgcggcgtttttgttgtgttttttcgttgttcgttggttttcgcgcggaggggggatttcgttattttgacgtaaggagttcggggttgagcggcggaggcggcgaatagcgcgcgtttttaattattcgggagacggagttttatgttattagttttttatttggcggcgttttcggtagaggcggtgaaggcgcggttttttttggcggtttttaggagttataagtgggcgtacgggcgcggttttaagtcggggtatatcggatatatttattcgcggttatatttacgcgttttttatcgataatatatatagatatttacgtacgtagtggggggtacgtatagttatttttatatggttacgaaagtagttggaatttagg

SEQ ID NO: 17398 - DNA, 662 bp, Artificial Sequence
  chemically treated genomic DNA (Homo sapiens) CpG-island No: 17398
cctaaattccaactactttcgtaaccatataaaaataactatacgtaccccccactacgtacgtaaatatctatatatattatcgataaaaaacgcgtaaatataaccgcgaataaatatatccgatataccccgacttaaaaccgcgcccgtacgcccacttataactcctaaaaaccgccaaaaaaaaccgcgccttcaccgcctctaccgaaaacgccgccaaataaaaaactaataacataaaactccgtctcccgaataattaaaaacgcgcgctattcgccgcctccgccgctcaaccccgaactccttacgtcaaaataacgaaatcccccctccgcgcgaaaaccaacgaacaacgaaaaaacacaacaaaaacgccgcgaaaccgaaaaccctcactacgctaaaaaccccactaaacccaacgaaacgaaacctaacgaaaaacaacgccgcgaaaccaacgccgaacgccgcaaacaaactccccgaccaacgcaaacactccctaacgcgccgaaccctcgaaacgccgaattcgtcttatataccccacgtcataacgacgaacgtccgcgactctcccgaccaaccccaacgcgataaacccaaactcaaaaatcccgacgcctctcgctaaaataattaaataaccg

SEQ ID NO: 17399 - DNA, 662 bp, Artificial Sequence
  chemically treated genomic DNA (Homo sapiens) CpG-island No: 17399
tttggattttagttgttttcgtggttatgtgggggtggttgtgcgtgttttttattgcgtgcgtgggtgtttgtgtgtgttatcggtggggggcgcgtgagtgtggtcgcgggtgggtgtgttcgatgtgtttcggtttgggatcgcgttcgtgcgtttatttgtggtttttgggagtcgttagggggaatcgcgtttttatcgtttttgtcgaggacgtcgttagataggaggttgatgatatgaggtttcgtttttcgagtgattggaagcgcgcgttgttcgtcgttttcgtcgtttagtttcggattttttacgttagggtagcggggtttttttttcgcgcgggagttagcgaatagcgagagagtatagtagaggcgtcgcggagtcgggggtttttattgcgttaggagttttattaaatttagcggagcggagtttggcgggaggtagcgtcgcggagttagcgtcggacgtcgtaagtagatttttcggttagcgtaagtattttttggcgcgtcggattttcggggcgtcggattcgttttgtgtgttttacgttatgacggcgggcgttcgcggttttttcgattagttttagcgcggtgggtttaggtttagaggtttcggcgtttttcgttgaagtagttgggtagtcg

SEQ ID NO: 17400 - DNA, 662 bp, Artificial Sequence
  chemically treated genomic DNA (Homo sapiens) CpG-island No: 17400
cgactacccaactacttcaacgaaaaacgccgaaacctctaaacctaaacccaccgcgctaaaactaatcgaaaaaaccgcgaacgcccgccgtcataacgtaaaacacacaaaacgaatccgacgccccgaaaatccgacgcgccaaaaaatacttacgctaaccgaaaaatctacttacgacgtccgacgctaactccgcgacgctacctcccgccaaactccgctccgctaaatttaataaaactcctaacgcaataaaaacccccgactccgcgacgcctctactatactctctcgctattcgctaactcccgcgcgaaaaaaaaaccccgctaccctaacgtaaaaaatccgaaactaaacgacgaaaacgacgaacaacgcgcgcttccaatcactcgaaaaacgaaacctcatatcatcaacctcctatctaacgacgtcctcgacaaaaacgataaaaacgcgattccccctaacgactcccaaaaaccacaaataaacgcacgaacgcgatcccaaaccgaaacacatcgaacacacccacccgcgaccacactcacgcgccccccaccgataacacacacaaacacccacgcacgcaataaaaaacacgcacaaccacccccacataaccacgaaaacaactaaaatccaaa

SEQ ID NO: 17401 - DNA, 658 bp, Artificial Sequence
  chemically treated genomic DNA (Homo sapiens) CpG-island No: 17401
agcgcgattttaaattgttgatagtttttggttagcgatatcgggattaagttttgttacgatttttattgatgtttatttggtttatagcgcggatgtgttagaggttgtgttgttttgtgtgcggagcggcggtggcgtattatggggggtgcgttttgtcgcgttcgcggatgtggatgttttcgatcgtgcgtgcgggggggggggagacggggggtcgttgcgtggggggtcggcgcggatggcggtggggcggattcgggtttcggatgcgtcggtcggcgtcggcggcgtggttgcgcgggcgtcggtgcgggtcgtgggtcggcggcgtggcggaggcggcgtgcggcgtgggttggcggtggcgcgtgcggtggggggcgtggttcgggtttcgcgttcgtcgggcgcgtttggggcgcgtcgttcggcggggggcgtgtttgcggcggcgcgcgcgcggcgcggggggggcgtgcggcgtttttgattaattaaataatatatgtgtaattataggttacgacgggggcgttcggttgggtcggttcggcgttcggggttgtgcgggacgagtgtatgaggaggaaatatataaaaaaaataaaaaaaaaatggggtaggataggggtgggggacgcggtgtgcggtt

SEQ ID NO: 17402 - DNA, 658 bp, Artificial Sequence
  chemically treated genomic DNA (Homo sapiens) CpG-island No: 17402
aaccgcacaccgcgtcccccacccctatcctaccccattttttttttattttttttatatatttcctcctcatacactcgtcccgcacaaccccgaacgccgaaccgacccaaccgaacgcccccgtcgtaacctataattacacatatattatttaattaatcaaaaacgccgcacgccccccccgcgccgcgcgcgcgccgccgcaaacacgccccccgccgaacgacgcgccccaaacgcgcccgacgaacgcgaaacccgaaccacgccccccaccgcacgcgccaccgccaacccacgccgcacgccgcctccgccacgccgccgacccacgacccgcaccgacgcccgcgcaaccacgccgccgacgccgaccgacgcatccgaaacccgaatccgccccaccgccatccgcgccgaccccccacgcaacgaccccccgtctcccccccccccgcacgcacgatcgaaaacatccacatccgcgaacgcgacaaaacgcaccccccataatacgccaccgccgctccgcacacaaaacaacacaacctctaacacatccgcgctataaaccaaataaacatcaataaaaatcgtaacaaaacttaatcccgatatcgctaaccaaaaactatcaacaatttaaaatcgcgct

SEQ ID NO: 17403 - DNA, 658 bp, Artificial Sequence
  chemically treated genomic DNA (Homo sapiens) CpG-island No: 17403
agtcgtatatcgcgttttttatttttgttttattttattttttttttattttttttatatattttttttttatgtattcgtttcgtatagtttcgggcgtcgggtcggtttagtcgggcgttttcgtcgtggtttgtggttatatatatgttatttggttagttaaaggcgtcgtacgtttttttcgcgtcgcgcgcgcgtcgtcgtaggtacgtttttcgtcgggcggcgcgttttaggcgcgttcgacgggcgcggagttcgggttacgttttttatcgtacgcgttatcgttagtttacgtcgtacgtcgttttcgttacgtcgtcggtttacggttcgtatcggcgttcgcgtagttacgtcgtcgacgtcggtcggcgtattcgggattcgggttcgttttatcgttattcgcgtcgattttttacgtaacgatttttcgtttttttttttttcgtacgtacgatcggggatatttatattcgcgaacgcgatagagcgtattttttatgatgcgttatcgtcgtttcgtatatagagtagtatagtttttggtatattcgcgttgtgggttaaataggtattagtaggaatcgtggtagaatttaatttcgatatcgttaattaggggttgttagtagtttggggtcgcgtt

SEQ ID NO: 17404 - DNA, 658 bp, Artificial Sequence
  chemically treated genomic DNA (Homo sapiens) CpG-island No: 17404
aacgcgaccccaaactactaacaacccctaattaacgatatcgaaattaaattctaccacgattcctactaatacctatttaacccacaacgcgaatataccaaaaactatactactctatatacgaaacgacgataacgcatcataaaaaatacgctctatcgcgttcgcgaatataaatatccccgatcgtacgtacgaaaaaaaaaaaaacgaaaaatcgttacgtaaaaaatcgacgcgaataacgataaaacgaacccgaatcccgaatacgccgaccgacgtcgacgacgtaactacgcgaacgccgatacgaaccgtaaaccgacgacgtaacgaaaacgacgtacgacgtaaactaacgataacgcgtacgataaaaaacgtaacccgaactccgcgcccgtcgaacgcgcctaaaacgcgccgcccgacgaaaaacgtacctacgacgacgcgcgcgcgacgcgaaaaaaacgtacgacgcctttaactaaccaaataacatatatataaccacaaaccacgacgaaaacgcccgactaaaccgacccgacgcccgaaactatacgaaacgaatacataaaaaaaaaatatataaaaaaaataaaaaaaaaataaaataaaacaaaaataaaaaacgcgatatacgact

SEQ ID NO: 17405 - DNA, 574 bp, Artificial Sequence
  chemically treated genomic DNA (Homo sapiens) CpG-island No: 17405
  unsure (96, 100, 380)
gttgtttttaggttcgcggtagaattcgtggttcggtcgattatggcgtggtattttatagtgatatttcgcgtattaatgcgtatttcgagtggnaagnaggggcgcgtatattgtcgtttagtgtgggaggcgtttttcgtatttcggcgttttttttgcgtttttttattttttattttgcggttgtgtcggttcgtcggtgttattcgtggttatttcgttgggtttttggtggtcggcggggttcggttttaaggttgtttcggttgcggagggttttaaaaggttttttcgtaatgagggttcggtttgtttttaagcggtttttcgaaataattaggtcgttgtcgttggaatttttataagtttcgtttgtnggagtttatttaattttattcggaattatcgggaggaatatatttttataggagggggacggggtaattttaaaatttcgcggttattacggggggttaattaaatatcggtaacgaaggcgaaagtcgaagttgaaaagcgtcgtaaaatatgaagaagttatcggaaagattaaaaatgttatggggacgtt

SEQ ID NO: 17406 - DNA, 574 bp, Artificial Sequence
  chemically treated genomic DNA (Homo sapiens) CpG-island No: 17406
  unsure (195, 475, 479)
aacgtccccataacatttttaatctttccgataacttcttcatattttacgacgcttttcaacttcgactttcgccttcgttaccgatatttaattaaccccccgtaataaccgcgaaattttaaaattaccccgtccccctcctataaaaatatattcctcccgataattccgaataaaattaaataaactccnacaaacgaaacttataaaaattccaacgacaacgacctaattatttcgaaaaaccgcttaaaaacaaaccgaaccctcattacgaaaaaaccttttaaaaccctccgcaaccgaaacaaccttaaaaccgaaccccgccgaccaccaaaaacccaacgaaataaccacgaataacaccgacgaaccgacacaaccgcaaaataaaaaataaaaaaacgcaaaaaaaacgccgaaatacgaaaaacgcctcccacactaaacgacaatatacgcgcccctncttnccactcgaaatacgcattaatacgcgaaatatcactataaaataccacgccataatcgaccgaaccacgaattctaccgcgaacctaaaaacaac

SEQ ID NO: 17407 - DNA, 574 bp, Artificial Sequence
  chemically treated genomic DNA (Homo sapiens) CpG-island No: 17407
  unsure (195, 475, 479)
ggcgtttttatggtatttttggttttttcggtggtttttttatattttgcggcgttttttaatttcgattttcgttttcgttgtcgatgtttggttggtttttcgtggtggtcgcgggattttaaagttgtttcgttttttttttatgggaatatatttttttcggtggtttcgggtgaaattggatgagttttngtaagcggaatttgtgaaaattttaacggtagcggtttagttatttcgggaaatcgtttgaaggtaaatcgggtttttattacgggaaaattttttgaaatttttcgtaatcggggtagttttggaatcgggtttcgtcggttattaagggtttaacgggataattacggatggtatcgacggatcgatatagtcgtaggataaagagtggagaggcgtagaggaaacgtcgagatacgaggggcgttttttatattaggcgataatatacgcgtttttntttnttattcggagtgcgtattggtgcgcgaagtgttattgtaaagtgttacgttatggtcgatcgaattacgggttttgtcgcggatttggaaatagt

SEQ ID NO: 17408 - DNA, 574 bp, Artificial Sequence
  chemically treated genomic DNA (Homo sapiens) CpG-island No: 17408
  unsure (96, 100, 380)
actatttccaaatccgcgacaaaacccgtaattcgatcgaccataacgtaacactttacaataacacttcgcgcaccaatacgcactccgaataanaaanaaaaacgcgtatattatcgcctaatataaaaaacgcccctcgtatctcgacgtttcctctacgcctctccactctttatcctacgactatatcgatccgtcgataccatccgtaattatcccgttaaacccttaataaccgacgaaacccgattccaaaactaccccgattacgaaaaatttcaaaaaattttcccgtaataaaaacccgatttaccttcaaacgatttcccgaaataactaaaccgctaccgttaaaattttcacaaattccgcttacnaaaactcatccaatttcacccgaaaccaccgaaaaaaatatattcccataaaaaaaaaacgaaacaactttaaaatcccgcgaccaccacgaaaaaccaaccaaacatcgacaacgaaaacgaaaatcgaaattaaaaaacgccgcaaaatataaaaaaaccaccgaaaaaaccaaaaataccataaaaacgcc

SEQ ID NO: 17409 - DNA, 602 bp, Artificial Sequence
  chemically treated genomic DNA (Homo sapiens) CpG-island No: 17409
tgcggatgggagagattgagcgcggaaataacgggtattaggatggggggatgaaggggtagtaaaagtaggtggtaggttcggaagaatgggcggtgggagtacgtagaatcggtagatacggagttgtaggagataggcgtgaattacgtcggataggggacggtattatgaataaggtcgtaaagtggatatagcgcgtttttgtttgatagagaagagaggtacgttcgtacgacggagggtattacgagtttttaggggaggtgcgagtgggtagcgcgcgagtcgtagttagaaaaatgattttaggcgaattgacgtatagggaggttgtcgggtcgtttgtgcgggtaaaaagcgcggcgacgtttgttataacgcgatacgggcgacgtagttatatgattacgggcgatcgaggggttagagggtgtgttatagcgagaatagtttgtagcgttggagaggttgggcgtgcgtttgatcgtgatagatttgtcggtgttggttgtaaattaggtcgtgggttggatttattgggtcgaatttaggtcgacgggtgggggtaggtcgttgtttgcgatgatcggttatggggt

SEQ ID NO: 17410 - DNA, 602 bp, Artificial Sequence
  chemically treated genomic DNA (Homo sapiens) CpG-island No: 17410
accccataaccgatcatcgcaaacaacgacctacccccacccgtcgacctaaattcgacccaataaatccaacccacgacctaatttacaaccaacaccgacaaatctatcacgatcaaacgcacgcccaacctctccaacgctacaaactattctcgctataacacaccctctaacccctcgatcgcccgtaatcatataactacgtcgcccgtatcgcgttataacaaacgtcgccgcgctttttacccgcacaaacgacccgacaacctccctatacgtcaattcgcctaaaatcatttttctaactacgactcgcgcgctacccactcgcacctcccctaaaaactcgtaataccctccgtcgtacgaacgtacctctcttctctatcaaacaaaaacgcgctatatccactttacgaccttattcataataccgtcccctatccgacgtaattcacgcctatctcctacaactccgtatctaccgattctacgtactcccaccgcccattcttccgaacctaccacctacttttactaccccttcatccccccatcctaatacccgttatttccgcgctcaatctctcccatccgca

SEQ ID NO: 17411 - DNA, 602 bp, Artificial Sequence
  chemically treated genomic DNA (Homo sapiens) CpG-island No: 17411
attttatggtcggttatcgtaagtagcggtttgtttttattcgtcggtttaggttcggtttagtgggtttagtttacggtttggtttgtagttagtatcgataagtttgttacggttaagcgtacgtttagtttttttagcgttgtaggttattttcgttgtggtatattttttggtttttcggtcgttcgtaattatatggttgcgtcgttcgtatcgcgttgtggtaaacgtcgtcgcgttttttgttcgtataggcggttcggtagtttttttgtacgttagttcgtttggggttatttttttagttgcggttcgcgcgttgtttattcgtattttttttaaaggttcgtagtatttttcgtcgtacgaacgtgttttttttttttgttaggtaagggcgcgttgtatttattttgcggttttatttataatgtcgttttttgttcggcgtggtttacgtttgttttttgtaatttcgtatttatcgattttacgtgtttttatcgtttattttttcgaatttgttatttgtttttattgtttttttatttttttattttaatgttcgttgttttcgcgtttagttttttttattcgta

SEQ ID NO: 17412 - DNA, 602 bp, Artificial Sequence
  chemically treated genomic DNA (Homo sapiens) CpG-island No: 17412
tacgaataaaaaaaactaaacgcgaaaacaacgaacattaaaataaaaaaataaaaaaacaataaaaacaaataacaaattcgaaaaaataaacgataaaaacacgtaaaatcgataaatacgaaattacaaaaaacaaacgtaaaccacgccgaacaaaaaacgacattataaataaaaccgcaaaataaatacaacgcgcccttacctaacaaaaaaaaaaaacacgttcgtacgacgaaaaatactacgaacctttaaaaaaaatacgaataaacaacgcgcgaaccgcaactaaaaaaataaccccaaacgaactaacgtacaaaaaaactaccgaaccgcctatacgaacaaaaaacgcgacgacgtttaccacaacgcgatacgaacgacgcaaccatataattacgaacgaccgaaaaaccaaaaaatataccacaacgaaaataacctacaacgctaaaaaaactaaacgtacgcttaaccgtaacaaacttatcgatactaactacaaaccaaaccgtaaactaaacccactaaaccgaacctaaaccgacgaataaaaacaaaccgctacttacgataaccgaccataaaat

SEQ ID NO: 17413 - DNA, 913 bp, Artificial Sequence
  chemically treated genomic DNA (Homo sapiens) CpG-island No: 17413
agggtcgcgaaagaggtcgggatcggagcggggtaggtcgtgtggttcgtattttagcgttatagtttagtttcgtattggttttatcgtaggggggatggggttggaacgggcgttcgttttcgggtatcggcgtcgtcggttaaggtagggtaaaaattaacgttgtcgttggcgggaggtagtggaagggattcgtttcgtaagtaagatttcgggagttttagtcgtcgtcgtttcgttttcgagcgcgttatttttaggtttcggttttttaggcgtcgtttttaggttttcgcgggttttcgtttttcgtcgattcggttgagcgtaggacggtcgttattttgacggtttcgatttcgtcggtttcgtagtcgtcgtacggggttcgcgtacgttcgttttattttttgtcgtcgtcgaagttgttgtaggttcgatcgtcgtaggtgtcgaagttcgttatttgtcgttttcgtttcgagaggaattagggtgagcgaggaaggatttcgtaatataattttttttcgtcgtcgtcgggttgttcgtcgcgtcgtttgatcgtaaatttttttggacgtaaggtacgggtagcggtcgtcgaacgtacgtacggacgttgcgcgtagcgttacgttttgggtttaacgtagttgtttgtttcgtgcgtttgtagtttacgtggtgcggcgagttttagttggacgtttgttcgtttacgcggtttattatgtgttggttttggggtgcgttcgtggttgttttttattttcgtcgtattacgttcgtgcgcgtcggttttttcgttcgtcggcgggaggtgatttggagagttggggggaattttttttttagttcgtttgggaacgttgtttttcggtttttatatatggcggggatttcggag

SEQ ID NO: 17414 - DNA, 913 bp, Artificial Sequence
  chemically treated genomic DNA (Homo sapiens) CpG-island No: 17414
ctccgaaatccccgccatatataaaaaccgaaaaacaacgttcccaaacgaactaaaaaaaaaattccccccaactctccaaatcacctcccgccgacgaacgaaaaaaccgacgcgcacgaacgtaatacgacgaaaataaaaaacaaccacgaacgcaccccaaaaccaacacataataaaccgcgtaaacgaacaaacgtccaactaaaactcgccgcaccacgtaaactacaaacgcacgaaacaaacaactacgttaaacccaaaacgtaacgctacgcgcaacgtccgtacgtacgttcgacgaccgctacccgtaccttacgtccaaaaaaatttacgatcaaacgacgcgacgaacaacccgacgacgacgaaaaaaaattatattacgaaatccttcctcgctcaccctaattcctctcgaaacgaaaacgacaaataacgaacttcgacacctacgacgatcgaacctacaacaacttcgacgacgacaaaaaataaaacgaacgtacgcgaaccccgtacgacgactacgaaaccgacgaaatcgaaaccgtcaaaataacgaccgtcctacgctcaaccgaatcgacgaaaaacgaaaacccgcgaaaacctaaaaacgacgcctaaaaaaccgaaacctaaaaataacgcgctcgaaaacgaaacgacgacgactaaaactcccgaaatcttacttacgaaacgaatcccttccactacctcccgccaacgacaacgttaatttttaccctaccttaaccgacgacgccgatacccgaaaacgaacgcccgttccaaccccatcccccctacgataaaaccaatacgaaactaaactataacgctaaaatacgaaccacacgacctaccccgctccgatcccgacctctttcgcgaccct

SEQ ID NO: 17415 - DNA, 913 bp, Artificial Sequence
  chemically treated genomic DNA (Homo sapiens) CpG-island No: 17415
tttcgaggttttcgttatgtatggaggtcgaaaggtagcgtttttaggcgaattggagagggagttttttttagttttttaggttatttttcgtcgacggacggaaaggtcggcgcgtacgggcgtggtgcggcggggataggaggtagttacgggcgtattttagggttagtatataatgggtcgcgtaggcgggtaggcgtttagttgggattcgtcgtattacgtgggttgtagacgtacggggtaggtagttgcgttgggtttagggcgtggcgttgcgcgtagcgttcgtgcgtgcgttcgacggtcgttgttcgtgttttgcgtttaaggggatttgcgattaggcggcgcggcggatagttcggcggcggcgaaggggagttatattgcggggttttttttcgtttattttggtttttttcggagcggagacggtaaatggcggatttcgatatttacgacgatcgggtttatagtagtttcggcggcggtagagggtgaggcgggcgtgcgcgggtttcgtacggcggttgcgggatcggcggagtcgaggtcgttagggtggcggtcgttttgcgtttagtcgggtcggcgggaggcgggagttcgcggaggtttaggagcggcgtttggagggtcggggtttggaaatggcgcgttcggagacggggcggcggcggttggggttttcggggttttgtttgcggggcggattttttttattgtttttcgttaacgataacgttggtttttgttttgttttggtcggcggcgtcgatgttcggagacgagcgttcgttttagttttattttttttacggtaggattagtgcggggttgagttgtggcgttggggtacgggttatacggtttgtttcgtttcggtttcggtttttttcgcggtttt

SEQ ID NO: 17416 - DNA, 913 bp, Artificial Sequence
  chemically treated genomic DNA (Homo sapiens) CpG-island No: 17416
aaaaccgcgaaaaaaaccgaaaccgaaacgaaacaaaccgtataacccgtaccccaacgccacaactcaaccccgcactaatcctaccgtaaaaaaaataaaactaaaacgaacgctcgtctccgaacatcgacgccgccgaccaaaacaaaacaaaaaccaacgttatcgttaacgaaaaacaataaaaaaaatccgccccgcaaacaaaaccccgaaaaccccaaccgccgccgccccgtctccgaacgcgccatttccaaaccccgaccctccaaacgccgctcctaaacctccgcgaactcccgcctcccgccgacccgactaaacgcaaaacgaccgccaccctaacgacctcgactccgccgatcccgcaaccgccgtacgaaacccgcgcacgcccgcctcaccctctaccgccgccgaaactactataaacccgatcgtcgtaaatatcgaaatccgccatttaccgtctccgctccgaaaaaaaccaaaataaacgaaaaaaaaccccgcaatataactccccttcgccgccgccgaactatccgccgcgccgcctaatcgcaaatccccttaaacgcaaaacacgaacaacgaccgtcgaacgcacgcacgaacgctacgcgcaacgccacgccctaaacccaacgcaactacctaccccgtacgtctacaacccacgtaatacgacgaatcccaactaaacgcctacccgcctacgcgacccattatatactaaccctaaaatacgcccgtaactacctcctatccccgccgcaccacgcccgtacgcgccgacctttccgtccgtcgacgaaaaataacctaaaaaactaaaaaaaactccctctccaattcgcctaaaaacgctacctttcgacctccatacataacgaaaacctcgaaa

SEQ ID NO: 17417 - DNA, 507 bp, Artificial Sequence
  chemically treated genomic DNA (Homo sapiens) CpG-island No: 17417
gggacggtgagaaacgggaatcgagtaagcgtagaaataaatagatgttaatggaggcgtgaaggttattgcgtttttatttttcgaattgtcgtaaagagttttagtgtcgtgtttttttcggtaggggaggaattggttaggcggcggcggcggcgaagcggcggcggcggttgtaggggagtagcggtagtggcggcgacggcgaggaggtgttcggtttgcgtagcgtagaaacgttcgtagttttagagaaggagtttttgtgggattaaattaggtattttgaatttacgtcggtttagttgggtcgagtttaggcgttgtcgtacgtatagttttggtggcggtgatagatattgtttttgattttaggggtttattaggtcgacgtttgaggcgtagatcgttggttttcgacgtattattttttacgttttatatttttgtttttttttttgggttagtgattttcggattttggaagagaagagggtggttaatgat

SEQ ID NO: 17418 - DNA, 507 bp, Artificial Sequence
  chemically treated genomic DNA (Homo sapiens) CpG-island No: 17418
atcattaaccaccctcttctcttccaaaatccgaaaatcactaacccaaaaaaaaaaacaaaaatataaaacgtaaaaaataatacgtcgaaaaccaacgatctacgcctcaaacgtcgacctaataaacccctaaaatcaaaaacaatatctatcaccgccaccaaaactatacgtacgacaacgcctaaactcgacccaactaaaccgacgtaaattcaaaatacctaatttaatcccacaaaaactccttctctaaaactacgaacgtttctacgctacgcaaaccgaacacctcctcgccgtcgccgccactaccgctactcccctacaaccgccgccgccgcttcgccgccgccgccgcctaaccaattcctcccctaccgaaaaaaacacgacactaaaactctttacgacaattcgaaaaataaaaacgcaataaccttcacgcctccattaacatctatttatttctacgcttactcgattcccgtttctcaccgtccc

SEQ ID NO: 17419 - DNA, 507 bp, Artificial Sequence
  chemically treated genomic DNA (Homo sapiens) CpG-island No: 17419
attattagttattttttttttttttagggttcgggaattattgatttaggaaggaagatagaaatgtaaggcgtaaagagtaatgcgtcgagagttagcgatttgcgttttagacgtcggtttaataggtttttagagttaagaatagtgtttgttatcgttattaaaattgtacgtgcggtagcgtttggattcggtttagttaagtcggcgtgggtttagaatgtttaatttggttttataagaattttttttttgaagttgcgggcgtttttacgttgcgtaaatcgaatattttttcgtcgtcgtcgttattgtcgttgtttttttatagtcgtcgtcgtcgtttcgtcgtcgtcgtcgtttaattaattttttttttatcgaggagagtacgatattagggttttttacgatagttcggaaagtgagagcgtagtagtttttacgtttttattaatatttgtttgtttttgcgtttgttcgattttcgttttttatcgtttt

SEQ ID NO: 17420 - DNA, 507 bp, Artificial Sequence
  chemically treated genomic DNA (Homo sapiens) CpG-island No: 17420
aaaacgataaaaaacgaaaatcgaacaaacgcaaaaacaaacaaatattaataaaaacgtaaaaactactacgctctcactttccgaactatcgtaaaaaaccctaatatcgtactctcctcgataaaaaaaaaattaattaaacgacgacgacgacgaaacgacgacgacgactataaaaaaacaacgacaataacgacgacgacgaaaaaatattcgatttacgcaacgtaaaaacgcccgcaacttcaaaaaaaaaattcttataaaaccaaattaaacattctaaacccacgccgacttaactaaaccgaatccaaacgctaccgcacgtacaattttaataacgataacaaacactattcttaactctaaaaacctattaaaccgacgtctaaaacgcaaatcgctaactctcgacgcattactctttacgccttacatttctatcttccttcctaaatcaataattcccgaaccctaaaaaaaaaaaaaataactaataat

SEQ ID NO: 17421 - DNA, 1158 bp, Artificial Sequence
  chemically treated genomic DNA (Homo sapiens) CpG-island No: 17421
acgcggggggatttcggagtatagttttcgtatttttttacgattttcgatttttgattttcggattaggacggtaagggagtgcggcgattaaggttgggagatcgcggagagaaggcgcgcggtatttgtttgtttagcgcgtttcggacgtttttttgttcggcgtcggttttgggtggcgcgggcgttcgttcgtagttgtagttttttaggaggtatatgtcgcgggcggtagttttgttcgttttcgaagtagaagagtatattttggtagagggcgaattatttttcgtgttagcggttcgtttcggtcgtttttttatttaggaagtcgcgtttggtgttttttttgcgcgttagaaaggttaggtatagggcgtgtttttcgttgtagcgtacgtttttttgtatggtgcgggtgcggagggtttacgggtggtcgtcggttttatttttgtttcgcggttatggtttagttggttttttcgagggcgcgatcgtttaggtttcggtcggcgaagggcgttttttttttttacgtcgcgcgtagggtatttcgttcgttttcgggaggtcgcggcgcgcgtggtaggggcgcgggttggggcgaggtacgtttttcgttttaattattattttttcggtcgagttttcggagttttttaagtttttaacgttcgcgtggagcgcggtttcgcgaggcgttcgagtcggtcgtcgtttcgtttaaagttgcgggagtcgagttttcgcggcgggttggggcggtagtcggggaaggattgttttcgggtaacgcgtttcgggagatagaaggtaaaacgttacgtgggagtttagttgtaatcggtttggagatcgatttaaagggtaaagtcggcgcggcgtcggcggtggcgtagttcgtttgtttcggttcgcgtttttttttcgttcgtttcgttcgggtcgttgtttttgttcgggcgtcgtcgggatggggcggattagggaggtggaggcgttcggtcgtattatatattcgtttatacgcgttcgtatattcgcgtataacgcgcgtatatatatacgtatatttatatatacgtagattagtatatttatttagatttataatgtatatatttagacgtataaaaatatatttataaatgt

SEQ ID NO: 17422 - DNA, 1158 bp, Artificial Sequence
  chemically treated genomic DNA (Homo sapiens) CpG-island No: 17422
acatttataaatatatttttatacgtctaaatatatacattataaatctaaataaatatactaatctacgtatatataaatatacgtatatatatacgcgcgttatacgcgaatatacgaacgcgtataaacgaatatataatacgaccgaacgcctccacctccctaatccgccccatcccgacgacgcccgaacaaaaacaacgacccgaacgaaacgaacgaaaaaaaaacgcgaaccgaaacaaacgaactacgccaccgccgacgccgcgccgactttaccctttaaatcgatctccaaaccgattacaactaaactcccacgtaacgttttaccttctatctcccgaaacgcgttacccgaaaacaatccttccccgactaccgccccaacccgccgcgaaaactcgactcccgcaactttaaacgaaacgacgaccgactcgaacgcctcgcgaaaccgcgctccacgcgaacgttaaaaacttaaaaaactccgaaaactcgaccgaaaaaataataattaaaacgaaaaacgtacctcgccccaacccgcgcccctaccacgcgcgccgcgacctcccgaaaacgaacgaaataccctacgcgcgacgtaaaaaaaaaaaacgcccttcgccgaccgaaacctaaacgatcgcgccctcgaaaaaaccaactaaaccataaccgcgaaacaaaaataaaaccgacgaccacccgtaaaccctccgcacccgcaccatacaaaaaaacgtacgctacaacgaaaaacacgccctatacctaacctttctaacgcgcaaaaaaaacaccaaacgcgacttcctaaataaaaaaacgaccgaaacgaaccgctaacacgaaaaataattcgccctctaccaaaatatactcttctacttcgaaaacgaacaaaactaccgcccgcgacatatacctcctaaaaaactacaactacgaacgaacgcccgcgccacccaaaaccgacgccgaacaaaaaaacgtccgaaacgcgctaaacaaacaaataccgcgcgccttctctccgcgatctcccaaccttaatcgccgcactcccttaccgtcctaatccgaaaatcaaaaatcgaaaatcgtaaaaaaatacgaaaactatactccgaaatccccccgcgt

SEQ ID NO: 17423 - DNA, 1158 bp, Artificial Sequence
  chemically treated genomic DNA (Homo sapiens) CpG-island No: 17423
gtatttgtgagtgtatttttgtgcgtttgagtgtgtgtattgtggatttgggtgaatgtattggtttgcgtgtgtgtgggtgtgcgtgtgtgtgtgcgcgcgttgtgcgcgagtgtgcgagcgcgtgtgagcgggtgtgtggtgcggtcgggcgtttttatttttttgattcgttttatttcggcggcgttcgagtagaggtagcggttcgggcggggcgggcgagggagggacgcgagtcggggtaagcgggttgcgttatcgtcggcgtcgcgtcgattttgttttttaaatcggtttttaagtcgattatagttgagtttttacgtgacgttttattttttgtttttcggagcgcgttgttcgaggatagttttttttcggttgtcgttttagttcgtcgcgggggttcggttttcgtaattttgggcgaagcggcggtcggttcgggcgtttcgcggggtcgcgttttacgcgggcgttgggggtttggggggtttcgggggttcggtcgggagggtggtggttagggcggagagcgtgtttcgttttagttcgcgtttttgttacgcgcgtcgcggtttttcgaaagcgggcggggtgttttgcgcgcggcgtggggaaagggggcgtttttcgtcggtcgggatttgagcggtcgcgttttcgagggagttagttgggttatggtcgcgaggtaggggtgagatcggcggttattcgtgagtttttcgtattcgtattatgtagaagagcgtgcgttataacgaggggtacgttttgtatttggtttttttggcgcgtaaggagggtattaagcgcggttttttgagtaagaagacggtcgaggcgagtcgttggtacgagaagtggttcgttttttattagaatgtgtttttttatttcgagggcgagtagagttgtcgttcgcggtatgtattttttggagggttgtagttgcgaacgaacgttcgcgttatttagggtcggcgtcgggtagggaggcgttcgagacgcgttggataagtaggtatcgcgcgtttttttttcgcggttttttagttttgatcgtcgtatttttttgtcgttttaattcggggattaggggtcgggggtcgtgaaagagtgcggggattatgtttcgaaattttttcgcgt

SEQ ID NO: 17424 - DNA, 1158 bp, Artificial Sequence
  chemically treated genomic DNA (Homo sapiens) CpG-island No: 17424
acgcgaaaaaatttcgaaacataatccccgcactctttcacgacccccgacccctaatccccgaattaaaacgacaaaaaaatacgacgatcaaaactaaaaaaccgcgaaaaaaaaacgcgcgatacctacttatccaacgcgtctcgaacgcctccctacccgacgccgaccctaaataacgcgaacgttcgttcgcaactacaaccctccaaaaaatacataccgcgaacgacaactctactcgccctcgaaataaaaaaacacattctaataaaaaacgaaccacttctcgtaccaacgactcgcctcgaccgtcttcttactcaaaaaaccgcgcttaataccctccttacgcgccaaaaaaaccaaatacaaaacgtacccctcgttataacgcacgctcttctacataatacgaatacgaaaaactcacgaataaccgccgatctcacccctacctcgcgaccataacccaactaactccctcgaaaacgcgaccgctcaaatcccgaccgacgaaaaacgccccctttccccacgccgcgcgcaaaacaccccgcccgctttcgaaaaaccgcgacgcgcgtaacaaaaacgcgaactaaaacgaaacacgctctccgccctaaccaccaccctcccgaccgaacccccgaaaccccccaaacccccaacgcccgcgtaaaacgcgaccccgcgaaacgcccgaaccgaccgccgcttcgcccaaaattacgaaaaccgaacccccgcgacgaactaaaacgacaaccgaaaaaaaactatcctcgaacaacgcgctccgaaaaacaaaaaataaaacgtcacgtaaaaactcaactataatcgacttaaaaaccgatttaaaaaacaaaatcgacgcgacgccgacgataacgcaacccgcttaccccgactcgcgtccctccctcgcccgccccgcccgaaccgctacctctactcgaacgccgccgaaataaaacgaatcaaaaaaataaaaacgcccgaccgcaccacacacccgctcacacgcgctcgcacactcgcgcacaacgcgcgcacacacacacgcacacccacacacacgcaaaccaatacattcacccaaatccacaatacacacactcaaacgcacaaaaatacactcacaaatac

SEQ ID NO: 17425 - DNA, 583 bp, Artificial Sequence
  chemically treated genomic DNA (Homo sapiens) CpG-island No: 17425
cgtcgaatttgcggtcgattagtcgtttcgcgttaaatacggtgttttgcgggtttagcgttatttggtttttggtcgtattttcgatgagtcgttcggtgttcgtgaaggttacgtagttgggggtggtgcggttgttttggtcgttggcgatgatttttattttgtcgtgttggaatatttttacgtaggagtaggtggtgtttaggtcgatgtcgatcgtcgcggttttggttatgtcggtgttttgttttgtgggtttcgttttgagattgggggttggaaacggcggacgggattcgcgataagagtttagtttttcggaacgtcggaaatttaatacgtcggtgtttgtagtcgtataggttcgttttggaaagttttgggatcgcgggagttattttcgaaagacgaagcggattttcgtagtagttttttaggttggtcgtttttcggatcgcgcgtttttcggtttttataagtcgtcgtggagattcgtttttttttttttgagttaattattaagttcgatgaggttgttaggtcgggaatattttaggggtttcgtttttcgttttgtttt

SEQ ID NO: 17426 - DNA, 583 bp, Artificial Sequence
  chemically treated genomic DNA (Homo sapiens) CpG-island No: 17426
aaaacaaaacgaaaaacgaaacccctaaaatattcccgacctaacaacctcatcgaacttaataattaactcaaaaaaaaaaaaacgaatctccacgacgacttataaaaaccgaaaaacgcgcgatccgaaaaacgaccaacctaaaaaactactacgaaaatccgcttcgtctttcgaaaataactcccgcgatcccaaaactttccaaaacgaacctatacgactacaaacaccgacgtattaaatttccgacgttccgaaaaactaaactcttatcgcgaatcccgtccgccgtttccaacccccaatctcaaaacgaaacccacaaaacaaaacaccgacataaccaaaaccgcgacgatcgacatcgacctaaacaccacctactcctacgtaaaaatattccaacacgacaaaataaaaatcatcgccaacgaccaaaacaaccgcaccacccccaactacgtaaccttcacgaacaccgaacgactcatcgaaaatacgaccaaaaaccaaataacgctaaacccgcaaaacaccgtatttaacgcgaaacgactaatcgaccgcaaattcgacg

SEQ ID NO: 17427 - DNA, 583 bp, Artificial Sequence
  chemically treated genomic DNA (Homo sapiens) CpG-island No: 17427
ggggtaggacgggaggcgaaatttttggaatattttcgatttggtagttttatcgagtttggtgattggtttagaaggggaaaggcgggtttttacgacgatttataaaagtcgaggggcgcgcggttcggaaaacggttagtttgaggagttgttgcgagggttcgtttcgtttttcgagagtgattttcgcggttttaaggttttttagagcgaatttgtgcggttgtaggtatcggcgtgttgagttttcggcgtttcgaaggattgagtttttgtcgcggatttcgttcgtcgtttttagtttttagttttagagcggagtttatagagtagggtatcggtatggttaaagtcgcggcgatcggtatcgatttgggtattatttatttttgcgtgggggtgttttaatacggtaaggtggagattatcgttaacgattagggtaatcgtattatttttagttacgtggtttttacggatatcgagcggtttatcggggatgcggttaagaattaggtggcgttgaattcgtagaatatcgtgtttgacgcgaagcggttgatcggtcgtaagttcggcg

SEQ ID NO: 17428 - DNA, 583 bp, Artificial Sequence
  chemically treated genomic DNA (Homo sapiens) CpG-island No: 17428
cgccgaacttacgaccgatcaaccgcttcgcgtcaaacacgatattctacgaattcaacgccacctaattcttaaccgcatccccgataaaccgctcgatatccgtaaaaaccacgtaactaaaaataatacgattaccctaatcgttaacgataatctccaccttaccgtattaaaacacccccacgcaaaaataaataatacccaaatcgataccgatcgccgcgactttaaccataccgataccctactctataaactccgctctaaaactaaaaactaaaaacgacgaacgaaatccgcgacaaaaactcaatccttcgaaacgccgaaaactcaacacgccgatacctacaaccgcacaaattcgctctaaaaaaccttaaaaccgcgaaaatcactctcgaaaaacgaaacgaaccctcgcaacaactcctcaaactaaccgttttccgaaccgcgcgcccctcgacttttataaatcgtcgtaaaaacccgcctttccccttctaaaccaatcaccaaactcgataaaactaccaaatcgaaaatattccaaaaatttcgcctcccgtcctacccc

SEQ ID NO: 17429 - DNA, 595 bp, Artificial Sequence
  chemically treated genomic DNA (Homo sapiens) CpG-island No: 17429
cgtcgaatttgcggtcgattagtcgtttcgcgttaaatacggtgttttgcgggtttagcgttatttggtttttggtcgtattttcgatgagtcgttcggtgttcgtgaaggttacgtagttgggggtggtgcggttgttttggtcgttggcgatgatttttattttgtcgtgttggaatatttttacgtaggagtaggtggtgtttaggtcgatgtcgatcgtcgcggttttggttatgtcggttttttgttttttgtcggttcggttttgagattgggggttggaaacggaatattggattcgcgagaagagttcggttttttcggacgtcggaaattcgacgcgtcggtgtttgtagtcgtataggttcgttttgggaagttttgggataacgggagttattttcgaaaaaggtagtggattgtcgtagtagttttttaggttagtcgttattcggatcgtttgtttttgggtttttataagtcgttacggagattcgtttttttttttttgagttaattatcgagttcgatgaggttgttaggtcgggaatattttaggggtttcgtttttcgttttgttttttagtttttt

SEQ ID NO: 17430 - DNA, 595 bp, Artificial Sequence
  chemically treated genomic DNA (Homo sapiens) CpG-island No: 17430
aaaaaactaaaaaacaaaacgaaaaacgaaacccctaaaatattcccgacctaacaacctcatcgaactcgataattaactcaaaaaaaaaaaaacgaatctccgtaacgacttataaaaacccaaaaacaaacgatccgaataacgactaacctaaaaaactactacgacaatccactacctttttcgaaaataactcccgttatcccaaaacttcccaaaacgaacctatacgactacaaacaccgacgcgtcgaatttccgacgtccgaaaaaaccgaactcttctcgcgaatccaatattccgtttccaacccccaatctcaaaaccgaaccgacaaaaaacaaaaaaccgacataaccaaaaccgcgacgatcgacatcgacctaaacaccacctactcctacgtaaaaatattccaacacgacaaaataaaaatcatcgccaacgaccaaaacaaccgcaccacccccaactacgtaaccttcacgaacaccgaacgactcatcgaaaatacgaccaaaaaccaaataacgctaaacccgcaaaacaccgtatttaacgcgaaacgactaatcgaccgcaaattcgacg

SEQ ID NO: 17431 - DNA, 595 bp, Artificial Sequence
  chemically treated genomic DNA (Homo sapiens) CpG-island No: 17431
ggaaggttggggggtaggacgggaggcgaaatttttggaatattttcgatttggtagttttatcgagttcggtgattggtttagaagggaaaaggcgggttttcgtgacgatttataaaagtttaggggtaagcggttcggataacggttagtttgaggagttgttgcgatagtttattatttttttcgagagtgattttcgttgttttaaggttttttagagcgaatttgtgcggttgtaggtatcggcgcgtcgagttttcggcgttcggaaggatcgagtttttttcgcggatttagtgtttcgtttttagtttttaattttagagtcgagtcgatagagagtagggaatcggtatggttaaagtcgcggcgatcggtatcgatttgggtattatttatttttgcgtgggggtgttttaatacggtaaggtggagattatcgttaacgattagggtaatcgtattatttttagttacgtggtttttacggatatcgagcggtttatcggggatgcggttaagaattaggtggcgttgaattcgtagaatatcgtgtttgacgcgaagcggttgatcggtcgtaagttcggcg

SEQ ID NO: 17432 - DNA, 595 bp, Artificial Sequence
  chemically treated genomic DNA (Homo sapiens) CpG-island No: 17432
cgccgaacttacgaccgatcaaccgcttcgcgtcaaacacgatattctacgaattcaacgccacctaattcttaaccgcatccccgataaaccgctcgatatccgtaaaaaccacgtaactaaaaataatacgattaccctaatcgttaacgataatctccaccttaccgtattaaaacacccccacgcaaaaataaataatacccaaatcgataccgatcgccgcgactttaaccataccgattccctactctctatcgactcgactctaaaattaaaaactaaaaacgaaacactaaatccgcgaaaaaaactcgatccttccgaacgccgaaaactcgacgcgccgatacctacaaccgcacaaattcgctctaaaaaaccttaaaacaacgaaaatcactctcgaaaaaaataataaactatcgcaacaactcctcaaactaaccgttatccgaaccgcttacccctaaacttttataaatcgtcacgaaaacccgccttttcccttctaaaccaatcaccgaactcgataaaactaccaaatcgaaaatattccaaaaatttcgcctcccgtcctaccccccaaccttcc

SEQ ID NO: 17433 - DNA, 569 bp, Artificial Sequence
  chemically treated genomic DNA (Homo sapiens) CpG-island No: 17433
gtcgttttcgttattcggtcgaggattcgtataaggtgttcgtggcggcgtttgacgggagcgtcgtgtttaggggtgttttttcgttttgcgttcgcgtttagcgtttcgcgtttcgcgttgtttttcgtgagatcggcgggcggcgagtcgcgcggttttcggggtagtgtcggatacggcgggcgcgtattcgtaggcggggtacggtcgttttcgttaggattcgtaggttcggaaacgttttttgttataaaggggggaatacgtgggcgtcggttgtcggggcggcgattttagggaattagggttatttggagagtcgtttatcgtttttgttcgttcgattttttcgttcgggtcgttcggtcggtttagtcgcggtcggcgtttggttgtgaggtggattttcggtttagtttgattatttttttttagtacgtatacgcggttcgaattcgtatttaattagacgtcgattcgtttttgagagttttttatatttttcgaagtttcgcgatggtggatagttttttttttttaggaattttttattgatattgtttttt

SEQ ID NO: 17434 - DNA, 569 bp, Artificial Sequence
  chemically treated genomic DNA (Homo sapiens) CpG-island No: 17434
aaaaaacaatatcaataaaaaattcctaaaaaaaaaaaactatccaccatcgcgaaacttcgaaaaatataaaaaactctcaaaaacgaatcgacgtctaattaaatacgaattcgaaccgcgtatacgtactaaaaaaaaataatcaaactaaaccgaaaatccacctcacaaccaaacgccgaccgcgactaaaccgaccgaacgacccgaacgaaaaaatcgaacgaacaaaaacgataaacgactctccaaataaccctaattccctaaaatcgccgccccgacaaccgacgcccacgtattcccccctttataacaaaaaacgtttccgaacctacgaatcctaacgaaaacgaccgtaccccgcctacgaatacgcgcccgccgtatccgacactaccccgaaaaccgcgcgactcgccgcccgccgatctcacgaaaaacaacgcgaaacgcgaaacgctaaacgcgaacgcaaaacgaaaaaacacccctaaacacgacgctcccgtcaaacgccgccacgaacaccttatacgaatcctcgaccgaataacgaaaacgac

SEQ ID NO: 17435 - DNA, 569 bp, Artificial Sequence
  chemically treated genomic DNA (Homo sapiens) CpG-island No: 17435
gaggggtagtgttagtggggagtttttggggaagaggaattatttattatcgcggggtttcggggagtgtggaaggtttttaggagcgggtcggcgtttggttggatgcgggttcgagtcgcgtgtacgtattggagggagatggttagattgggtcgggaatttattttatagttaggcgtcggtcgcggttggatcggtcgagcggttcgggcggaggagtcgagcgggtagagacggtgggcggttttttaggtgattttagttttttaagatcgtcgtttcggtagtcggcgtttacgtgtttttttttttgtgatagggagcgttttcgggtttgcgggttttggcgggggcggtcgtgtttcgtttgcgagtgcgcgttcgtcgtgttcgatattgtttcgggggtcgcgcggttcgtcgttcgtcggttttacgaggaatagcgcggggcgcggggcgttgggcgcggacgtaggacgagaggatatttttgagtacgacgttttcgttaggcgtcgttacgggtattttgtgcgggttttcggtcgggtggcgagggcggt

SEQ ID NO: 17436 - DNA, 569 bp, Artificial Sequence
  chemically treated genomic DNA (Homo sapiens) CpG-island No: 17436
accgccctcgccacccgaccgaaaacccgcacaaaatacccgtaacgacgcctaacgaaaacgtcgtactcaaaaatatcctctcgtcctacgtccgcgcccaacgccccgcgccccgcgctattcctcgtaaaaccgacgaacgacgaaccgcgcgacccccgaaacaatatcgaacacgacgaacgcgcactcgcaaacgaaacacgaccgcccccgccaaaacccgcaaacccgaaaacgctccctatcacaaaaaaaaaaacacgtaaacgccgactaccgaaacgacgatcttaaaaaactaaaatcacctaaaaaaccgcccaccgtctctacccgctcgactcctccgcccgaaccgctcgaccgatccaaccgcgaccgacgcctaactataaaataaattcccgacccaatctaaccatctccctccaatacgtacacgcgactcgaacccgcatccaaccaaacgccgacccgctcctaaaaaccttccacactccccgaaaccccgcgataataaataattcctcttccccaaaaactccccactaacactacccctc

SEQ ID NO: 17437 - DNA, 566 bp, Artificial Sequence
  chemically treated genomic DNA (Homo sapiens) CpG-island No: 17437
  unsure (230..)
tttttgcgcgcgcgtcggcgggttttttatttttcgaggcgttcgttggtttgcgttttggcggggacgtgggcggggcgggcgttatttaatgttggtgttattttttcggtgtagcggttggcgatcggtcgcggaggtgcgtgtagggttcgcgtcgtcgtcggtatttttatcgttaataatttagtttattgttattgttatagttatacgaggttttttatcgnntggttcgtcgttgcggtttcggattcgcgttttacgtttcgtagttcgcggcgttattagtttagtatgtattaggtgcgtgtagttttcgcgtcggtcgaggatgcgagacgttgggttaaggtttcggggatcggagtaggttgacgggaagcgaggaaaaggcgaagaggagaaacgtttcgtttcggggtaaggggaggtcgttttttttttgagcgtttttcggtttgggtatcgtttttttgatttttcgttacggtttcgtgcggtcgtcggggttggttggggaaagaagttagtttagaggagcgagaaggggttaaggggtttta

SEQ ID NO: 17438 - DNA, 566 bp, Artificial Sequence
  chemically treated genomic DNA (Homo sapiens) CpG-island No: 17438
  unsure (336..)
taaaaccccttaaccccttctcgctcctctaaactaacttctttccccaaccaaccccgacgaccgcacgaaaccgtaacgaaaaatcaaaaaaacgatacccaaaccgaaaaacgctcaaaaaaaaaacgacctccccttaccccgaaacgaaacgtttctcctcttcgccttttcctcgcttcccgtcaacctactccgatccccgaaaccttaacccaacgtctcgcatcctcgaccgacgcgaaaactacacgcacctaatacatactaaactaataacgccgcgaactacgaaacgtaaaacgcgaatccgaaaccgcaacgacgaaccanncgataaaaaacctcgtataactataacaataacaataaactaaattattaacgataaaaataccgacgacgacgcgaaccctacacgcacctccgcgaccgatcgccaaccgctacaccgaaaaaataacaccaacattaaataacgcccgccccgcccacgtccccgccaaaacgcaaaccaacgaacgcctcgaaaaataaaaaacccgccgacgcgcgcgcaaaaa

SEQ ID NO: 17439 - DNA, 566 bp, Artificial Sequence
  chemically treated genomic DNA (Homo sapiens) CpG-island No: 17439
  unsure (336..)
taggattttttggttttttttcgtttttttggattggtttttttttttagttagtttcggcggtcgtacggagtcgtggcggggagttagagaagcggtgtttaggtcggggggcgtttagaggaaaggcggtttttttttgtttcgggacggggcgtttttttttttcgtttttttttcgtttttcgttagtttgtttcggttttcggggttttggtttagcgtttcgtattttcggtcggcgcgggggttgtacgtatttggtgtatgttgggttggtggcgtcgcgggttgcggggcgtggagcgcggattcgggatcgtagcggcgagttanncggtggggggtttcgtgtggttgtggtagtggtagtgggttgagttgttggcggtggagatatcggcggcggcgcgggttttgtacgtattttcgcggtcgatcgttagtcgttgtatcggggaggtggtattagtattaaatagcgttcgtttcgtttacgttttcgttagggcgtaggttagcggacgtttcggagggtaggaaattcgtcggcgcgcgcgtaggga

SEQ ID NO: 17440 - DNA, 566 bp, Artificial Sequence
  chemically treated genomic DNA (Homo sapiens) CpG-island No: 17440
  unsure (230..)
tccctacgcgcgcgccgacgaatttcctaccctccgaaacgtccgctaacctacgccctaacgaaaacgtaaacgaaacgaacgctatttaatactaataccacctccccgatacaacgactaacgatcgaccgcgaaaatacgtacaaaacccgcgccgccgccgatatctccaccgccaacaactcaacccactaccactaccacaaccacacgaaaccccccaccgnntaactcgccgctacgatcccgaatccgcgctccacgccccgcaacccgcgacgccaccaacccaacatacaccaaatacgtacaacccccgcgccgaccgaaaatacgaaacgctaaaccaaaaccccgaaaaccgaaacaaactaacgaaaaacgaaaaaaaaacgaaaaaaaaaaacgccccgtcccgaaacaaaaaaaaaccgcctttcctctaaacgccccccgacctaaacaccgcttctctaactccccgccacgactccgtacgaccgccgaaactaactaaaaaaaaaaaccaatccaaaaaaacgaaaaaaaaccaaaaaatccta

SEQ ID NO: 17441 - DNA, 606 bp, Artificial Sequence
  chemically treated genomic DNA (Homo sapiens) CpG-island No: 17441
tcgtcgttggtgcggggcgtaggttgcgatggaagtcgttggttagggcggggagttaagttggggcgattgggggggtttgggggagttagcggggcgggatcgagcggggcggagagtggtaggaggaggcgaattttcgcgtttcggcgaattttatcgggttgaagtttttgttgtcgttttttttttgcgtgcggagttgggttttgcgtgcgtcgtttttggaaagtcggttttagttatatttttgggcgttgttgcggcgtttttttcgcgttttttacggtatttgatacgcggaggcggcgtcgagggtgggtgcggttattattatttttggcgtggggtgtcggtcgttattattttcgcgtgcgtacgtatagtcgcgtttgttaggttagcgaggcggacgtttgggttattattcgtagtcgagttcgggcgcgtatcgtatttcgttgcgtatcggcggttttgtggtttttttgggcgcgtttgcggtcgcgaagggggttttttttttataagggaagtcggtagtttcgggggtggttttttcgtttgcgcgtttttttttatatgttgatgtataggatttttaag

SEQ ID NO: 17442 - DNA, 606 bp, Artificial Sequence
  chemically treated genomic DNA (Homo sapiens) CpG-island No: 17442
cttaaaaatcctatacatcaacatataaaaaaaaacgcgcaaacgaaaaaaccacccccgaaactaccgacttcccttataaaaaaaaaacccccttcgcgaccgcaaacgcgcccaaaaaaaccacaaaaccgccgatacgcaacgaaatacgatacgcgcccgaactcgactacgaataataacccaaacgtccgcctcgctaacctaacaaacgcgactatacgtacgcacgcgaaaataataacgaccgacaccccacgccaaaaataataataaccgcacccaccctcgacgccgcctccgcgtatcaaataccgtaaaaaacgcgaaaaaaacgccgcaacaacgcccaaaaatataactaaaaccgactttccaaaaacgacgcacgcaaaacccaactccgcacgcaaaaaaaaaacgacaacaaaaacttcaacccgataaaattcgccgaaacgcgaaaattcgcctcctcctaccactctccgccccgctcgatcccgccccgctaactcccccaaacccccccaatcgccccaacttaactccccgccctaaccaacgacttccatcgcaacctacgccccgcaccaacgacga

SEQ ID NO: 17443 - DNA, 606 bp, Artificial Sequence
  chemically treated genomic DNA (Homo sapiens) CpG-island No: 17443
tttgaaaattttatgtattagtatgtaggaaagggcgcgtaggcggggaagttattttcgaagttgtcggttttttttataaagggagggtttttttcgcgatcgtaagcgcgtttaggaagattatagagtcgtcggtgcgtagcgaggtgcgatacgcgttcgggttcggttgcgggtggtggtttaagcgttcgtttcgttggtttggtaggcgcgattgtgcgtgcgtacgcgagggtggtggcggtcggtattttacgttaagggtggtggtggtcgtatttattttcggcgtcgttttcgcgtgttaggtgtcgtgagaagcgcgggaggagcgtcgtagtagcgtttagggatatgattggagtcgattttttagaagcggcgtacgtaaagtttagtttcgtacgtaaaggggaggcgatagtagaaattttaattcgataaagttcgtcggagcgcggagattcgtttttttttgttatttttcgtttcgttcggtttcgtttcgttagtttttttaggtttttttagtcgttttagtttggtttttcgttttggttaacggtttttatcgtagtttgcgtttcgtattagcggcgg

SEQ ID NO: 17444 - DNA, 606 bp, Artificial Sequence
  chemically treated genomic DNA (Homo sapiens) CpG-island No: 17444
ccgccgctaatacgaaacgcaaactacgataaaaaccgttaaccaaaacgaaaaaccaaactaaaacgactaaaaaaacctaaaaaaactaacgaaacgaaaccgaacgaaacgaaaaataacaaaaaaaaacgaatctccgcgctccgacgaactttatcgaattaaaatttctactatcgcctcccctttacgtacgaaactaaactttacgtacgccgcttctaaaaaatcgactccaatcatatccctaaacgctactacgacgctcctcccgcgcttctcacgacacctaacacgcgaaaacgacgccgaaaataaatacgaccaccaccacccttaacgtaaaataccgaccgccaccaccctcgcgtacgcacgcacaatcgcgcctaccaaaccaacgaaacgaacgcttaaaccaccacccgcaaccgaacccgaacgcgtatcgcacctcgctacgcaccgacgactctataatcttcctaaacgcgcttacgatcgcgaaaaaaaccctccctttataaaaaaaaccgacaacttcgaaaataacttccccgcctacgcgccctttcctacatactaatacataaaattttcaaa

SEQ ID NO: 17445 - DNA, 819 bp, Artificial Sequence
  chemically treated genomic DNA (Homo sapiens) CpG-island No: 17445
gtagtttagcggattagcgaggggtattcgcggttcggggagcgcgttcgttcggtaaatattaattcggttgtttcgggtttttcgtttcggttcgtcgcgcggtatcgatcgaaattcggcggttttgttttattggtcgtcgtcgttttttttttcggcgggattaatgttttgtcggttcgacgagagaggggtcggtcgttttagggtttgggtgcggtttcgttcgttttttcggggataaggtcgttatcgtaggcgcgggcgaggaagggtttattcggttaggagcgtagcggattgtattgcggcgtcgtcgtcgggtttcgcgtttatttgagttggggacggcgtagtttcggcgattagagcggggaagagtcgagtaaggttgagaaaggggcggtttttcggtagacgtcgagaaatggcgtttataacgagtttatcggttttaattttcggaggatttcgatttttcgttcgtttattttttaaagtttttttttagtttcgttttttagggcggagcgtttcgtttttaaacgggcgatgatatcgtttcggaaattggtcggcgcggcgattggagagaaatcggcgaggtcgggttcggtcgggttggaattagcgttagtagtcgggcgttcgcggttggtttaaaggggcgttgtcgaaatttagttttcgttgcggtttttcgttcgcggaggaggcgttcgttcgtagatagattttagttagttttattacgaaggaggttggtggagttggttgttagatttatttatttattcgtttaagagattaaatttt

SEQ ID NO: 17446 - DNA, 819 bp, Artificial Sequence
  chemically treated genomic DNA (Homo sapiens) CpG-island No: 17446
aaaatttaatctcttaaacgaataaataaataaatctaacaaccaactccaccaacctccttcgtaataaaactaactaaaatctatctacgaacgaacgcctcctccgcgaacgaaaaaccgcaacgaaaactaaatttcgacaacgcccctttaaaccaaccgcgaacgcccgactactaacgctaattccaacccgaccgaacccgacctcgccgatttctctccaatcgccgcgccgaccaatttccgaaacgatatcatcgcccgtttaaaaacgaaacgctccgccctaaaaaacgaaactaaaaaaaaactttaaaaaataaacgaacgaaaaatcgaaatcctccgaaaattaaaaccgataaactcgttataaacgccatttctcgacgtctaccgaaaaaccgcccctttctcaaccttactcgactcttccccgctctaatcgccgaaactacgccgtccccaactcaaataaacgcgaaacccgacgacgacgccgcaatacaatccgctacgctcctaaccgaataaacccttcctcgcccgcgcctacgataacgaccttatccccgaaaaaacgaacgaaaccgcacccaaaccctaaaacgaccgacccctctctcgtcgaaccgacaaaacattaatcccgccgaaaaaaaaaacgacgacgaccaataaaacaaaaccgccgaatttcgatcgataccgcgcgacgaaccgaaacgaaaaacccgaaacaaccgaattaatatttaccgaacgaacgcgctccccgaaccgcgaatacccctcgctaatccgctaaactac

SEQ ID NO: 17447 - DNA, 819 bp, Artificial Sequence
  chemically treated genomic DNA (Homo sapiens) CpG-island No: 17447
aggatttaattttttgaacgaatggatgaatgaatttagtagttagttttattagtttttttcgtgataggattaattggggtttgtttgcggacgggcgtttttttcgcgggcggagggtcgtagcgggaattgggtttcggtagcgtttttttaaattagtcgcggacgttcggttgttggcgttagttttagttcggtcgggttcggtttcgtcggtttttttttagtcgtcgcgtcggttaattttcggggcggtgttatcgttcgtttaagagcggagcgtttcgttttggggggcggagttgggagggagttttaaggggtggacgggcgggaggtcggggtttttcggggattagagtcggtgggttcgttgtgggcgttatttttcggcgtttatcgaggagtcgttttttttttagttttgttcggttttttttcgttttggtcgtcggggttgcgtcgtttttagtttaggtaagcgcgaggttcggcggcggcgtcgtagtatagttcgttgcgtttttagtcgagtggattttttttcgttcgcgtttgcggtagcggttttgttttcggggaggcgggcggggtcgtatttagattttagggcggtcggtttttttttcgtcgggtcggtagggtattaatttcgtcggagggaggggcggcggcggttaatgaggtagggtcgtcgagtttcggtcgatatcgcgcgacgggtcggggcggagggttcggggtagtcgggttaatgtttgtcgagcggacgcgtttttcgagtcgcgggtatttttcgttggttcgttgggttgt

SEQ ID NO: 17448 - DNA, 819 bp, Artificial Sequence
  chemically treated genomic DNA (Homo sapiens) CpG-island No: 17448
acaacccaacgaaccaacgaaaaatacccgcgactcgaaaaacgcgtccgctcgacaaacattaacccgactaccccgaaccctccgccccgacccgtcgcgcgatatcgaccgaaactcgacgaccctacctcattaaccgccgccgcccctccctccgacgaaattaataccctaccgacccgacgaaaaaaaaaccgaccgccctaaaatctaaatacgaccccgcccgcctccccgaaaacaaaaccgctaccgcaaacgcgaacgaaaaaaaatccactcgactaaaaacgcaacgaactatactacgacgccgccgccgaacctcgcgcttacctaaactaaaaacgacgcaaccccgacgaccaaaacgaaaaaaaaccgaacaaaactaaaaaaaaaacgactcctcgataaacgccgaaaaataacgcccacaacgaacccaccgactctaatccccgaaaaaccccgacctcccgcccgtccaccccttaaaactccctcccaactccgccccccaaaacgaaacgctccgctcttaaacgaacgataacaccgccccgaaaattaaccgacgcgacgactaaaaaaaaaccgacgaaaccgaacccgaccgaactaaaactaacgccaacaaccgaacgtccgcgactaatttaaaaaaacgctaccgaaacccaattcccgctacgaccctccgcccgcgaaaaaaacgcccgtccgcaaacaaaccccaattaatcctatcacgaaaaaaactaataaaactaactactaaattcattcatccattcgttcaaaaaattaaatcct

SEQ ID NO: 17449 - DNA, 779 bp, Artificial Sequence
  chemically treated genomic DNA (Homo sapiens) CpG-island No: 17449
aggacgagggcgtggaggagatttcgggtagggatcgggtttaggggttcgggtcggggtttaatatttattcgatgggtgcgggttcgacggcgggtgtgggagtaggggcggcgggggtcgggaggaggagtggggataggtcgcgtagggggtgttcgggattttcgtttaagtttgggaaagaggtacgcgggggcggcgcgttggggtcggtgataggcgttcgtttttatttgtcgggtagtgtttcgtcgtcgagtcgcgcgcgtcgtttttcgaggtggaattgtcgtggtttacggcgtaggcggcgttgaaggtagcggttagtagttttatagggtcggcggcggggcgggtgcgggggtcgggtcgggggttacgtcggggttttgggttgggtcgggggcgattagcgggttgcggagcggggtcgtagcgcgcgcggttcgatcggagttgtagtcgtcgtcgttatcgttgtcgagtaatttcgcgggcggcgcgattttggaggttttcgggttgttacggtaacgagggaggcgggaggggcggcgcggcgggggcgaggtcgggcggcggcgggcggggttcggttggtcgtattcggtttttcgagcgtcgattgcgggttggggtttgtcgcgggcgcgttttttttttttcgcgtcgtcgtgtttcgattcggagaggggtagagttgcggaggttttggagttgcgtttttgtttgtttcgtttattttttacggcgggggaagtttggaaggggcg

SEQ ID NO: 17450 - DNA, 779 bp, Artificial Sequence
  chemically treated genomic DNA (Homo sapiens) CpG-island No: 17450
cgccccttccaaacttcccccgccgtaaaaaataaacgaaacaaacaaaaacgcaactccaaaacctccgcaactctacccctctccgaatcgaaacacgacgacgcgaaaaaaaaaaaacgcgcccgcgacaaaccccaacccgcaatcgacgctcgaaaaaccgaatacgaccaaccgaaccccgcccgccgccgcccgacctcgcccccgccgcgccgcccctcccgcctccctcgttaccgtaacaacccgaaaacctccaaaatcgcgccgcccgcgaaattactcgacaacgataacgacgacgactacaactccgatcgaaccgcgcgcgctacgaccccgctccgcaacccgctaatcgcccccgacccaacccaaaaccccgacgtaacccccgacccgacccccgcacccgccccgccgccgaccctataaaactactaaccgctaccttcaacgccgcctacgccgtaaaccacgacaattccacctcgaaaaacgacgcgcgcgactcgacgacgaaacactacccgacaaataaaaacgaacgcctatcaccgaccccaacgcgccgcccccgcgtacctctttcccaaacttaaacgaaaatcccgaacaccccctacgcgacctatccccactcctcctcccgacccccgccgcccctactcccacacccgccgtcgaacccgcacccatcgaataaatattaaaccccgacccgaacccctaaacccgatccctacccgaaatctcctccacgccctcgtcct

SEQ ID NO: 17451 - DNA, 779 bp, Artificial Sequence
  chemically treated genomic DNA (Homo sapiens) CpG-island No: 17451
cgttttttttaggtttttttcgtcgtgaggagtgggcggggtaggtaaaggcgtagttttagggttttcgtagttttgttttttttcgggtcggggtacggcggcgcgggggaggaaaggcgcgttcgcggtaggttttagttcgtagtcggcgttcggggggtcgggtgcggttagtcggatttcgttcgtcgtcgttcggtttcgttttcgtcgcgtcgtttttttcgtttttttcgttgtcgtggtaattcgggagtttttagggtcgcgtcgttcgcggagttgttcggtagcggtggcggcggcggttgtagtttcggtcgagtcgcgcgcgttgcgatttcgtttcgtagttcgttagtcgttttcgatttagtttagggtttcggcgtggttttcgattcggttttcgtattcgtttcgtcgtcgattttatggagttgttggtcgttgtttttagcgtcgtttgcgtcgtggattacgatagttttatttcggaaagcgacgcgcgcgattcggcggcgggatattgttcggtaggtgaggacgggcgtttgttatcggttttagcgcgtcgttttcgcgtgttttttttttaagtttagacgggggtttcgggtattttttgcgcggtttatttttattttttttttcggttttcgtcgtttttatttttatattcgtcgtcgggttcgtatttatcgggtgggtgttgagtttcggttcgggtttttggattcggtttttgttcggagttttttttacgttttcgtttt

SEQ ID NO: 17452 - DNA, 779 bp, Artificial Sequence
  chemically treated genomic DNA (Homo sapiens) CpG-island No: 17452
aaaacgaaaacgtaaaaaaaactccgaacaaaaaccgaatccaaaaacccgaaccgaaactcaacacccacccgataaatacgaacccgacgacgaatataaaaataaaaacgacgaaaaccgaaaaaaaaaataaaaataaaccgcgcaaaaaatacccgaaacccccgtctaaacttaaaaaaaaaacacgcgaaaacgacgcgctaaaaccgataacaaacgcccgtcctcacctaccgaacaatatcccgccgccgaatcgcgcgcgtcgctttccgaaataaaactatcgtaatccacgacgcaaacgacgctaaaaacaacgaccaacaactccataaaatcgacgacgaaacgaatacgaaaaccgaatcgaaaaccacgccgaaaccctaaactaaatcgaaaacgactaacgaactacgaaacgaaatcgcaacgcgcgcgactcgaccgaaactacaaccgccgccgccaccgctaccgaacaactccgcgaacgacgcgaccctaaaaactcccgaattaccacgacaacgaaaaaaacgaaaaaaacgacgcgacgaaaacgaaaccgaacgacgacgaacgaaatccgactaaccgcacccgaccccccgaacgccgactacgaactaaaacctaccgcgaacgcgcctttcctcccccgcgccgccgtaccccgacccgaaaaaaaacaaaactacgaaaaccctaaaactacgcctttacctaccccgcccactcctcacgacgaaaaaaacctaaaaaaaacg

SEQ ID NO: 17453 - DNA, 775 bp, Artificial Sequence
  chemically treated genomic DNA (Homo sapiens) CpG-island No: 17453
cgttcgttttcgtagttaaatttagattaagcgttaattgttttgcggcgttggatcgcgttagattcgtattaggatcgattatgttagcgtcgagttcgatagttttacgtttattttggcgtaagtcgcgtgtcgttgataatagtaattacggcgatgttttgttttacgttcgttgatgatgcgcgcgtttcgcgttcgagcgtacgtcggtttagcgtcgatagttgcgcggtttaggtgtcgcgtggggtaaagtaggtgtttcgcgtttaggcggtttcgcggttggttgtttttcgagtcggtcgcgttttttttagcgaggcgtggcggggaggcgtagtgaggttgggttcgtggcggttttttgaggagggtcgagaaggggtcgggggtgttaggggaacgggcgttggggtagcggtttcggtggatgttaagggtttcgggatcgggagagtttattacgtttgtttgttcggttgagaatcgttatggtaattttcgtttttttaaagtatcgggggttagggcgcgcgtcgtggagttttaggttgtttcggagaggcgcgggcgtcgaggttatcgtttttttttggggttaattttaacgcgtggcgaaaagatggagggataaggggtgttcggcggttcgcgtttgttgggggcgtagtagtcgcggagttaggttagtcgtttttttaggttttaggtcgtggttttgttgagtagtttttatatttagacggttgatgtggaaaataaaggg

SEQ ID NO: 17454 - DNA, 775 bp, Artificial Sequence
  chemically treated genomic DNA (Homo sapiens) CpG-island No: 17454
ccctttattttccacatcaaccgtctaaatataaaaactactcaacaaaaccacgacctaaaacctaaaaaaacgactaacctaactccgcgactactacgcccccaacaaacgcgaaccgccgaacaccccttatccctccatcttttcgccacgcgttaaaattaaccccaaaaaaaaacgataacctcgacgcccgcgcctctccgaaacaacctaaaactccacgacgcgcgccctaacccccgatactttaaaaaaacgaaaattaccataacgattctcaaccgaacaaacaaacgtaataaactctcccgatcccgaaacccttaacatccaccgaaaccgctaccccaacgcccgttcccctaacacccccgaccccttctcgaccctcctcaaaaaaccgccacgaacccaacctcactacgcctccccgccacgcctcgctaaaaaaaacgcgaccgactcgaaaaacaaccaaccgcgaaaccgcctaaacgcgaaacacctactttaccccacgcgacacctaaaccgcgcaactatcgacgctaaaccgacgtacgctcgaacgcgaaacgcgcgcatcatcaacgaacgtaaaacaaaacatcgccgtaattactattatcaacgacacgcgacttacgccaaaataaacgtaaaactatcgaactcgacgctaacataatcgatcctaatacgaatctaacgcgatccaacgccgcaaaacaattaacgcttaatctaaatttaactacgaaaacgaacg

SEQ ID NO: 17455 - DNA, 775 bp, Artificial Sequence
  chemically treated genomic DNA (Homo sapiens) CpG-island No: 17455
ttttttattttttatattaatcgtttgggtgtgggggttgtttaataggattacgatttaaaatttggaaagacggttggtttgatttcgcggttgttgcgtttttagtaggcgcggatcgtcgggtattttttgtttttttattttttcgttacgcgttgaggttgattttagggagaggcggtgatttcggcgttcgcgttttttcgggatagtttggggttttacggcgcgcgttttggttttcggtattttagggagacggggattattatggcgatttttagtcgagtaggtaggcgtggtggattttttcgatttcgaagtttttagtatttatcggggtcgttgttttagcgttcgtttttttagtattttcggttttttttcggttttttttagggaatcgttacgggtttagttttattacgttttttcgttacgtttcgttgggaggagcgcggtcggttcgggaggtagttagtcgcggagtcgtttggacgcgaggtatttgttttgttttacgcggtatttaggtcgcgtagttgtcggcgttgggtcggcgtgcgttcgggcgcggggcgcgcgtattattaacgggcgtggggtagggtatcgtcgtggttattgttgttagcgatacgcggtttgcgttagagtgagcgtagggttgtcgagttcggcgttggtatggtcggttttagtacgagtttagcgcggtttagcgtcgtaaagtagttggcgtttagtttggatttggttgcggaggcggacg

SEQ ID NO: 17456 - DNA, 775 bp, Artificial Sequence
  chemically treated genomic DNA (Homo sapiens) CpG-island No: 17456
cgtccgcctccgcaaccaaatccaaactaaacgccaactactttacgacgctaaaccgcgctaaactcgtactaaaaccgaccataccaacgccgaactcgacaaccctacgctcactctaacgcaaaccgcgtatcgctaacaacaataaccacgacgataccctaccccacgcccgttaataatacgcgcgccccgcgcccgaacgcacgccgacccaacgccgacaactacgcgacctaaataccgcgtaaaacaaaacaaatacctcgcgtccaaacgactccgcgactaactacctcccgaaccgaccgcgctcctcccaacgaaacgtaacgaaaaaacgtaataaaactaaacccgtaacgattccctaaaaaaaaccgaaaaaaaaccgaaaatactaaaaaaacgaacgctaaaacaacgaccccgataaatactaaaaacttcgaaatcgaaaaaatccaccacgcctacctactcgactaaaaatcgccataataatccccgtctccctaaaataccgaaaaccaaaacgcgcgccgtaaaaccccaaactatcccgaaaaaacgcgaacgccgaaatcaccgcctctccctaaaatcaacctcaacgcgtaacgaaaaaataaaaaaacaaaaaatacccgacgatccgcgcctactaaaaacgcaacaaccgcgaaatcaaaccaaccgtctttccaaattttaaatcgtaatcctattaaacaacccccacacccaaacgattaatataaaaaataaaaaa

SEQ ID NO: 17457 - DNA, 649 bp, Artificial Sequence
  chemically treated genomic DNA (Homo sapiens) CpG-island No: 17457
aaagttcgcgttaggtagtttattttaaaaattcgtcgagtcggtttggtgcgtgtacggggcgggcgcggagggcggggggcgggtatcggcgcgggtgtgtgggcgagaatacgtcggtaggtacgttcgcgtcgagtttcgggcggtttattgcgtttcggttaatggggacgcgcgtcgtagtttttgttttgattttagttcgtattttgatttcgcgtgcgtttcgttttttgttttcgtatttcgaggatttgtttatgaggtcgtttgggcggcgggtagcggggtgggatttcgcgtcggggagaggtagtttgcgtagggtcgaggggcggtcggagtcgggtttcgggattgttgcgggggacggtagttgtttatagcgtcggtgttttcgtatcggcgtcgtgtttttggaacgagggtaggatcgcgggtagcgtcgggttagcgcggagtttttttacgttgtgcgtttttgcgttttttttcgggttaggtggggataatttttcggtttttagcggttgcgtttcgggcgtgggcgatgcgtttttttcggtgggacgtagttgatttgatcgtttgggagaagtagtgtaagggaattgatttagggttgcgttatttttttttttttttt

SEQ ID NO: 17458 - DNA, 649 bp, Artificial Sequence
  chemically treated genomic DNA (Homo sapiens) CpG-island No: 17458
aaaaaaaaaaaaaaaataacgcaaccctaaatcaattcccttacactacttctcccaaacgatcaaatcaactacgtcccaccgaaaaaaacgcatcgcccacgcccgaaacgcaaccgctaaaaaccgaaaaattatccccacctaacccgaaaaaaaacgcaaaaacgcacaacgtaaaaaaactccgcgctaacccgacgctacccgcgatcctaccctcgttccaaaaacacgacgccgatacgaaaacaccgacgctataaacaactaccgtcccccgcaacaatcccgaaacccgactccgaccgcccctcgaccctacgcaaactacctctccccgacgcgaaatcccaccccgctacccgccgcccaaacgacctcataaacaaatcctcgaaatacgaaaacaaaaaacgaaacgcacgcgaaatcaaaatacgaactaaaatcaaaacaaaaactacgacgcgcgtccccattaaccgaaacgcaataaaccgcccgaaactcgacgcgaacgtacctaccgacgtattctcgcccacacacccgcgccgatacccgccccccgccctccgcgcccgccccgtacacgcaccaaaccgactcgacgaatttttaaaataaactacctaacgcgaacttt

SEQ ID NO: 17459 - DNA, 649 bp, Artificial Sequence
  chemically treated genomic DNA (Homo sapiens) CpG-island No: 17459
gagagggaaggaagagtagcgtagttttagattaatttttttgtattgttttttttagacggttaagttagttgcgttttatcgaaaagggcgtatcgtttacgttcgaaacgtagtcgttgggggtcgagaaattatttttatttggttcgaggggaaacgtaggagcgtatagcgtggaggggtttcgcgttggttcggcgttgttcgcggttttgttttcgttttaagggtacggcgtcggtacgaggatatcgacgttgtgggtaattgtcgtttttcgtagtaatttcggagttcggtttcggtcgtttttcggttttgcgtaggttgttttttttcgacgcggagttttatttcgttattcgtcgtttagacgattttataaataagttttcgaagtgcggaggtaggaggcggggcgtacgcggggttaggatgcgggttagggttagggtagaggttgcggcgcgcgtttttattggtcgggacgtagtgagtcgttcggagttcggcgcgggcgtgtttgtcggcgtgttttcgtttatatattcgcgtcggtgttcgtttttcgtttttcgcgttcgtttcgtgtacgtattaagtcggttcgacgagtttttaaagtgggttgtttggcgcggatttt

SEQ ID NO: 17460 - DNA, 649 bp, Artificial Sequence
  chemically treated genomic DNA (Homo sapiens) CpG-island No: 17460
aaaatccgcgccaaacaacccactttaaaaactcgtcgaaccgacttaatacgtacacgaaacgaacgcgaaaaacgaaaaacgaacaccgacgcgaatatataaacgaaaacacgccgacaaacacgcccgcgccgaactccgaacgactcactacgtcccgaccaataaaaacgcgcgccgcaacctctaccctaaccctaacccgcatcctaaccccgcgtacgccccgcctcctacctccgcacttcgaaaacttatttataaaatcgtctaaacgacgaataacgaaataaaactccgcgtcgaaaaaaaacaacctacgcaaaaccgaaaaacgaccgaaaccgaactccgaaattactacgaaaaacgacaattacccacaacgtcgatatcctcgtaccgacgccgtacccttaaaacgaaaacaaaaccgcgaacaacgccgaaccaacgcgaaacccctccacgctatacgctcctacgtttcccctcgaaccaaataaaaataatttctcgacccccaacgactacgtttcgaacgtaaacgatacgcccttttcgataaaacgcaactaacttaaccgtctaaaaaaaacaatacaaaaaaattaatctaaaactacgctactcttccttccctctc

SEQ ID NO: 17461 - DNA, 595 bp, Artificial Sequence
  chemically treated genomic DNA (Homo sapiens) CpG-island No: 17461
cgcggcgcggttcgcgggatgttgggggtcgggtttttttcgagcgtcgtggtttttttgtttcggcgcggcgggtcgggtggggttaggttttgggagcgcgcgtcggattttagcgtcgggtcggcggaggggcggggtcgggtacgtgttttcgggtcgttttttttttcgttacgtgattcgtttagggtagggtcggggttgggttgggggtcgcgagtttaggcgtttgagatttattgattggtcgcgggtagggttgataggcggtggggcggttcggtttttggcggagtcggcggcgggcggggacgcggcgttgggaggacgcggcggcgttgggaacggacgtttgggcgtttcgaggcgtcgggatgtggagcgggtaggttcgcgcgcgttcgcggtttcgcgttgggtttgggtcgcggtcgtttttcgggacgggaggatttcgggggttttcgtcgggtttgcgtcgttattcggaggtgttgtgcgttttcgttttgtttgtaggcgagtcgatttgtagttaggagatttcgggggaggggtcgggggtgtttttcggggtgtagggtgcgaaggg

SEQ ID NO: 17462 - DNA, 595 bp, Artificial Sequence
  chemically treated genomic DNA (Homo sapiens) CpG-island No: 17462
cccttcgcaccctacaccccgaaaaacacccccgacccctcccccgaaatctcctaactacaaatcgactcgcctacaaacaaaacgaaaacgcacaacacctccgaataacgacgcaaacccgacgaaaacccccgaaatcctcccgtcccgaaaaacgaccgcgacccaaacccaacgcgaaaccgcgaacgcgcgcgaacctacccgctccacatcccgacgcctcgaaacgcccaaacgtccgttcccaacgccgccgcgtcctcccaacgccgcgtccccgcccgccgccgactccgccaaaaaccgaaccgccccaccgcctatcaaccctacccgcgaccaatcaataaatctcaaacgcctaaactcgcgacccccaacccaaccccgaccctaccctaaacgaatcacgtaacgaaaaaaaaaacgacccgaaaacacgtacccgaccccgcccctccgccgacccgacgctaaaatccgacgcgcgctcccaaaacctaaccccacccgacccgccgcgccgaaacaaaaaaaccacgacgctcgaaaaaaacccgacccccaacatcccgcgaaccgcgccgcg

SEQ ID NO: 17463 - DNA, 595 bp, Artificial Sequence
  chemically treated genomic DNA (Homo sapiens) CpG-island No: 17463
tttttcgtattttgtatttcgagagatattttcgatttttttttcggagttttttggttgtaagtcggttcgtttgtaggtagggcgggggcgtatagtattttcgggtggcggcgtagattcggcggggattttcgaaattttttcgtttcgggaggcgatcgcggtttagatttagcgcgggatcgcgagcgcgcgcggatttattcgttttatatttcggcgtttcggggcgtttaggcgttcgtttttagcgtcgtcgcgtttttttagcgtcgcgttttcgttcgtcgtcgatttcgttaggggtcgagtcgttttatcgtttgttagttttgttcgcggttagttagtaggttttagacgtttgggttcgcggtttttagtttagtttcgattttgttttgggcgggttacgtggcggaggggggagcggttcgaggatacgtgttcggtttcgttttttcgtcggttcggcgttgggattcggcgcgcgtttttaaggtttggttttattcggttcgtcgcgtcgggatagggagattacggcgttcggagggaattcggtttttaatatttcgcgggtcgcgtcgcg

SEQ ID NO: 17464 - DNA, 595 bp, Artificial Sequence
  chemically treated genomic DNA (Homo sapiens) CpG-island No: 17464
cgcgacgcgacccgcgaaatattaaaaaccgaattccctccgaacgccgtaatctccctatcccgacgcgacgaaccgaataaaaccaaaccttaaaaacgcgcgccgaatcccaacgccgaaccgacgaaaaaacgaaaccgaacacgtatcctcgaaccgctcccccctccgccacgtaacccgcccaaaacaaaatcgaaactaaactaaaaaccgcgaacccaaacgtctaaaacctactaactaaccgcgaacaaaactaacaaacgataaaacgactcgacccctaacgaaatcgacgacgaacgaaaacgcgacgctaaaaaaacgcgacgacgctaaaaacgaacgcctaaacgccccgaaacgccgaaatataaaacgaataaatccgcgcgcgctcgcgatcccgcgctaaatctaaaccgcgatcgcctcccgaaacgaaaaaatttcgaaaatccccgccgaatctacgccgccacccgaaaatactatacgcccccgccctacctacaaacgaaccgacttacaaccaaaaaactccgaaaaaaaaatcgaaaatatctctcgaaatacaaaatacgaaaaa

SEQ ID NO: 17465 - DNA, 883 bp, Artificial Sequence
  chemically treated genomic DNA (Homo sapiens) CpG-island No: 17465
gacgcgcggttggaagttttttaggtttcgttgtttatagatcgggatttcgttttcggttttcgagggcgtggcgaggcgttgcgggacgtttaataggtgcgtgttgtgtttttaggtttcgcgtttcgggtggagttaagagtttggaagtcggtagttcgggaaaagggggcgggacggtgtttcggggtagggttgggtggcggtcgttgttttttcgggaggggcgggtcgtttcgacgtcgttttttttggcggttaatggagatcgaggtttcgcgtttggattggagcggacgcgggggttagttagttttgggggtcggggtttggtcgggggcgggggggtaggcgaggcgaggcgggcgtcgttcgcgcggttataaggcggggagttttttgcgtcgcgagtcgggaggcgtacgttcgttcgtacggcggtcgcggcggtagggcggggtcggagtagcgggcggcggcggaggcggcgttcgggagcgtttttcgtttttttcggggttttgttcggatttcggttatcgtttgggatttttaggattcgtgcgtgtagtatgggcggcgtcggggagtcgggatcgcgggagggattcgcgtagtcgggggcgtcgttgtttattttttgttgggagtagattcgcgcgtacgattagttcggcgataagtggttggttatcgagcgtcgcgtttacgatattagtcgttgggtatagcggtatttagggggtagtcgttttatcggttattacggcgttgaggacgttacggtaaggaagttataaggaagttatttatcggcgggtggagtttggagttcggtcgtgggcgtgatgtttcgttttatttgtggggttttagtatt

SEQ ID NO: 17466 - DNA, 883 bp, Artificial Sequence
  chemically treated genomic DNA (Homo sapiens) CpG-island No: 17466
aatactaaaaccccacaaataaaacgaaacatcacgcccacgaccgaactccaaactccacccgccgataaataacttccttataacttccttaccgtaacgtcctcaacgccgtaataaccgataaaacgactaccccctaaataccgctatacccaacgactaatatcgtaaacgcgacgctcgataaccaaccacttatcgccgaactaatcgtacgcgcgaatctactcccaacaaaaaataaacaacgacgcccccgactacgcgaatccctcccgcgatcccgactccccgacgccgcccatactacacgcacgaatcctaaaaatcccaaacgataaccgaaatccgaacaaaaccccgaaaaaaacgaaaaacgctcccgaacgccgcctccgccgccgcccgctactccgaccccgccctaccgccgcgaccgccgtacgaacgaacgtacgcctcccgactcgcgacgcaaaaaactccccgccttataaccgcgcgaacgacgcccgcctcgcctcgcctacccccccgcccccgaccaaaccccgacccccaaaactaactaacccccgcgtccgctccaatccaaacgcgaaacctcgatctccattaaccgccaaaaaaaacgacgtcgaaacgacccgcccctcccgaaaaaacaacgaccgccacccaaccctaccccgaaacaccgtcccgcccccttttcccgaactaccgacttccaaactcttaactccacccgaaacgcgaaacctaaaaacacaacacgcacctattaaacgtcccgcaacgcctcgccacgccctcgaaaaccgaaaacgaaatcccgatctataaacaacgaaacctaaaaaacttccaaccgcgcgtc

SEQ ID NO: 17467 - DNA, 883 bp, Artificial Sequence
  chemically treated genomic DNA (Homo sapiens) CpG-island No: 17467
gatgttaaggttttataggtggagcgggatattacgtttacgatcgagttttaggttttattcgtcggtgggtggtttttttatggtttttttatcgtggcgtttttagcgtcgtggtggtcgatgaggcggttgttttttgggtgtcgttgtgtttagcggttgatgtcgtagacgcggcgttcgatgattagttatttgtcgtcgggttggtcgtgcgcgcggatttgtttttagtagaaggtgggtagcggcgttttcggttgcgcgggtttttttcgcggtttcggtttttcgacgtcgtttatgttgtacgtacgagttttggggattttaggcggtggtcgaggttcgagtaagatttcgagggaagcgaagagcgttttcgggcgtcgttttcgtcgtcgttcgttgtttcggtttcgttttgtcgtcgcggtcgtcgtacgagcgagcgtgcgtttttcggttcgcggcgtagggaatttttcgttttataatcgcgcggacggcgttcgtttcgtttcgtttgttttttcgttttcggttaggtttcggtttttaaggttggttgattttcgcgttcgttttaatttaggcgcggggtttcggtttttattggtcgttagggagggcggcgtcgaggcggttcgtttttttcgggaggatagcggtcgttatttagttttgtttcggggtatcgtttcgtttttttttttcgggttgtcggtttttaggtttttgattttattcggagcgcggggtttggggatataatacgtatttgttgggcgtttcgtagcgtttcgttacgttttcgggaatcggaggcggagtttcggtttgtgagtagcggggtttggggggtttttagtcgcgcgtt

SEQ ID NO: 17468 - DNA, 883 bp, Artificial Sequence
  chemically treated genomic DNA (Homo sapiens) CpG-island No: 17468
aacgcgcgactaaaaaccccccaaaccccgctactcacaaaccgaaactccgcctccgattcccgaaaacgtaacgaaacgctacgaaacgcccaacaaatacgtattatatccccaaaccccgcgctccgaataaaatcaaaaacctaaaaaccgacaacccgaaaaaaaaaaacgaaacgataccccgaaacaaaactaaataacgaccgctatcctcccgaaaaaaacgaaccgcctcgacgccgccctccctaacgaccaataaaaaccgaaaccccgcgcctaaattaaaacgaacgcgaaaatcaaccaaccttaaaaaccgaaacctaaccgaaaacgaaaaaacaaacgaaacgaaacgaacgccgtccgcgcgattataaaacgaaaaattccctacgccgcgaaccgaaaaacgcacgctcgctcgtacgacgaccgcgacgacaaaacgaaaccgaaacaacgaacgacgacgaaaacgacgcccgaaaacgctcttcgcttccctcgaaatcttactcgaacctcgaccaccgcctaaaatccccaaaactcgtacgtacaacataaacgacgtcgaaaaaccgaaaccgcgaaaaaaacccgcgcaaccgaaaacgccgctacccaccttctactaaaaacaaatccgcgcgcacgaccaacccgacgacaaataactaatcatcgaacgccgcgtctacgacatcaaccgctaaacacaacgacacccaaaaaacaaccgcctcatcgaccaccacgacgctaaaaacgccacgataaaaaaaccataaaaaaaccacccaccgacgaataaaacctaaaactcgatcgtaaacgtaatatcccgctccacctataaaaccttaacatc

SEQ ID NO: 17469 - DNA, 597 bp, Artificial Sequence
  chemically treated genomic DNA (Homo sapiens) CpG-island No: 17469
tttcgcgttttaggttgcgtttttatttttagtttttacgtttggcgtacgtagttacgtattatggcgtttcgtaggtagtcgaagatttcggttgcggttcgaggttcgacggcggtatgtacggtttgcgtaggttgtagggtagttcgtcggggtcgcgcgagtagaattcgtagagttttgtcggtttatagtgcgttttgtcgtcggtaatggcgtaggtgtcgttgagttggcgttcgatgggaaagtggtggaagcgtatatcgtgtacgagcgatatatatagtcgtttagcgagcgtaggtattggcgtacgaggaagagttcgttcgttatgttcgttagttttaggtgtttttcggtttcggtacgcgagatgttgtcgtagaagaagggtaggtgcgtcgcggggtttggtatcgtttttgggtttttcgaaatttgcgggtttatagagggtcggaggtacgttagggtttttttgaatttggtgcgttgggtttaaagacggcgcgagagacgttaagtggagggtattagtgtcgtagattgagttcgttaagggggtagagtttgttttgtgttagagtt

SEQ ID NO: 17470 - DNA, 597 bp, Artificial Sequence
  chemically treated genomic DNA (Homo sapiens) CpG-island No: 17470
aactctaacacaaaacaaactctacccccttaacgaactcaatctacgacactaataccctccacttaacgtctctcgcgccgtctttaaacccaacgcaccaaattcaaaaaaaccctaacgtacctccgaccctctataaacccgcaaatttcgaaaaacccaaaaacgataccaaaccccgcgacgcacctacccttcttctacgacaacatctcgcgtaccgaaaccgaaaaacacctaaaactaacgaacataacgaacgaactcttcctcgtacgccaatacctacgctcgctaaacgactatatatatcgctcgtacacgatatacgcttccaccactttcccatcgaacgccaactcaacgacacctacgccattaccgacgacaaaacgcactataaaccgacaaaactctacgaattctactcgcgcgaccccgacgaactaccctacaacctacgcaaaccgtacataccgccgtcgaacctcgaaccgcaaccgaaatcttcgactacctacgaaacgccataatacgtaactacgtacgccaaacgtaaaaactaaaaataaaaacgcaacctaaaacgcgaaa

SEQ ID NO: 17471 - DNA, 597 bp, Artificial Sequence
  chemically treated genomic DNA (Homo sapiens) CpG-island No: 17471
gattttggtatagagtaggttttgtttttttggcgagtttagtttgcggtattgatgttttttatttggcgtttttcgcgtcgtttttgggtttaacgtattaggtttaggaaggttttgacgtgttttcgattttttgtgaattcgtaggtttcgggaggtttaggggcgatgttagatttcgcggcgtatttgttttttttttacggtagtatttcgcgtgtcgaggtcgaggagtatttgaagttggcgggtatggcggacgggttttttttcgtgcgttagtgtttgcgttcgttgggcggttatgtgtgtcgttcgtgtacgatgtgcgtttttattatttttttatcgagcgttagtttaacggtatttacgttattgtcggcggtaaagcgtattgtggatcggtagagttttgcgagttttattcgcgcgatttcgacgggttgttttgtaatttgcgtaagtcgtgtatatcgtcgtcgggtttcgagtcgtagtcggggttttcgattgtttgcgagacgttatggtgcgtgattacgtgcgttagacgtggaagttggaggtgagagcgtagtttggggcgcgggg

SEQ ID NO: 17472 - DNA, 597 bp, Artificial Sequence
  chemically treated genomic DNA (Homo sapiens) CpG-island No: 17472
ccccgcgccccaaactacgctctcacctccaacttccacgtctaacgcacgtaatcacgcaccataacgtctcgcaaacaatcgaaaaccccgactacgactcgaaacccgacgacgatatacacgacttacgcaaattacaaaacaacccgtcgaaatcgcgcgaataaaactcgcaaaactctaccgatccacaatacgctttaccgccgacaataacgtaaataccgttaaactaacgctcgataaaaaaataataaaaacgcacatcgtacacgaacgacacacataaccgcccaacgaacgcaaacactaacgcacgaaaaaaaacccgtccgccatacccgccaacttcaaatactcctcgacctcgacacgcgaaatactaccgtaaaaaaaaaacaaatacgccgcgaaatctaacatcgcccctaaacctcccgaaacctacgaattcacaaaaaatcgaaaacacgtcaaaaccttcctaaacctaatacgttaaacccaaaaacgacgcgaaaaacgccaaataaaaaacatcaataccgcaaactaaactcgccaaaaaaacaaaacctactctataccaaaatc

SEQ ID NO: 17473 - DNA, 594 bp, Artificial Sequence
  chemically treated genomic DNA (Homo sapiens) CpG-island No: 17473
gcggaggaagatcgtcggggttttgtagttaacggagcggtcgttcgatttcgggacgtttatttttcggtcggtttttcggatgggtttgtagcgatatatatatatttttttgggatttgtttttcggtatttttttcgcgcgattttattttcggttttaagtaggtttaggtagaagtattatttcgtcggtagtcgttttttggatatgtttttcgttgggaattcgagttttatatttttgttttatcgtcgtttcggtttttgtttagtattatttttttatttgttttgcgtatttttcgcgagtttcggggtttttagttgacgatcgtttttatttttttttttttcgtttgtcgcggttttttataaacggggttaaattgttcgttgtaacgataatcgttattggttagagtcgtttacgcgcggtaagtggtcgtttatttgagttcgcgttgttttatgggagttttagtttttttttttagagatcgttgagatattgggggaatgcggtggtagaatatacgtcgatttagcggttgtaaagtttaggttttgttttggagttggagtgtttttggt

SEQ ID NO: 17474 - DNA, 594 bp, Artificial Sequence
  chemically treated genomic DNA (Homo sapiens) CpG-island No: 17474
accaaaaacactccaactccaaaacaaaacctaaactttacaaccgctaaatcgacgtatattctaccaccgcattcccccaatatctcaacgatctctaaaaaaaaaaactaaaactcccataaaacaacgcgaactcaaataaacgaccacttaccgcgcgtaaacgactctaaccaataacgattatcgttacaacgaacaatttaaccccgtttataaaaaaccgcgacaaacgaaaaaaaaaaaaataaaaacgatcgtcaactaaaaaccccgaaactcgcgaaaaatacgcaaaacaaataaaaaaataatactaaacaaaaaccgaaacgacgataaaacaaaaatataaaactcgaattcccaacgaaaaacatatccaaaaaacgactaccgacgaaataatacttctacctaaacctacttaaaaccgaaaataaaatcgcgcgaaaaaaataccgaaaaacaaatcccaaaaaaatatatatatatcgctacaaacccatccgaaaaaccgaccgaaaaataaacgtcccgaaatcgaacgaccgctccgttaactacaaaaccccgacgatcttcctccgc

SEQ ID NO: 17475 - DNA, 594 bp, Artificial Sequence
  chemically treated genomic DNA (Homo sapiens) CpG-island No: 17475
gttagaagtattttaattttaaggtagagtttgagttttatagtcgttaggtcggcgtatgttttattatcgtatttttttagtgttttagcggtttttgaaggagagaattaaaatttttataagataacgcgagtttaggtgggcggttatttgtcgcgcgtgggcggttttgattaataacgattgtcgttatagcgaatagtttggtttcgtttgtaaaaggtcgcggtaggcgaagagagaagaggtgagggcggtcgttagttaagggtttcggggttcgcggggggtgcgtagggtaggtaagggggtagtgttgagtaaggatcggggcggcggtggggtaggggtgtagagttcgggtttttagcggaaagtatgtttaaggagcggttgtcggcgaggtgatgtttttgtttgggtttatttgggatcggaagtgaagtcgcgcgaggaggatgtcgggaagtaggttttaaggggatatgtgtgtgtcgttgtagatttattcgagaaatcggtcgggaggtgagcgtttcggagtcgggcgatcgtttcgttgattgtagggtttcggcggttttttttcgt

SEQ ID NO: 17476 - DNA, 594 bp, Artificial Sequence
  chemically treated genomic DNA (Homo sapiens) CpG-island No: 17476
acgaaaaaaaaccgccgaaaccctacaatcaacgaaacgatcgcccgactccgaaacgctcacctcccgaccgatttctcgaataaatctacaacgacacacacatatccccttaaaacctacttcccgacatcctcctcgcgcgacttcacttccgatcccaaataaacccaaacaaaaacatcacctcgccgacaaccgctccttaaacatactttccgctaaaaacccgaactctacacccctaccccaccgccgccccgatccttactcaacactacccccttacctaccctacgcaccccccgcgaaccccgaaacccttaactaacgaccgccctcacctcttctctcttcgcctaccgcgaccttttacaaacgaaaccaaactattcgctataacgacaatcgttattaatcaaaaccgcccacgcgcgacaaataaccgcccacctaaactcgcgttatcttataaaaattttaattctctccttcaaaaaccgctaaaacactaaaaaaatacgataataaaacatacgccgacctaacgactataaaactcaaactctaccttaaaattaaaatacttctaac

SEQ ID NO: 17477 - DNA, 925 bp, Artificial Sequence
  chemically treated genomic DNA (Homo sapiens) CpG-island No: 17477
attcgcgacgttcgcgatttttaatatggcgttttatttttttttagggtattttttgtttgttttttgtatatatagtcgcgcgaggcgtagttttgagtgatttacgtacgagtggttcgcgtttttagtcgcgtcgtcgtaggttagcgagggtagtttgagtcgtttttcgtttcggcgaggatcgtcgttagttcgttgttttagtaggaggcggttttatagcgtattcggtagtttagttatcgttagtatcgcgtttcgggcgggtttttttttttttcgggaggcgcgaatttttaggggttttttgagagggcgttagggagtagttgcgcgcggatgttttttggttttttgcggtcgtcgtagtttttcggtagaaattcggaagtggaattttgagttatttagcgtttgggtgaagacggaggcgggttttatagagacgtaggttgttagggagtgtttatttcgcgttcgtttttgttttttcgcgtttttgtgttgtttcgatttatatattcgtttagaatcggttttagttttttcgcgtagaagtttttcggagttatggtcgagtatttttacgtgaagtttattaagttcgtgtttaagggaattaagacgaagaggtgggttttgtagtttgggcgggagtttttttcgtttttttcggacgtattttattttcgtaatttcggtggaagtcgtggcgcggagagtcggttttgtggttttttaggtttcgttttggtttttgttcgggttggacggaggtcgggtcgcggttttcggcgtttgtgtagagaggggtagtttttcgcgcggacgattttggaaataggatagacgggtaggtgattcgtgatttcgtatttacgagtttgggttttttgaggtatttttttaggtttttgtt

SEQ ID NO: 17478 - DNA, 925 bp, Artificial Sequence
  chemically treated genomic DNA (Homo sapiens) CpG-island No: 17478
aacaaaaacctaaaaaaatacctcaaaaaacccaaactcgtaaatacgaaatcacgaatcacctacccgtctatcctatttccaaaatcgtccgcgcgaaaaactacccctctctacacaaacgccgaaaaccgcgacccgacctccgtccaacccgaacaaaaaccaaaacgaaacctaaaaaaccacaaaaccgactctccgcgccacgacttccaccgaaattacgaaaataaaatacgtccgaaaaaaacgaaaaaaactcccgcccaaactacaaaacccacctcttcgtcttaattcccttaaacacgaacttaataaacttcacgtaaaaatactcgaccataactccgaaaaacttctacgcgaaaaaactaaaaccgattctaaacgaatatataaatcgaaacaacacaaaaacgcgaaaaaacaaaaacgaacgcgaaataaacactccctaacaacctacgtctctataaaacccgcctccgtcttcacccaaacgctaaataactcaaaattccacttccgaatttctaccgaaaaactacgacgaccgcaaaaaaccaaaaaacatccgcgcgcaactactccctaacgccctctcaaaaaacccctaaaaattcgcgcctcccgaaaaaaaaaaaaacccgcccgaaacgcgatactaacgataactaaactaccgaatacgctataaaaccgcctcctactaaaacaacgaactaacgacgatcctcgccgaaacgaaaaacgactcaaactaccctcgctaacctacgacgacgcgactaaaaacgcgaaccactcgtacgtaaatcactcaaaactacgcctcgcgcgactatatatacaaaaaacaaacaaaaaataccctaaaaaaaaataaaacgccatattaaaaatcgcgaacgtcgcgaat

SEQ ID NO: 17479 - DNA, 925 bp, Artificial Sequence
  chemically treated genomic DNA (Homo sapiens) CpG-island No: 17479
ggtagaggtttggagagatgttttaggggatttaaattcgtgggtacggggttacgggttatttgttcgtttattttgtttttagggtcgttcgcgcgggaggttgtttttttttgtatagacgtcgggaatcgcggttcggttttcgtttagttcggataggggttagggcgaagtttgggaggttataaagtcggtttttcgcgttacggtttttatcggagttgcgggggtggagtgcgttcgaaaagaacggaggaggttttcgtttaagttgtaggatttattttttcgttttggtttttttgagtacgagtttggtagattttacgtaggagtattcggttatggtttcgggaaatttttgcgcggagaggttgaggtcggttttggacgagtatgtgagtcggggtagtataggggcgcggagaaatagaagcggacgcgaaataaatattttttgatagtttacgtttttgtagaattcgttttcgtttttatttaaacgttgaatggtttagagttttattttcgggtttttgtcggggagttacggcggtcgtagagggttaaaaggtattcgcgcgtagttgttttttggcgtttttttaaggagtttttgaggattcgcgtttttcggaagggagaaaagttcgttcgaggcgcggtgttgacggtggttgggttgtcgggtgcgttgtggaatcgttttttgttagagtagcgggttggcgacggttttcgtcggggcgggaagcggtttaggttgttttcgttggtttgcggcggcgcggttggaagcgcgggttattcgtgcgtgggttatttaggattgcgtttcgcgcgattgtgtgtgtaggaaataagtaggaaatattttaaaagagaatgaagcgttatgttgagggtcgcggacgtcgcgagt

SEQ ID NO: 17480 - DNA, 925 bp, Artificial Sequence
  chemically treated genomic DNA (Homo sapiens) CpG-island No: 17480
actcgcgacgtccgcgaccctcaacataacgcttcattctcttttaaaatatttcctacttatttcctacacacacaatcgcgcgaaacgcaatcctaaataacccacgcacgaataacccgcgcttccaaccgcgccgccgcaaaccaacgaaaacaacctaaaccgcttcccgccccgacgaaaaccgtcgccaacccgctactctaacaaaaaacgattccacaacgcacccgacaacccaaccaccgtcaacaccgcgcctcgaacgaacttttctcccttccgaaaaacgcgaatcctcaaaaactccttaaaaaaacgccaaaaaacaactacgcgcgaataccttttaaccctctacgaccgccgtaactccccgacaaaaacccgaaaataaaactctaaaccattcaacgtttaaataaaaacgaaaacgaattctacaaaaacgtaaactatcaaaaaatatttatttcgcgtccgcttctatttctccgcgcccctatactaccccgactcacatactcgtccaaaaccgacctcaacctctccgcgcaaaaatttcccgaaaccataaccgaatactcctacgtaaaatctaccaaactcgtactcaaaaaaaccaaaacgaaaaaataaatcctacaacttaaacgaaaacctcctccgttcttttcgaacgcactccacccccgcaactccgataaaaaccgtaacgcgaaaaaccgactttataacctcccaaacttcgccctaacccctatccgaactaaacgaaaaccgaaccgcgattcccgacgtctatacaaaaaaaaacaacctcccgcgcgaacgaccctaaaaacaaaataaacgaacaaataacccgtaaccccgtacccacgaatttaaatcccctaaaacatctctccaaacctctacc

SEQ ID NO: 17481 - DNA, 579 bp, Artificial Sequence
  chemically treated genomic DNA (Homo sapiens) CpG-island No: 17481
gggagtttttattgtggtcggtttggaaatcggaaaggagagcgaagttacgatgttgtttttttacgtttcgttggaggtttttgtgttttcgtagagttcgggaaatagttaacgtggtcgcgttttcgggggcgggagatacgcgagtaataggtttttttgtagagggcgaaggagcgtggaattcggaattacggtttattcggttcgagtgtgattttcgtgtggacgggtttgttcgtttcgcgttttgttgtttaacgcggggtcgtgtcgtttgtgaattacgtggatggaaaacggataattattcgcgtttcggtttattgtttttattttttgggaggcggaattcgttcgaattgtttcgggatgaagtgattcgggtcggcgattcggagggttggtgagttggtgggcgtttcgtaagtagacgcggttgtgggtcgagttttcggtttgtatcgggtattttacgttttttcggagtgcgaggtttcgttggttttggaggcggaagatcgtttttttttttgtttttttttttgtttttttttttgttttttgttttttttt

SEQ ID NO: 17482 - DNA, 579 bp, Artificial Sequence
  chemically treated genomic DNA (Homo sapiens) CpG-island No: 17482
aaaaaaaaacaaaaaacaaaaaaaaaaacaaaaaaaaaaacaaaaaaaaaaacgatcttccgcctccaaaaccaacgaaacctcgcactccgaaaaaacgtaaaatacccgatacaaaccgaaaactcgacccacaaccgcgtctacttacgaaacgcccaccaactcaccaaccctccgaatcgccgacccgaatcacttcatcccgaaacaattcgaacgaattccgcctcccaaaaaataaaaacaataaaccgaaacgcgaataattatccgttttccatccacgtaattcacaaacgacacgaccccgcgttaaacaacaaaacgcgaaacgaacaaacccgtccacacgaaaatcacactcgaaccgaataaaccgtaattccgaattccacgctccttcgccctctacaaaaaaacctattactcgcgtatctcccgcccccgaaaacgcgaccacgttaactatttcccgaactctacgaaaacacaaaaacctccaacgaaacgtaaaaaaacaacatcgtaacttcgctctcctttccgatttccaaaccgaccacaataaaaactccc

SEQ ID NO: 17483 - DNA, 579 bp, Artificial Sequence
  chemically treated genomic DNA (Homo sapiens) CpG-island No: 17483
gaaagggagtaagagatagagaggaaagtagagaggaaagtagagaggaaagcggtttttcgtttttagggttagcgggatttcgtatttcgggaaaacgtggggtgttcggtgtaggtcgagagttcggtttatagtcgcgtttgtttgcggggcgtttattagtttattagtttttcggatcgtcggttcgggttattttatttcggagtaattcggacgaatttcgttttttaaggaatgagagtaatgagtcgagacgcgggtgattgttcgttttttatttacgtggtttatagacgatacggtttcgcgttgagtaatagagcgcgaggcggataggttcgtttatacgggagttatattcgggtcgagtgaatcgtgatttcgggttttacgttttttcgttttttgtaaggggatttgttgttcgcgtgtttttcgttttcgaaagcgcgattacgttggttgtttttcgagttttgcggggatatagaaatttttagcgaagcgtggaaaagtagtatcgtgatttcgttttttttttcggtttttagatcggttatagtggagattttt

SEQ ID NO: 17484 - DNA, 579 bp, Artificial Sequence
  chemically treated genomic DNA (Homo sapiens) CpG-island No: 17484
aaaaatctccactataaccgatctaaaaaccgaaaaaaaaaacgaaatcacgatactacttttccacgcttcgctaaaaatttctatatccccgcaaaactcgaaaaacaaccaacgtaatcgcgctttcgaaaacgaaaaacacgcgaacaacaaatccccttacaaaaaacgaaaaaacgtaaaacccgaaatcacgattcactcgacccgaatataactcccgtataaacgaacctatccgcctcgcgctctattactcaacgcgaaaccgtatcgtctataaaccacgtaaataaaaaacgaacaatcacccgcgtctcgactcattactctcattccttaaaaaacgaaattcgtccgaattactccgaaataaaataacccgaaccgacgatccgaaaaactaataaactaataaacgccccgcaaacaaacgcgactataaaccgaactctcgacctacaccgaacaccccacgttttcccgaaatacgaaatcccgctaaccctaaaaacgaaaaaccgctttcctctctactttcctctctactttcctctctatctcttactccctttc

SEQ ID NO: 17485 - DNA, 814 bp, Artificial Sequence
  chemically treated genomic DNA (Homo sapiens) CpG-island No: 17485
ggagtcgcgagggagaggagggtttagagttcggagtgggcggtgtttgagtaggggcggggcggggtcggggtttggagttggggacgcgggtcggggtcgggagttgcggattcgttggcgggtgggaggagcggaatcggggggaggttggcggaaatttaggggatcgttcggttgggttttgcgtatttcggattattagtttcgggcgttggtttttatcgaggttgtttaggcgtcgttttttcgcgtttttgcgataggaggcgtttgttgggcgcgttatggatttcgtttcgcggagacgtttggttcgggttttgtttttagtgagcggttggagcggtcgcggggtcgtagagttttcgggatttcgaggaagggcgtttttcggagttgttcgaggtcgggttcggcgtttattcgttattcgtttcgttttttttcggtttcgtatcgttttttatttcgtttttttcgggttttttttgcgttcggtagagtttgcgcgttttattcggacggttacggattcgtagtttcggcgaggacgttgtttgcgtttcgattgtttggattttttcgcgtggttttcggcgaagtttagtagtcggagggtgttaggttcgtttgacgcgtttttttttacgggaagaacggggcgggggtttaggagggacgtaagtcgggttttttcggcgtgttgattcgaattcgcgcgggaaaatttgcgtaaattaaaggagggaagagttaggtagtttttagttttttagggaggtttaggtgaaaaatagacgtcggtttcgtt

SEQ ID NO: 17486 - DNA, 814 bp, Artificial Sequence
  chemically treated genomic DNA (Homo sapiens) CpG-island No: 17486
aacgaaaccgacgtctatttttcacctaaacctccctaaaaaactaaaaactacctaactcttccctcctttaatttacgcaaattttcccgcgcgaattcgaatcaacacgccgaaaaaacccgacttacgtccctcctaaacccccgccccgttcttcccgtaaaaaaaaacgcgtcaaacgaacctaacaccctccgactactaaacttcgccgaaaaccacgcgaaaaaatccaaacaatcgaaacgcaaacaacgtcctcgccgaaactacgaatccgtaaccgtccgaataaaacgcgcaaactctaccgaacgcaaaaaaaacccgaaaaaaacgaaataaaaaacgatacgaaaccgaaaaaaaacgaaacgaataacgaataaacgccgaacccgacctcgaacaactccgaaaaacgcccttcctcgaaatcccgaaaactctacgaccccgcgaccgctccaaccgctcactaaaaacaaaacccgaaccaaacgtctccgcgaaacgaaatccataacgcgcccaacaaacgcctcctatcgcaaaaacgcgaaaaaacgacgcctaaacaacctcgataaaaaccaacgcccgaaactaataatccgaaatacgcaaaacccaaccgaacgatcccctaaatttccgccaacctccccccgattccgctcctcccacccgccaacgaatccgcaactcccgaccccgacccgcgtccccaactccaaaccccgaccccgccccgcccctactcaaacaccgcccactccgaactctaaaccctcctctccctcgcgactcc

SEQ ID NO: 17487 - DNA, 814 bp, Artificial Sequence
  chemically treated genomic DNA (Homo sapiens) CpG-island No: 17487
ggcgaggtcggcgtttgttttttatttgggtttttttggggggttgggggttgtttgattttttttttttttggtttgcgtaagttttttcgcgcgggttcggattaatacgtcgggggagttcggtttacgttttttttggattttcgtttcgtttttttcgtggggaggggcgcgttaggcggatttggtatttttcgattgttgggtttcgtcgggagttacgcggggaggtttaggtagtcgggacgtaggtagcgttttcgtcgaggttgcgagttcgtggtcgttcgggtgaggcgcgtaggttttgtcggacgtagaaggaattcgaaggaggcggggtggagggcggtgcggggtcggggaggggcgaggcgagtggcgagtggacgtcgggttcggtttcgggtaatttcgaggggcgttttttttcggggtttcggaggttttgcgatttcgcggtcgttttagtcgtttattggggataaggttcgagttaggcgttttcgcgaggcggggtttatagcgcgtttagtaggcgttttttgtcgtagggacgcgggggagcggcgtttgaatagtttcggtgggaattagcgttcgaagttggtgattcggggtgcgtagggtttagtcgggcgattttttggattttcgttagttttttttcgatttcgttttttttattcgttagcgagttcgtaattttcggtttcggttcgcgtttttagttttaggtttcggtttcgtttcgtttttgtttaggtatcgtttatttcgggttttgggtttttttttttttcgcggtttt

SEQ ID NO: 17488 - DNA, 814 bp, Artificial Sequence
  chemically treated genomic DNA (Homo sapiens) CpG-island No: 17488
aaaaccgcgaaaaaaaaaaaaacccaaaacccgaaataaacgatacctaaacaaaaacgaaacgaaaccgaaacctaaaactaaaaacgcgaaccgaaaccgaaaattacgaactcgctaacgaataaaaaaaacgaaatcgaaaaaaaactaacgaaaatccaaaaaatcgcccgactaaaccctacgcaccccgaatcaccaacttcgaacgctaattcccaccgaaactattcaaacgccgctcccccgcgtccctacgacaaaaaacgcctactaaacgcgctataaaccccgcctcgcgaaaacgcctaactcgaaccttatccccaataaacgactaaaacgaccgcgaaatcgcaaaacctccgaaaccccgaaaaaaaacgcccctcgaaattacccgaaaccgaacccgacgtccactcgccactcgcctcgcccctccccgaccccgcaccgccctccaccccgcctccttcgaattccttctacgtccgacaaaacctacgcgcctcacccgaacgaccacgaactcgcaacctcgacgaaaacgctacctacgtcccgactacctaaacctccccgcgtaactcccgacgaaacccaacaatcgaaaaataccaaatccgcctaacgcgcccctccccacgaaaaaaacgaaacgaaaatccaaaaaaaacgtaaaccgaactcccccgacgtattaatccgaacccgcgcgaaaaaacttacgcaaaccaaaaaaaaaaaaaatcaaacaacccccaaccccccaaaaaaacccaaataaaaaacaaacgccgacctcgcc

SEQ ID NO: 17489 - DNA, 678 bp, Artificial Sequence
  chemically treated genomic DNA (Homo sapiens) CpG-island No: 17489
ttacggtcggattcggttttaggggagtttcgcggagtttcgtcgtaggtttcgatttttttacgttcgtattttgggcgtttttatcgtattttcgaggttggtaattcgcgtttttcgggagttgagggaggtttgttttttttagttcgtcgtttttgttcgttttcgagttcgttttattttatattttagacgtcgaatttttttttttttttcgtcgtttttcgttggttagttttttttcgtttttttaatttttttagggacggttgtgttaggttagttttaagcgtcgtcgtcgttcgcgacgttcgttttattttagggttcgagtcgtagagttgttaggtttggacgcgttcgagtttgttgatttagtgcgggtgattagttggatttgtgcgagggcgcggacgcgtattcgttttttattggcgtaggtagagttggtagcgtcgaagtcgcgattcgttttttgtagagcgtatttgagggcggggtttttagaaagcgcgtcgcgtacgggcggttttagacgttcggtttcgcgcgtttcggcgtacgtaggtaagtagcgcgttcggaagaggagagcggttgagggtggggcgagcggtgggcgtcgttgtttagggtttttgagttattagagtcgggtttcgtggttttttttta

SEQ ID NO: 17490 - DNA, 678 bp, Artificial Sequence
  chemically treated genomic DNA (Homo sapiens) CpG-island No: 17490
taaaaaaaaaccacgaaacccgactctaataactcaaaaaccctaaacaacgacgcccaccgctcgccccaccctcaaccgctctcctcttccgaacgcgctacttacctacgtacgccgaaacgcgcgaaaccgaacgtctaaaaccgcccgtacgcgacgcgctttctaaaaaccccgccctcaaatacgctctacaaaaaacgaatcgcgacttcgacgctaccaactctacctacgccaataaaaaacgaatacgcgtccgcgccctcgcacaaatccaactaatcacccgcactaaatcaacaaactcgaacgcgtccaaacctaacaactctacgactcgaaccctaaaataaaacgaacgtcgcgaacgacgacgacgcttaaaactaacctaacacaaccgtccctaaaaaaattaaaaaaacgaaaaaaaactaaccaacgaaaaacgacgaaaaaaaaaaaaaaattcgacgtctaaaatataaaataaaacgaactcgaaaacgaacaaaaacgacgaactaaaaaaaacaaacctccctcaactcccgaaaaacgcgaattaccaacctcgaaaatacgataaaaacgcccaaaatacgaacgtaaaaaaatcgaaacctacgacgaaactccgcgaaactcccctaaaaccgaatccgaccgtaa

SEQ ID NO: 17491 - DNA, 678 bp, Artificial Sequence
  chemically treated genomic DNA (Homo sapiens) CpG-island No: 17491
tggggaagagttacgaggttcgattttagtggtttaggggttttgggtagcggcgtttatcgttcgttttatttttagtcgtttttttttttcgggcgcgttgtttgtttgcgtgcgtcgggacgcgcggggtcgagcgtttgaagtcgttcgtacgcgacgcgttttttaggagtttcgtttttaggtgcgttttgtaggaggcgggtcgcgatttcggcgttgttagttttgtttgcgttagtgaggggcgggtgcgcgttcgcgttttcgtatagatttagttggttattcgtattgagttaatagattcgagcgcgtttaggtttgatagttttgcggttcgggttttgaggtgaggcggacgtcgcgggcggcggcggcgtttgaggttagtttggtatagtcgtttttgggggagttgaggggacgaggaggggttggttagcgagggacggcggggagagaaggggagttcggcgtttgaggtgtggggtgaagcgggttcggaagcgggtagaggcggcgagttgagggaaatagattttttttagttttcgggaagcgcgggttgttagtttcggggatgcggtgggagcgtttaggatgcggacgtgagggggtcggggtttgcggcggggtttcgcgaggtttttttgggatcgggttcggtcgtgg

SEQ ID NO: 17492 - DNA, 678 bp, Artificial Sequence
  chemically treated genomic DNA (Homo sapiens) CpG-island No: 17492
ccacgaccgaacccgatcccaaaaaaacctcgcgaaaccccgccgcaaaccccgaccccctcacgtccgcatcctaaacgctcccaccgcatccccgaaactaacaacccgcgcttcccgaaaactaaaaaaaatctatttccctcaactcgccgcctctacccgcttccgaacccgcttcaccccacacctcaaacgccgaactccccttctctccccgccgtccctcgctaaccaacccctcctcgtcccctcaactcccccaaaaacgactataccaaactaacctcaaacgccgccgccgcccgcgacgtccgcctcacctcaaaacccgaaccgcaaaactatcaaacctaaacgcgctcgaatctattaactcaatacgaataaccaactaaatctatacgaaaacgcgaacgcgcacccgcccctcactaacgcaaacaaaactaacaacgccgaaatcgcgacccgcctcctacaaaacgcacctaaaaacgaaactcctaaaaaacgcgtcgcgtacgaacgacttcaaacgctcgaccccgcgcgtcccgacgcacgcaaacaaacaacgcgcccgaaaaaaaaaaacgactaaaaataaaacgaacgataaacgccgctacccaaaacccctaaaccactaaaatcgaacctcgtaactcttcccca

SEQ ID NO: 17493 - DNA, 523 bp, Artificial Sequence
  chemically treated genomic DNA (Homo sapiens) CpG-island No: 17493
cgcggaacgaggcggatcggaggggagatatagtatcgagtagagaatatgcgagcgaagcgcggtacggcgagcgagattcggggagcgaaggggagggtcgtatgttagcggggagtaggcgaggggcgacgggaagggtggtacgagttaggttcggaagcgaagagcggcgtgagttttggatcgggtcgacggaggtggtatataagggcgggggcggagagttaatcggcgaggggggtcgaaggtggggggacgtcgaggatgtagaaggtcggcggatagggtaggacgagagtggggaggtagttcgaagtaagaggcgaggggagaagaggtttgcgggtatgacgaggagcgaggaggcggagaatagaagcgcgagagtatagttagttagaaggcggaagattttgatgagacgttcgaaaacggggtggaggtggttggagaggtgaaatgagtgtaggttagtatgtgggtatatgtggattatttagtcgtgttaaattagggtata

SEQ ID NO: 17494 - DNA, 523 bp, Artificial Sequence
  chemically treated genomic DNA (Homo sapiens) CpG-island No: 17494
tataccctaatttaacacgactaaataatccacatatacccacatactaacctacactcatttcacctctccaaccacctccaccccgttttcgaacgtctcatcaaaatcttccgccttctaactaactatactctcgcgcttctattctccgcctcctcgctcctcgtcatacccgcaaacctcttctcccctcgcctcttacttcgaactacctccccactctcgtcctaccctatccgccgaccttctacatcctcgacgtccccccaccttcgacccccctcgccgattaactctccgcccccgcccttatataccacctccgtcgacccgatccaaaactcacgccgctcttcgcttccgaacctaactcgtaccacccttcccgtcgcccctcgcctactccccgctaacatacgaccctccccttcgctccccgaatctcgctcgccgtaccgcgcttcgctcgcatattctctactcgatactatatctcccctccgatccgcctcgttccgcg

SEQ ID NO: 17495 - DNA, 523 bp, Artificial Sequence
  chemically treated genomic DNA (Homo sapiens) CpG-island No: 17495
tgtattttagtttaatacgattaagtagtttatatgtgtttatatattagtttgtatttattttatttttttagttatttttatttcgttttcgagcgttttattagaatttttcgttttttggttggttgtattttcgcgtttttatttttcgttttttcgtttttcgttatgttcgtaggtttttttttttttcgttttttgtttcgggttgtttttttattttcgttttgttttattcgtcggttttttgtattttcgacgtttttttattttcgatttttttcgtcgattggtttttcgttttcgtttttatgtgttattttcgtcggttcggtttagaatttacgtcgtttttcgttttcgggtttggttcgtgttatttttttcgtcgtttttcgtttgtttttcgttggtatgcggttttttttttcgtttttcggatttcgttcgtcgtgtcgcgtttcgttcgtatgttttttgttcggtgttgtgtttttttttcgattcgtttcgtttcgcg

SEQ ID NO: 17496 - DNA, 523 bp, Artificial Sequence
  chemically treated genomic DNA (Homo sapiens) CpG-island No: 17496
cgcgaaacgaaacgaatcgaaaaaaaaacacaacaccgaacaaaaaacatacgaacgaaacgcgacacgacgaacgaaatccgaaaaacgaaaaaaaaaaccgcataccaacgaaaaacaaacgaaaaacgacgaaaaaaataacacgaaccaaacccgaaaacgaaaaacgacgtaaattctaaaccgaaccgacgaaaataacacataaaaacgaaaacgaaaaaccaatcgacgaaaaaaatcgaaaataaaaaaacgtcgaaaatacaaaaaaccgacgaataaaacaaaacgaaaataaaaaaacaacccgaaacaaaaaacgaaaaaaaaaaaaacctacgaacataacgaaaaacgaaaaaacgaaaaataaaaacgcgaaaatacaaccaaccaaaaaacgaaaaattctaataaaacgctcgaaaacgaaataaaaataactaaaaaaataaaataaatacaaactaatatataaacacatataaactacttaatcgtattaaactaaaataca

SEQ ID NO: 17497 - DNA, 1193 bp, Artificial Sequence
  chemically treated genomic DNA (Homo sapiens) CpG-island No: 17497
gcggacgttgttttcgttcggtcgtagaggtttcgcggttagggtttcgcgtgcggggtatcgggggtagaattagcgcgtgatcggggttcgcggtgtcgtaacgtttcgggtttgcgtagaggtttttgtagtttttgttcggtttagttcgagtttttcgggcgggtttttagttcggcgatttgtaggaatttttttcggcgtttttacgcgaagtcgtcgtagggtttttttgtaaagttttattagtttgaaggacgcgaattttagcgagagaatttgcggaaagcgaatatgtggggcgcgtagacggggaaattgagtttcgcgagagggtcggtttgtgcgttgtttcgttcgcgtttcgttagtatcgtcgtgttcgggcgcgttcgttttgtttttttcgcgggcggtttcggtttagtcgttcgttttttttttcgttattcggttagtttttatttcgggcgtcgtgttcgtttttaaggcggttcgttatcgttgcgaggttaatgggttgggtcgcgcggtcgcgcgtattcgtattcgttgttttcgaggtttttttgtatttttttcggcgtcgtttttcggttttcgttttgttcgtcgttatcgtcgtcgtcgttagagtcgttatgtagatttcgcgcgtcgtttttttttcgttgttgttgttgttgttggcggcgttcgtttcggcgtagttgtttcgggtcggtcgttcggcgtttttggtcgtcggttgtttagatcgttgcgagtcggcgcgttgttcgtcgtagtcggagtattgcgagggcggtcgggttcgggacgcgtgcggttgttgcgaggtgtgcggcgcgttcgagggcgtcgcgtgcggtttgtaggagggttcgtgcggcgaggggttgtagtgcgtggtgtttttcggggtgttagtttcggttacggtgcggcggcgcgcgtaggtcggtttttgtgtgtgcgttagtagcgagtcggtgtgcggtagcgacgttaatatttacgttaatttgtgttagttgcgcgtcgttagtcgtcgtttcgagaggttgtatcggtcgtcggttatcgttttgtagcgcggagtttgcggttaaggtatttcgtcgcgtttttgggtagttttttattttttttattttagttcggatttgtttttgcgggattggtgggta

SEQ ID NO: 17498 - DNA, 1193 bp, Artificial Sequence
  chemically treated genomic DNA (Homo sapiens) CpG-island No: 17498
tacccaccaatcccgcaaaaacaaatccgaactaaaataaaaaaaataaaaaactacccaaaaacgcgacgaaataccttaaccgcaaactccgcgctacaaaacgataaccgacgaccgatacaacctctcgaaacgacgactaacgacgcgcaactaacacaaattaacgtaaatattaacgtcgctaccgcacaccgactcgctactaacgcacacacaaaaaccgacctacgcgcgccgccgcaccgtaaccgaaactaacaccccgaaaaacaccacgcactacaacccctcgccgcacgaaccctcctacaaaccgcacgcgacgccctcgaacgcgccgcacacctcgcaacaaccgcacgcgtcccgaacccgaccgccctcgcaatactccgactacgacgaacaacgcgccgactcgcaacgatctaaacaaccgacgaccaaaaacgccgaacgaccgacccgaaacaactacgccgaaacgaacgccgccaacaacaacaacaacaacgaaaaaaaaacgacgcgcgaaatctacataacgactctaacgacgacgacgataacgacgaacaaaacgaaaaccgaaaaacgacgccgaaaaaaatacaaaaaaacctcgaaaacaacgaatacgaatacgcgcgaccgcgcgacccaacccattaacctcgcaacgataacgaaccgccttaaaaacgaacacgacgcccgaaataaaaactaaccgaataacgaaaaaaaaaacgaacgactaaaccgaaaccgcccgcgaaaaaaacaaaacgaacgcgcccgaacacgacgatactaacgaaacgcgaacgaaacaacgcacaaaccgaccctctcgcgaaactcaatttccccgtctacgcgccccacatattcgctttccgcaaattctctcgctaaaattcgcgtccttcaaactaataaaactttacaaaaaaaccctacgacgacttcgcgtaaaaacgccgaaaaaaattcctacaaatcgccgaactaaaaacccgcccgaaaaactcgaactaaaccgaacaaaaactacaaaaacctctacgcaaacccgaaacgttacgacaccgcgaaccccgatcacgcgctaattctacccccgataccccgcacgcgaaaccctaaccgcgaaacctctacgaccgaacgaaaacaacgtccgc

SEQ ID NO: 17499 - DNA, 1193 bp, Artificial Sequence
  chemically treated genomic DNA (Homo sapiens) CpG-island No: 17499
tgtttattagtttcgtagaagtaggttcgagttgggatggagagagtggggagttgtttaggagcgcggcggagtattttggtcgtaggtttcgcgttgtaggacgatgatcggcggtcggtgtagtttttcggagcggcggttggcggcgcgtagttggtataggttggcgtaggtgttggcgtcgttgtcgtatatcggttcgttgttggcgtatatatagaggtcggtttgcgcgcgtcgtcgtatcgtggtcgaggttggtatttcgaagggtattacgtattgtagtttttcgtcgtacgggtttttttgtaggtcgtacgcggcgttttcgggcgcgtcgtatatttcgtagtagtcgtacgcgtttcgggttcggtcgttttcgtagtgtttcggttgcggcgggtagcgcgtcggttcgtagcggtttgggtagtcggcggttaaaggcgtcgagcggtcggttcgggatagttgcgtcgaggcgggcgtcgttagtagtagtagtagtagcgggagaagagcggcgcgcgggatttgtatggcgattttggcggcggcggcggtggcggcggatagggcgagggtcggagagcggcgtcggggagagtgtaggagggtttcgggggtagcgggtgcgagtgcgcgcggtcgcgcggtttagtttattggtttcgtagcggtgacgagtcgttttggggacgggtacggcgttcgggatgggggttggtcggatggcgggagggagggcgggcggttggatcgggatcgttcgcggagggggtagggcgggcgcgttcgggtacggcggtgttggcggggcgcgggcggggtagcgtataggtcggttttttcgcgggatttagttttttcgtttgcgcgttttatatattcgtttttcgtaggttttttcgttgagattcgcgttttttaaattaatggaattttgtaagggggttttgcggcggtttcgcgtgggagcgtcggggaaagtttttgtaaatcgtcggattgggggttcgttcgggaggttcggattgggtcgggtagggattgtaggggtttttgcgtagattcggggcgttgcggtatcgcggatttcggttacgcgttggttttgttttcggtatttcgtacgcgggattttgatcgcggggtttttgcggtcggacgaaggtagcgttcgt

SEQ ID NO: 17500 - DNA, 1193 bp, Artificial Sequence
  chemically treated genomic DNA (Homo sapiens) CpG-island No: 17500
acgaacgctaccttcgtccgaccgcaaaaaccccgcgatcaaaatcccgcgtacgaaataccgaaaacaaaaccaacgcgtaaccgaaatccgcgataccgcaacgccccgaatctacgcaaaaacccctacaatccctacccgacccaatccgaacctcccgaacgaacccccaatccgacgatttacaaaaactttccccgacgctcccacgcgaaaccgccgcaaaacccccttacaaaattccattaatttaaaaaacgcgaatctcaacgaaaaaacctacgaaaaacgaatatataaaacgcgcaaacgaaaaaactaaatcccgcgaaaaaaccgacctatacgctaccccgcccgcgccccgccaacaccgccgtacccgaacgcgcccgccctaccccctccgcgaacgatcccgatccaaccgcccgccctccctcccgccatccgaccaacccccatcccgaacgccgtacccgtccccaaaacgactcgtcaccgctacgaaaccaataaactaaaccgcgcgaccgcgcgcactcgcacccgctacccccgaaaccctcctacactctccccgacgccgctctccgaccctcgccctatccgccgccaccgccgccgccgccaaaatcgccatacaaatcccgcgcgccgctcttctcccgctactactactactactaacgacgcccgcctcgacgcaactatcccgaaccgaccgctcgacgcctttaaccgccgactacccaaaccgctacgaaccgacgcgctacccgccgcaaccgaaacactacgaaaacgaccgaacccgaaacgcgtacgactactacgaaatatacgacgcgcccgaaaacgccgcgtacgacctacaaaaaaacccgtacgacgaaaaactacaatacgtaatacccttcgaaataccaacctcgaccacgatacgacgacgcgcgcaaaccgacctctatatatacgccaacaacgaaccgatatacgacaacgacgccaacacctacgccaacctataccaactacgcgccgccaaccgccgctccgaaaaactacaccgaccgccgatcatcgtcctacaacgcgaaacctacgaccaaaatactccgccgcgctcctaaacaactccccactctctccatcccaactcgaacctacttctacgaaactaataaaca

SEQ ID NO: 17501 - DNA, 975 bp, Artificial Sequence
  chemically treated genomic DNA (Homo sapiens) CpG-island No: 17501
gacgggtgttttcggttttttttattttcggtcggtttagtttggttttattcgagttttgttgtgaaattcgttattttcgttggtttcggtaaaaagtaaggcgtttcgtttcgagggtagagttttttgtaattgtcggataaatatttttcgaaagtttttcgcggtttttacgttcggtttttttattttacgagtttcggggaggggtttatttgtttttcgtcgttcgttttatattttgtcgtcgcggttgtattcgcgcgcgaggggcggggggtagggggcgcggcgagagttggggatcggcggcgttcgtattgagaaagtagttttcgtcgcgttcgttatggcgcgcggcggcggtagcggtttttttcggtttttttgttttttcgtttttagtttgatttttttttttagtgtgtttgagggagagcggttgtgcgcgcgcgtgtatatgtttttgtgtgtgtgtgcgcgcgcgcgtggggaaggggtcgggttcgtttttcgacgtttgacgttattgttatggtaacggtaattttcgtttttcgttttttattttttgttttcgtttattgtgtacgttttggggtttttacgtgtttatttatacgtacgtacgtaggtacgtattttcggggcgcgcgcgtttagagcgttggggtttgggaggtaatttggattttcgtttgttttttttttttcgttgtttttcggaatttgattaatttcgtgaggaggagtcgtgggcggggcgggttcggttttcggagtggcgtgaaaaatttttcgaggtagagcgaaaagtttttatgcgttattgagtatgttcggtgttcgaaggggcgttttggacgttagtgaagcgaggagaggcggagaaggaatcgagcgggtagttgagggaaatttcggaggaggttatttgcgattaaattggggttgcgtattgttagggttagg

SEQ ID NO: 17502 - DNA, 975 bp, Artificial Sequence
  chemically treated genomic DNA (Homo sapiens) CpG-island No: 17502
cctaaccctaacaatacgcaaccccaatttaatcgcaaataacctcctccgaaatttccctcaactacccgctcgattccttctccgcctctcctcgcttcactaacgtccaaaacgccccttcgaacaccgaacatactcaataacgcataaaaacttttcgctctacctcgaaaaatttttcacgccactccgaaaaccgaacccgccccgcccacgactcctcctcacgaaattaatcaaattccgaaaaacaacgaaaaaaaaaaaacaaacgaaaatccaaattacctcccaaaccccaacgctctaaacgcgcgcgccccgaaaatacgtacctacgtacgtacgtataaataaacacgtaaaaaccccaaaacgtacacaataaacgaaaacaaaaaataaaaaacgaaaaacgaaaattaccgttaccataacaataacgtcaaacgtcgaaaaacgaacccgaccccttccccacgcgcgcgcgcacacacacacaaaaacatatacacgcgcgcgcacaaccgctctccctcaaacacactaaaaaaaaaaatcaaactaaaaacgaaaaaacaaaaaaaccgaaaaaaaccgctaccgccgccgcgcgccataacgaacgcgacgaaaactactttctcaatacgaacgccgccgatccccaactctcgccgcgccccctaccccccgcccctcgcgcgcgaatacaaccgcgacgacaaaatataaaacgaacgacgaaaaacaaataaacccctccccgaaactcgtaaaataaaaaaaccgaacgtaaaaaccgcgaaaaactttcgaaaaatatttatccgacaattacaaaaaactctaccctcgaaacgaaacgccttactttttaccgaaaccaacgaaaataacgaatttcacaacaaaactcgaataaaaccaaactaaaccgaccgaaaataaaaaaaaccgaaaacacccgtc

SEQ ID NO: 17503 - DNA, 975 bp, Artificial Sequence
  chemically treated genomic DNA (Homo sapiens) CpG-island No: 17503
tttgattttaataatacgtagttttagtttgatcgtaggtaatttttttcgagattttttttaattgttcgttcggtttttttttcgttttttttcgttttattggcgtttaaagcgttttttcgggtatcggatatgtttagtaacgtatgaagatttttcgttttgtttcgggaaattttttacgttatttcgggagtcgagttcgtttcgtttacggtttttttttacgggattggttaaatttcgggaggtagcgagggaagggaggtaggcggaggtttaaattattttttaaattttagcgttttgggcgcgcgcgtttcgagagtgcgtgtttgcgtgcgtgcgtgtgagtgagtacgtgagggttttagaacgtgtatagtgggcggggataggaaatgggaagcgaggggcgggggttgtcgttgttatggtagtgacgttaggcgtcggggagcgaattcggttttttttttacgcgcgcgcgtatatatatatagagatatgtatacgcgcgcgtatagtcgtttttttttagatatattggagggaaaggttaaattaaaggcgagggagtagagagatcggagggagtcgttgtcgtcgtcgcgcgttatgacggacgcggcggaagttgtttttttagtgcggacgtcgtcgatttttagttttcgtcgcgttttttgtttttcgtttttcgcgcgcgagtgtagtcgcggcgatagggtatggggcgggcggcgggaggtaggtgggttttttttcggggttcgtgaagtggggggatcgggcgtgggggtcgcgggaagttttcgggaaatgtttattcggtagttgtaagaaattttgttttcgggacgaggcgttttgttttttgtcggggttagcgaaagtggcggattttatagtaaaattcgggtgaagttaggttggatcggtcgggagtgagagaggtcgggagtattcgtt

SEQ ID NO: 17504 - DNA, 975 bp, Artificial Sequence
  chemically treated genomic DNA (Homo sapiens) CpG-island No: 17504
aacgaatactcccgacctctctcactcccgaccgatccaacctaacttcacccgaattttactataaaatccgccactttcgctaaccccgacaaaaaacaaaacgcctcgtcccgaaaacaaaatttcttacaactaccgaataaacatttcccgaaaacttcccgcgacccccacgcccgatccccccacttcacgaaccccgaaaaaaaacccacctacctcccgccgcccgccccataccctatcgccgcgactacactcgcgcgcgaaaaacgaaaaacaaaaaacgcgacgaaaactaaaaatcgacgacgtccgcactaaaaaaacaacttccgccgcgtccgtcataacgcgcgacgacgacaacgactccctccgatctctctactccctcgcctttaatttaacctttccctccaatatatctaaaaaaaaacgactatacgcgcgcgtatacatatctctatatatatatacgcgcgcgcgtaaaaaaaaaaccgaattcgctccccgacgcctaacgtcactaccataacaacgacaacccccgcccctcgcttcccatttcctatccccgcccactatacacgttctaaaaccctcacgtactcactcacacgcacgcacgcaaacacgcactctcgaaacgcgcgcgcccaaaacgctaaaatttaaaaaataatttaaacctccgcctacctcccttccctcgctacctcccgaaatttaaccaatcccgtaaaaaaaaaccgtaaacgaaacgaactcgactcccgaaataacgtaaaaaatttcccgaaacaaaacgaaaaatcttcatacgttactaaacatatccgatacccgaaaaaacgctttaaacgccaataaaacgaaaaaaaacgaaaaaaaaaccgaacgaacaattaaaaaaaatctcgaaaaaaattacctacgatcaaactaaaactacgtattattaaaatcaaa

SEQ ID NO: 17505 - DNA, 915 bp, Artificial Sequence
  chemically treated genomic DNA (Homo sapiens) CpG-island No: 17505
tttttcgttttattggcgtttaaagcgttttttcgggtatcggatatgtttagtaacgtatgaagatttttcgttttgtttcgggaaattttttacgttatttcgggagtcgagttcgtttcgtttacggtttttttttacgggattggttaaatttcgggaggtagcgagggaagggaggtaggcggaggtttaaattattttttaaattttagcgttttgggcgcgcgcgtttcgagagtgcgtgtttgcgtgcgtgcgtgtgagtgagtacgtgagggttttagaacgtgtatagtgggcggggataggaaatgggaagcgaggggcgggggttgtcgttgttatggtagtgacgttaggcgtcggggagcgaattcggttttttttttacgcgcgcgcgtatatatatatagagatatgtatacgcgcgcgtatagtcgtttttttttagatatattggagggaaaggttaaattaaaggcgagggagtagagagatcggagggagtcgttgtcgtcgtcgcgcgttatgacggacgcggcggaggttgtttttttagtgcggacgtcgtcgatttttagttttcgtcgcgttttttgtttttcgtttttcgcgcgttttttattttggcgttggcgcgttttcgcgttttttttttcggtcgttttaggcgcgtttcgggttcggggcgcggggcgttgggagcgggagggtgggggtcgcggcgggtcggcggtttttttgttcgattttcgatttcgggttaggtgagtgttttggggcgggagagggcgttcggagcggagaggatatcgggcgtttagtttttcgtttgattttttttcggggcgttgataggttttcgggatacggtttttggggggcgttgtggggttatttgtgtcggggggt

SEQ ID NO: 17506 - DNA, 915 bp, Artificial Sequence
  chemically treated genomic DNA (Homo sapiens) CpG-island No: 17506
accccccgacacaaataaccccacaacgccccccaaaaaccgtatcccgaaaacctatcaacgccccgaaaaaaaatcaaacgaaaaactaaacgcccgatatcctctccgctccgaacgccctctcccgccccaaaacactcacctaacccgaaatcgaaaatcgaacaaaaaaaccgccgacccgccgcgacccccaccctcccgctcccaacgccccgcgccccgaacccgaaacgcgcctaaaacgaccgaaaaaaaaaacgcgaaaacgcgccaacgccaaaataaaaaacgcgcgaaaaacgaaaaacaaaaaacgcgacgaaaactaaaaatcgacgacgtccgcactaaaaaaacaacctccgccgcgtccgtcataacgcgcgacgacgacaacgactccctccgatctctctactccctcgcctttaatttaacctttccctccaatatatctaaaaaaaaacgactatacgcgcgcgtatacatatctctatatatatatacgcgcgcgcgtaaaaaaaaaaccgaattcgctccccgacgcctaacgtcactaccataacaacgacaacccccgcccctcgcttcccatttcctatccccgcccactatacacgttctaaaaccctcacgtactcactcacacgcacgcacgcaaacacgcactctcgaaacgcgcgcgcccaaaacgctaaaatttaaaaaataatttaaacctccgcctacctcccttccctcgctacctcccgaaatttaaccaatcccgtaaaaaaaaaccgtaaacgaaacgaactcgactcccgaaataacgtaaaaaatttcccgaaacaaaacgaaaaatcttcatacgttactaaacatatccgatacccgaaaaaacgctttaaacgccaataaaacgaaaaa

SEQ ID NO: 17507 - DNA, 915 bp, Artificial Sequence
  chemically treated genomic DNA (Homo sapiens) CpG-island No: 17507
atttttcgatataagtgattttataacgttttttagaggtcgtgtttcgagagtttgttagcgtttcggaagggggttaggcggggggttgagcgttcggtgtttttttcgtttcggacgttttttttcgttttaaggtatttatttggttcggggtcgggggtcgggtaaagaggtcgtcggttcgtcgcggtttttattttttcgtttttagcgtttcgcgtttcgagttcgaggcgcgtttggagcggtcgggggagagggcgcggggacgcgttagcgttagggtgaggggcgcgcgaggggcggggggtagggggcgcggcgagagttggggatcggcggcgttcgtattgagaaagtagttttcgtcgcgttcgttatggcgcgcggcggcggtagcggtttttttcggtttttttgttttttcgtttttagtttgatttttttttttagtgtgtttgagggagagcggttgtgcgcgcgcgtgtatatgtttttgtgtgtgtgtgcgcgcgcgcgtggggaaggggtcgggttcgtttttcgacgtttgacgttattgttatggtaacggtaattttcgtttttcgttttttattttttgttttcgtttattgtgtacgttttggggtttttacgtgtttatttatacgtacgtacgtaggtacgtattttcggggcgcgcgcgtttagagcgttggggtttgggaggtaatttggattttcgtttgttttttttttttcgttgtttttcggaatttgattaatttcgtgaggaggagtcgtgggcggggcgggttcggttttcggagtggcgtgaaaaatttttcgaggtagagcgaaaagtttttatgcgttattgagtatgttcggtgttcgaaggggcgttttggacgttagtgaagcgaggag

SEQ ID NO: 17508 - DNA, 915 bp, Artificial Sequence
  chemically treated genomic DNA (Homo sapiens) CpG-island No: 17508
ctcctcgcttcactaacgtccaaaacgccccttcgaacaccgaacatactcaataacgcataaaaacttttcgctctacctcgaaaaatttttcacgccactccgaaaaccgaacccgccccgcccacgactcctcctcacgaaattaatcaaattccgaaaaacaacgaaaaaaaaaaaacaaacgaaaatccaaattacctcccaaaccccaacgctctaaacgcgcgcgccccgaaaatacgtacctacgtacgtacgtataaataaacacgtaaaaaccccaaaacgtacacaataaacgaaaacaaaaaataaaaaacgaaaaacgaaaattaccgttaccataacaataacgtcaaacgtcgaaaaacgaacccgaccccttccccacgcgcgcgcgcacacacacacaaaaacatatacacgcgcgcgcacaaccgctctccctcaaacacactaaaaaaaaaaatcaaactaaaaacgaaaaaacaaaaaaaccgaaaaaaaccgctaccgccgccgcgcgccataacgaacgcgacgaaaactactttctcaatacgaacgccgccgatccccaactctcgccgcgccccctaccccccgcccctcgcgcgcccctcaccctaacgctaacgcgtccccgcgccctctcccccgaccgctccaaacgcgcctcgaactcgaaacgcgaaacgctaaaaacgaaaaaataaaaaccgcgacgaaccgacgacctctttacccgacccccgaccccgaaccaaataaataccttaaaacgaaaaaaaacgtccgaaacgaaaaaaacaccgaacgctcaaccccccgcctaacccccttccgaaacgctaacaaactctcgaaacacgacctctaaaaaacgttataaaatcacttatatcgaaaaat

SEQ ID NO: 17509 - DNA, 1073 bp, Artificial Sequence
  chemically treated genomic DNA (Homo sapiens) CpG-island No: 17509
gtacgtcgattcgattgtagcgcgggaacggaaggaggaaacggaagatttgaaaagattttgtcgtttttagaaattgtgcgacgcgtgttttcgtagttatttttaagaagtttcgtttttattaacgcgagtaggtagtagttttttttaggcggtcgagcgcggcgcgattgtgggtttaggtatcgcgattattcggttttatggcgggcgggaacgaggttcgttttcggagcggtttttcggttgtcggtttttcggttgtcgattattcggtatcgtttcgttttcggatgaaaggtttttcgtagagcggaagtaaggaagtttcgggaaatatagggaagttgtaggttagcgattcgaaatcggttaagtttttttcgcgtttgggacggcgggtcgtagaggggcgtgcgcgcgttggggaggggcggggtacggcggtcgtaatgtttttaaaatagggattcgtagggtataggggcggggtcgcgagagttagtcgttggtcgagtgggcgggatttaggggtggggttggaggttgaaatttgttaaagtttcggcgtgtgggatttaggggaggggtcgcgagagtcgtgggatcgagggggcggggtcggacggttgaaatttgttaaagtttcggcgcgcgggttttaggggcggagtcgcgagaatacgtcggggatagaggggcgggtttaggagtttcggggcgggataggacggtcgaaatcgaagttttggcgcgcggggtttaggggcgggtttaggggtttcggggtaggataggacggttgaaatcgaggtttcggcgcgcggggtttaggcgtcgtgtagtgagagtacgtcgtttgatcgaagggcggggtttgaaggttgagcgtagtcgcgaggttgtagttggtaggagagcgggcggtttgaagtcgttttgggttgtttggacggatgaagtttaggtggaaagttagtcgacgtttttcgggagttacgattttagggatttttattcgagtttaatcgttggaataattataaatttagaaatttttagttgagtgt

SEQ ID NO: 17510 - DNA, 1073 bp, Artificial Sequence
  chemically treated genomic DNA (Homo sapiens) CpG-island No: 17510
acactcaactaaaaatttctaaatttataattattccaacgattaaactcgaataaaaatccctaaaatcgtaactcccgaaaaacgtcgactaactttccacctaaacttcatccgtccaaacaacccaaaacgacttcaaaccgcccgctctcctaccaactacaacctcgcgactacgctcaaccttcaaaccccgcccttcgatcaaacgacgtactctcactacacgacgcctaaaccccgcgcgccgaaacctcgatttcaaccgtcctatcctaccccgaaacccctaaacccgcccctaaaccccgcgcgccaaaacttcgatttcgaccgtcctatcccgccccgaaactcctaaacccgcccctctatccccgacgtattctcgcgactccgcccctaaaacccgcgcgccgaaactttaacaaatttcaaccgtccgaccccgccccctcgatcccacgactctcgcgacccctcccctaaatcccacacgccgaaactttaacaaatttcaacctccaaccccacccctaaatcccgcccactcgaccaacgactaactctcgcgaccccgcccctataccctacgaatccctattttaaaaacattacgaccgccgtaccccgcccctccccaacgcgcgcacgcccctctacgacccgccgtcccaaacgcgaaaaaaacttaaccgatttcgaatcgctaacctacaacttccctatatttcccgaaacttccttacttccgctctacgaaaaacctttcatccgaaaacgaaacgataccgaataatcgacaaccgaaaaaccgacaaccgaaaaaccgctccgaaaacgaacctcgttcccgcccgccataaaaccgaataatcgcgatacctaaacccacaatcgcgccgcgctcgaccgcctaaaaaaaactactacctactcgcgttaataaaaacgaaacttcttaaaaataactacgaaaacacgcgtcgcacaatttctaaaaacgacaaaatcttttcaaatcttccgtttcctccttccgttcccgcgctacaatcgaatcgacgtac

SEQ ID NO: 17511 - DNA, 1073 bp, Artificial Sequence
  chemically treated genomic DNA (Homo sapiens) CpG-island No: 17511
atatttagttaaaagtttttgggtttgtgattgttttaacggttaagttcggatgagggtttttggagtcgtagttttcgggaaacgtcgattggttttttatttggattttattcgtttaggtagtttagagcggttttaggtcgttcgtttttttgttaattatagtttcgcgattgcgtttagtttttaggtttcgtttttcggttaagcggcgtgtttttattgtacggcgtttgggtttcgcgcgtcgggatttcggttttagtcgttttgttttgtttcgaggtttttaggttcgtttttgggtttcgcgcgttaggatttcggtttcgatcgttttgtttcgtttcgaggtttttaggttcgtttttttgttttcggcgtgttttcgcggtttcgtttttaggattcgcgcgtcgggattttggtaagttttagtcgttcggtttcgttttttcggttttacggttttcgcggttttttttttaagttttatacgtcgggattttggtaagttttagtttttagttttatttttaggtttcgtttattcggttagcggttggttttcgcggtttcgtttttgtgttttgcgagtttttattttgggagtattgcggtcgtcgtgtttcgtttttttttagcgcgcgtacgtttttttgcggttcgtcgttttagacgcgggaagagtttggtcggtttcgagtcgttggtttgtagtttttttgtgtttttcgaggtttttttgttttcgttttgcgaggagttttttattcgaaggcgggacgatgtcgaataatcgatagtcgaggaatcggtagtcgagaaatcgtttcgggaacgagtttcgttttcgttcgttatggaatcggatggtcgcggtgtttgggtttatagtcgcgtcgcgttcgatcgtttggagaagattgttgtttgttcgcgttggtaaagacggagttttttgggggtggttgcgagggtacgcgtcgtatagtttttgggggcggtagaatttttttaaatttttcgtttttttttttcgttttcgcgttgtagtcgggtcggcgtgt

SEQ ID NO: 17512 - DNA, 1073 bp, Artificial Sequence
  chemically treated genomic DNA (Homo sapiens) CpG-island No: 17512
acacgccgacccgactacaacgcgaaaacgaaaaaaaaaaacgaaaaatttaaaaaaattctaccgcccccaaaaactatacgacgcgtaccctcgcaaccacccccaaaaaactccgtctttaccaacgcgaacaaacaacaatcttctccaaacgatcgaacgcgacgcgactataaacccaaacaccgcgaccatccgattccataacgaacgaaaacgaaactcgttcccgaaacgatttctcgactaccgattcctcgactatcgattattcgacatcgtcccgccttcgaataaaaaactcctcgcaaaacgaaaacaaaaaaacctcgaaaaacacaaaaaaactacaaaccaacgactcgaaaccgaccaaactcttcccgcgtctaaaacgacgaaccgcaaaaaaacgtacgcgcgctaaaaaaaaacgaaacacgacgaccgcaatactcccaaaataaaaactcgcaaaacacaaaaacgaaaccgcgaaaaccaaccgctaaccgaataaacgaaacctaaaaataaaactaaaaactaaaacttaccaaaatcccgacgtataaaacttaaaaaaaaaaccgcgaaaaccgtaaaaccgaaaaaacgaaaccgaacgactaaaacttaccaaaatcccgacgcgcgaatcctaaaaacgaaaccgcgaaaacacgccgaaaacaaaaaaacgaacctaaaaacctcgaaacgaaacaaaacgatcgaaaccgaaatcctaacgcgcgaaacccaaaaacgaacctaaaaacctcgaaacaaaacaaaacgactaaaaccgaaatcccgacgcgcgaaacccaaacgccgtacaataaaaacacgccgcttaaccgaaaaacgaaacctaaaaactaaacgcaatcgcgaaactataattaacaaaaaaacgaacgacctaaaaccgctctaaactacctaaacgaataaaatccaaataaaaaaccaatcgacgtttcccgaaaactacgactccaaaaaccctcatccgaacttaaccgttaaaacaatcacaaacccaaaaacttttaactaaatat

SEQ ID NO: 17513 - DNA, 848 bp, Artificial Sequence
  chemically treated genomic DNA (Homo sapiens) CpG-island No: 17513
  unsure (454)
ttacgtcgttcgcgttgtagttttcggttcgcgtgggtttagggtcgaggttttacgttagtcgtttttcggattttagcgggtcgttttttattttgttcgtcgttgtttttggtgtcgcgggtcgttcgcgcgtatatttagcggttaggtgcggcgtcgacgatagggttttaggtttcgaggttggggagtttttcgggtttagtttaatcgtacgcggaggtcgcgtcgttaatcggttttcgtcgtttttataatcggcgtcgtatttatcgttacgtcggagttcgggttttttcggtttcgggttcgcgtaggtttggttgagttttagagcgtttacgtttcgcgtcgtcgttcggggattttggcgtagttgtcggggtcgtaatgcgaggggacgaacgtatgcgatttcgtttaacgttttttcgtttcggtttcggtcgtntagataattgtagtgtcgtagttcggcgtagttatagtagcgtttgttgagcggaatcgtttgggacgtttattttcggtcggtattcgttgtttatgtagagaggttgttatttattggttcgcgagcggtggcgcgtgcggggttgggtttatcgaattcgggtcggggagcgcggcgttggcggttcggggcggggcgaggttattacgggttatttcgcggagtcgtcgcggatcggatttggttgtagtttgcgcggggcgggggcgggaacggggtcgattaggagggacggatcgcgggtgggggagtggagtcgggatttttggtagttacgtgggaggagcgggtaggttataggggttgtaggagttttcgtttttttagaaaa

SEQ ID NO: 17514 - DNA, 848 bp, Artificial Sequence
  chemically treated genomic DNA (Homo sapiens) CpG-island No: 17514
  unsure (395)
ttttctaaaaaaacgaaaactcctacaacccctataacctacccgctcctcccacgtaactaccaaaaatcccgactccactcccccacccgcgatccgtccctcctaatcgaccccgttcccgcccccgccccgcgcaaactacaaccaaatccgatccgcgacgactccgcgaaataacccgtaataacctcgccccgccccgaaccgccaacgccgcgctccccgacccgaattcgataaacccaaccccgcacgcgccaccgctcgcgaaccaataaataacaacctctctacataaacaacgaataccgaccgaaaataaacgtcccaaacgattccgctcaacaaacgctactataactacgccgaactacgacactacaattatctanacgaccgaaaccgaaacgaaaaaacgttaaacgaaatcgcatacgttcgtcccctcgcattacgaccccgacaactacgccaaaatccccgaacgacgacgcgaaacgtaaacgctctaaaactcaaccaaacctacgcgaacccgaaaccgaaaaaacccgaactccgacgtaacgataaatacgacgccgattataaaaacgacgaaaaccgattaacgacgcgacctccgcgtacgattaaactaaacccgaaaaactccccaacctcgaaacctaaaaccctatcgtcgacgccgcacctaaccgctaaatatacgcgcgaacgacccgcgacaccaaaaacaacgacgaacaaaataaaaaacgacccgctaaaatccgaaaaacgactaacgtaaaacctcgaccctaaacccacgcgaaccgaaaactacaacgcgaacgacgtaa

SEQ ID NO: 17515 - DNA, 848 bp, Artificial Sequence
  chemically treated genomic DNA (Homo sapiens) CpG-island No: 17515
  unsure (395)
ttttttggaggggcggaagtttttgtagtttttatggtttattcgttttttttacgtaattgttaaagatttcggttttatttttttattcgcggttcgttttttttggtcgatttcgttttcgttttcgtttcgcgtagattgtagttaggttcggttcgcggcggtttcgcggaatgattcgtagtaatttcgtttcgtttcgggtcgttagcgtcgcgtttttcggttcgaattcgataggtttagtttcgtacgcgttatcgttcgcgggttaatgggtggtagtttttttgtataggtaacgagtgtcggtcgggggtgagcgttttaggcggtttcgtttaatagacgttgttgtggttgcgtcgggttgcgatattgtagttgtttangcggtcggggtcgggacgaggaggcgttggacggggtcgtatacgttcgttttttcgtattgcggtttcgatagttgcgttaggattttcgggcggcggcgcggggcgtgaacgttttggggtttagttaggtttgcgcgggttcgaggtcggaggaattcggatttcggcgtagcggtgagtgcggcgtcggttgtgggagcggcgggagtcggttgacggcgcggttttcgcgtgcggttaggttgggttcgaggggttttttagtttcggggtttgggattttgtcgtcggcgtcgtatttgatcgttgggtgtgcgcgcgggcggttcgcggtattaggagtagcggcgagtagggtgggaggcggttcgttgaggttcgggaagcggttgacgtggggtttcggttttgagtttacgcgagtcgggagttgtagcgcgaacggcgtgg

SEQ ID NO: 17516 - DNA, 848 bp, Artificial Sequence
  chemically treated genomic DNA (Homo sapiens) CpG-island No: 17516
  unsure (454)
ccacgccgttcgcgctacaactcccgactcgcgtaaactcaaaaccgaaaccccacgtcaaccgcttcccgaacctcaacgaaccgcctcccaccctactcgccgctactcctaataccgcgaaccgcccgcgcgcacacccaacgatcaaatacgacgccgacgacaaaatcccaaaccccgaaactaaaaaacccctcgaacccaacctaaccgcacgcgaaaaccgcgccgtcaaccgactcccgccgctcccacaaccgacgccgcactcaccgctacgccgaaatccgaattcctccgacctcgaacccgcgcaaacctaactaaaccccaaaacgttcacgccccgcgccgccgcccgaaaatcctaacgcaactatcgaaaccgcaatacgaaaaaacgaacgtatacgaccccgtccaacgcctcctcgtcccgaccccgaccgcntaaacaactacaatatcgcaacccgacgcaaccacaacaacgtctattaaacgaaaccgcctaaaacgctcacccccgaccgacactcgttacctatacaaaaaaactaccacccattaacccgcgaacgataacgcgtacgaaactaaacctatcgaattcgaaccgaaaaacgcgacgctaacgacccgaaacgaaacgaaattactacgaatcattccgcgaaaccgccgcgaaccgaacctaactacaatctacgcgaaacgaaaacgaaaacgaaatcgaccaaaaaaaacgaaccgcgaataaaaaaataaaaccgaaatctttaacaattacgtaaaaaaaacgaataaaccataaaaactacaaaaacttccgcccctccaaaaaa

SEQ ID NO: 17517 - DNA, 545 bp, Artificial Sequence
  chemically treated genomic DNA (Homo sapiens) CpG-island No: 17517
tttttcggcgtaggcggggattttattttgcgggatttcggttttttcgtgcggatagggggcgttcgtagtcgtgtttttttcgttaattttattagtgttttagttcgtttttgtgcgatcgtttttagggttcgggatattttttgtttcggggcgtgtgggattcggatgtaagcgtgttatataagcgttgtttaagttttatttttttttttttgaggaagacgcggtcgtaagggttgaggatttttggttcgtacgtttttgtttttgatttatcgttgttcgttttcgtcgaggaataagtcggttaggaagttcgcgcgtaatagttatggtgaggcggtagtcggcggcgggcggcgtaacgtagggttcgggcgtcggggggatttcggtttcgagttcgtgtttttgagggtagatgtcggggcgtgtaggggcggaaaggcgtttttgaaatggtggggaaacgcgggaagttttcggaagttgtttttttttagaagtggtagattatttttggtttattgttttttttt

SEQ ID NO: 17518 - DNA, 545 bp, Artificial Sequence
  chemically treated genomic DNA (Homo sapiens) CpG-island No: 17518
aaaaaaaaacaataaaccaaaaataatctaccacttctaaaaaaaaacaacttccgaaaacttcccgcgtttccccaccatttcaaaaacgcctttccgcccctacacgccccgacatctaccctcaaaaacacgaactcgaaaccgaaatccccccgacgcccgaaccctacgttacgccgcccgccgccgactaccgcctcaccataactattacgcgcgaacttcctaaccgacttattcctcgacgaaaacgaacaacgataaatcaaaaacaaaaacgtacgaaccaaaaatcctcaacccttacgaccgcgtcttcctcaaaaaaaaaaaaataaaacttaaacaacgcttatataacacgcttacatccgaatcccacacgccccgaaacaaaaaatatcccgaaccctaaaaacgatcgcacaaaaacgaactaaaacactaataaaattaacgaaaaaaacacgactacgaacgccccctatccgcacgaaaaaaccgaaatcccgcaaaataaaatccccgcctacgccgaaaaa

SEQ ID NO: 17519 - DNA, 545 bp, Artificial Sequence
  chemically treated genomic DNA (Homo sapiens) CpG-island No: 17519
gaaaaagaataataagttaaaaatggtttgttatttttggagaaaggtagttttcggaagtttttcgcgtttttttattattttaggagcgttttttcgtttttatacgtttcggtatttgtttttaggagtacgaattcgaaatcggggttttttcggcgttcgagttttgcgttgcgtcgttcgtcgtcgattgtcgttttattatggttgttgcgcgcgggttttttgatcgatttgtttttcggcgagagcgaatagcggtgagttaggagtaggagcgtgcggattaaaaatttttagtttttacgatcgcgttttttttaaaaagaaaggggtgggatttgagtaacgtttatatagtacgtttgtattcgggttttatacgtttcggaataggaaatatttcgggttttagaggcggtcgtataagggcgagttggagtattagtggagttggcgggaaaggtacggttgcgggcgttttttgttcgtacggaggagtcgaagtttcgtagggtggggttttcgtttgcgtcgagagg

SEQ ID NO: 17520 - DNA, 545 bp, Artificial Sequence
  chemically treated genomic DNA (Homo sapiens) CpG-island No: 17520
cctctcgacgcaaacgaaaaccccaccctacgaaacttcgactcctccgtacgaacaaaaaacgcccgcaaccgtacctttcccgccaactccactaatactccaactcgcccttatacgaccgcctctaaaacccgaaatatttcctattccgaaacgtataaaacccgaatacaaacgtactatataaacgttactcaaatcccacccctttctttttaaaaaaaacgcgatcgtaaaaactaaaaatttttaatccgcacgctcctactcctaactcaccgctattcgctctcgccgaaaaacaaatcgatcaaaaaacccgcgcgcaacaaccataataaaacgacaatcgacgacgaacgacgcaacgcaaaactcgaacgccgaaaaaaccccgatttcgaattcgtactcctaaaaacaaataccgaaacgtataaaaacgaaaaaacgctcctaaaataataaaaaaacgcgaaaaacttccgaaaactacctttctccaaaaataacaaaccatttttaacttattattctttttc

SEQ ID NO: 17521 - DNA, 962 bp, Artificial Sequence
  chemically treated genomic DNA (Homo sapiens) CpG-island No: 17521
cgtcgttattattacgcgttgttttaaatagattatataacgtaggtttttggttcgtatttttggggttttatttttttttttttttttttgttgatttttcgcgattgttcgagtcggaatattatttttttgatcgcggttcgaggtttagcgaaagtgcgaggtcggtggggttattgttcgcgggtattatgttcggcgatcgggtaagcgaaatagggcgtgagcggcggcgaatagaaaaggatatatagttgagacgttgttttatttcgttggatgagggtttttgttggcggtacgagagtttttgtattttttttagttcgtagcggcggttcggcgtgttttttagttgttttcgagtaaagaattagcgagaagaagttttacggttcgacgttatgatattttttttttcgttcgtttttttatttatttttcgttttttttggttcgcggatttttcgttaagcgcgcgatttcgttttatttcgttcgtcgtagattacgtattatttttttttattatcgttttcgtttttgcgtatgcgggggttcgttttatcgattcgttttagttttttgttttttttttttgttttcggtttcgtttttgcgtacgggattataatgtttcgcgtcgtttgttattgggaggcgtcgaaggtggagaggtcggttcggaaggaaaaggtcggcgtagtatgtcgggtttagggttggcggggcgaaggggtggggagggaaggggcggggaggggaggggaggggaaagtgggagagggtggattttggtcggtgtgaagagaggcggtcgggcggttgcgttgtgggggtttgggcgtgtatttcggaggttcgtcgcggttttttttagacgggaggtttagcggttttttaaaaagagaaaaataatttttattgtcgtagttttacgttattatttttattttttt

SEQ ID NO: 17522 - DNA, 962 bp, Artificial Sequence
  chemically treated genomic DNA (Homo sapiens) CpG-island No: 17522
aaaaaaataaaaataataacgtaaaactacgacaataaaaattatttttctctttttaaaaaaccgctaaacctcccgtctaaaaaaaaccgcgacgaacctccgaaatacacgcccaaacccccacaacgcaaccgcccgaccgcctctcttcacaccgaccaaaatccaccctctcccactttcccctcccctcccctccccgccccttccctccccaccccttcgccccgccaaccctaaacccgacatactacgccgaccttttccttccgaaccgacctctccaccttcgacgcctcccaataacaaacgacgcgaaacattataatcccgtacgcaaaaacgaaaccgaaaacaaaaaaaaaaaacaaaaaactaaaacgaatcgataaaacgaacccccgcatacgcaaaaacgaaaacgataataaaaaaaaataatacgtaatctacgacgaacgaaataaaacgaaatcgcgcgcttaacgaaaaatccgcgaaccaaaaaaaacgaaaaataaataaaaaaacgaacgaaaaaaaaaatatcataacgtcgaaccgtaaaacttcttctcgctaattctttactcgaaaacaactaaaaaacacgccgaaccgccgctacgaactaaaaaaaatacaaaaactctcgtaccgccaacaaaaaccctcatccaacgaaataaaacaacgtctcaactatatatccttttctattcgccgccgctcacgccctatttcgcttacccgatcgccgaacataatacccgcgaacaataaccccaccgacctcgcactttcgctaaacctcgaaccgcgatcaaaaaaataatattccgactcgaacaatcgcgaaaaatcaacaaaaaaaaaaaaaaaaaaataaaaccccaaaaatacgaaccaaaaacctacgttatataatctatttaaaacaacgcgtaataataacgacg

SEQ ID NO: 17523 - DNA, 962 bp, Artificial Sequence
  chemically treated genomic DNA (Homo sapiens) CpG-island No: 17523
aggaaaatggaagtagtggcgtgaggttgcgatagtgaaggttatttttttttttttaaagggtcgttagatttttcgtttaaaggaagtcgcgacgggttttcgaagtatacgtttaggtttttatagcgtagtcgttcgatcgtttttttttatatcggttagagtttatttttttttattttttttttttttttttttttcgttttttttttttttattttttcgtttcgttaattttagattcggtatgttgcgtcgatttttttttttcgagtcgatttttttattttcggcgttttttaatgataagcggcgcggagtattgtggtttcgtgcgtaagagcgaggtcgagggtagaaaaagaaagtaaaagattagggcgagtcggtagagcgggttttcgtatgcgtaagggcggaggcggtggtgaaaaagggtggtgcgtggtttacggcgagcggagtggggcggggtcgcgcgtttggcggggagttcgcgagttaggaggggcggggggtgaatgaaggagcgggcggaggaggaagtgttatggcgtcgggtcgtggagttttttttcgttggttttttattcgggaatagttggagaatacgtcgagtcgtcgttgcgagttggagggagtataagagttttcgtgtcgttagtagaaatttttatttagcgagatgggatagcgttttaattgtgtatttttttttgttcgtcgtcgtttacgttttgtttcgtttgttcggtcgtcgggtatggtgttcgcgaataatggttttatcggtttcgtattttcgttgggtttcgggtcgcggttagggaagtaatgtttcggttcgggtagtcgcgaggggttagtagaggaagggaggaggagataggattttaggaatgcgggttaggagtttgcgttgtgtaatttgtttggggtagcgcgtggtggtggcggcg

SEQ ID NO: 17524 - DNA, 962 bp, Artificial Sequence
  chemically treated genomic DNA (Homo sapiens) CpG-island No: 17524
cgccgccaccaccacgcgctaccccaaacaaattacacaacgcaaactcctaacccgcattcctaaaatcctatctcctcctcccttcctctactaacccctcgcgactacccgaaccgaaacattacttccctaaccgcgacccgaaacccaacgaaaatacgaaaccgataaaaccattattcgcgaacaccatacccgacgaccgaacaaacgaaacaaaacgtaaacgacgacgaacaaaaaaaaatacacaattaaaacgctatcccatctcgctaaataaaaatttctactaacgacacgaaaactcttatactccctccaactcgcaacgacgactcgacgtattctccaactattcccgaataaaaaaccaacgaaaaaaaactccacgacccgacgccataacacttcctcctccgcccgctccttcattcaccccccgcccctcctaactcgcgaactccccgccaaacgcgcgaccccgccccactccgctcgccgtaaaccacgcaccaccctttttcaccaccgcctccgcccttacgcatacgaaaacccgctctaccgactcgccctaatcttttactttctttttctaccctcgacctcgctcttacgcacgaaaccacaatactccgcgccgcttatcattaaaaaacgccgaaaataaaaaaatcgactcgaaaaaaaaaaatcgacgcaacataccgaatctaaaattaacgaaacgaaaaaataaaaaaaaaaaaaacgaaaaaaaaaaaaaaaaaaaaaataaaaaaaaataaactctaaccgatataaaaaaaaacgatcgaacgactacgctataaaaacctaaacgtatacttcgaaaacccgtcgcgacttcctttaaacgaaaaatctaacgaccctttaaaaaaaaaaaaataaccttcactatcgcaacctcacgccactacttccattttcct

SEQ ID NO: 17525 - DNA, 527 bp, Artificial Sequence
  chemically treated genomic DNA (Homo sapiens) CpG-island No: 17525
aattggtttcgtttttcgggttttaaatttagattcggtttcgttcgaagtttcggattttggggttcgtttttggtttcgcgtcggtagatcgtgggttcgtttttgggcgtgttttaaatttttcgtaggtaacgttttttaatttgagttatatttcgattttttttttaaattttttttcgttttttatattttggatttttcgtttcgtttcggtttcgttttaagtttaattaggtttcggttacgaatttaagtttcgatcggttttttagtttttgggtttttatcgaaatcggtttttttttaaatttttttttttaaagtttttttttcgaatttaattggtatttcgaattttttttcgtttttattattttcggtttagttttacgtcggttcgtttaaagttttgttttttagagttcgcgtatcgtttggttatgtgttacgatatagttaatttttcgtttcggtttcgttttttgagtttttttttgggtttggttttagttttattttaa

SEQ ID NO: 17526 - DNA, 527 bp, Artificial Sequence
  chemically treated genomic DNA (Homo sapiens) CpG-island No: 17526
ttaaaataaaactaaaaccaaacccaaaaaaaaactcaaaaaacgaaaccgaaacgaaaaattaactatatcgtaacacataaccaaacgatacgcgaactctaaaaaacaaaactttaaacgaaccgacgtaaaactaaaccgaaaataataaaaacgaaaaaaaattcgaaataccaattaaattcgaaaaaaaaactttaaaaaaaaaaatttaaaaaaaaaccgatttcgataaaaacccaaaaactaaaaaaccgatcgaaacttaaattcgtaaccgaaacctaattaaacttaaaacgaaaccgaaacgaaacgaaaaatccaaaatataaaaaacgaaaaaaaatttaaaaaaaaaatcgaaatataactcaaattaaaaaacgttacctacgaaaaatttaaaacacgcccaaaaacgaacccacgatctaccgacgcgaaaccaaaaacgaaccccaaaatccgaaacttcgaacgaaaccgaatctaaatttaaaacccgaaaaacgaaaccaatt

SEQ ID NO: 17527 - DNA, 527 bp, Artificial Sequence
  chemically treated genomic DNA (Homo sapiens) CpG-island No: 17527
ttagggtggggttaaggttagatttagagaagggtttaggaggcggggtcggggcggggggttgattatgtcgtagtatatggttaggcggtgcgcggattttgggaggtagagttttggacgggtcgacgtggggttgggtcgggggtggtggaggcgggggggagttcggggtgttagttgggttcggggggggggttttgggggggggggtttagggaggggtcggtttcggtagggatttagggattgggaggtcggtcggggtttgggttcgtggtcgagatttagttgggtttggggcggggtcgagacggagcgagggatttagggtgtgggaaacggggaggggtttgaggaggggatcggaatgtggtttaagttgggaggcgttatttgcggagggtttgaggtacgtttaggagcgagtttacggtttgtcgacgcggggttaggggcgggttttaggattcggagtttcgggcggggtcgagtttgggtttggggttcgggaggcggggttagtt

SEQ ID NO: 17528 - DNA, 527 bp, Artificial Sequence
  chemically treated genomic DNA (Homo sapiens) CpG-island No: 17528
aactaaccccgcctcccgaaccccaaacccaaactcgaccccgcccgaaactccgaatcctaaaacccgcccctaaccccgcgtcgacaaaccgtaaactcgctcctaaacgtacctcaaaccctccgcaaataacgcctcccaacttaaaccacattccgatcccctcctcaaacccctccccgtttcccacaccctaaatccctcgctccgtctcgaccccgccccaaacccaactaaatctcgaccacgaacccaaaccccgaccgacctcccaatccctaaatccctaccgaaaccgacccctccctaaacccccccccccaaaaccccccccccgaacccaactaacaccccgaactcccccccgcctccaccacccccgacccaaccccacgtcgacccgtccaaaactctacctcccaaaatccgcgcaccgcctaaccatatactacgacataatcaaccccccgccccgaccccgcctcctaaacccttctctaaatctaaccttaaccccaccctaa

SEQ ID NO: 17529 - DNA, 710 bp, Artificial Sequence
  chemically treated genomic DNA (Homo sapiens) CpG-island No: 17529
ggggtttattagtttattatacggcggttattttacgtttattagggtcggggtttattagtttattatacggcggttattttatgtttattagggtcggggtttattagtttattatacggcggttattttatgtttattagggtcggggtttattagtttattatacggtagttattttatgtttattagggtcggggtttattagtttattatacggcggttattttatgttgattagggtcggggtttattagtttattatacggcggttattttatgtttattagggtcggggtttattagtttattatacggcggttattttatgtttattagggtcggggtttattagtttattatacggtagttattttatgtttattagggtcggggtttattagtttattatacggcggttattttatgttgattagggtcggggtttattagtttattatacggcggttattttacgtttattagggtcggggtttattagtttattatacggcggttattttacgttgattagggtcggggtttattagtttattatacggcggttattttacgtttattagggtcggggtttattagtttattatacggcggttattttacgttgattagggtcggggtttattagtttattatacggcggttattttatgttgattagaagttttgatagtaagtttagatgtttg

SEQ ID NO: 17530 - DNA, 710 bp, Artificial Sequence
  chemically treated genomic DNA (Homo sapiens) CpG-island No: 17530
caaacatctaaacttactatcaaaacttctaatcaacataaaataaccgccgtataataaactaataaaccccgaccctaatcaacgtaaaataaccgccgtataataaactaataaaccccgaccctaataaacgtaaaataaccgccgtataataaactaataaaccccgaccctaatcaacgtaaaataaccgccgtataataaactaataaaccccgaccctaataaacgtaaaataaccgccgtataataaactaataaaccccgaccctaatcaacataaaataaccgccgtataataaactaataaaccccgaccctaataaacataaaataactaccgtataataaactaataaaccccgaccctaataaacataaaataaccgccgtataataaactaataaaccccgaccctaataaacataaaataaccgccgtataataaactaataaaccccgaccctaatcaacataaaataaccgccgtataataaactaataaaccccgaccctaataaacataaaataactaccgtataataaactaataaaccccgaccctaataaacataaaataaccgccgtataataaactaataaaccccgaccctaataaacataaaataaccgccgtataataaactaataaaccccgaccctaataaacgtaaaataaccgccgtataataaactaataaacccc

SEQ ID NO: 17531 - DNA, 710 bp, Artificial Sequence
  chemically treated genomic DNA (Homo sapiens) CpG-island No: 17531
tagatatttaggtttgttgttaaggtttttgattaatatgagatgatcgtcgtgtggtaaattgatgaatttcgattttgattaacgtgagatgatcgtcgtgtggtaaattgatgaatttcgattttgatgaacgtgagatgatcgtcgtgtggtaaattgatgaatttcgattttgattaacgtgagatggtcgtcgtgtggtaaattgatgaatttcgattttgatgaacgtgagatggtcgtcgtgtggtaaattgatgaatttcgattttgattaatatgagatgatcgtcgtgtggtaaattgatgaatttcgattttgatgaatatgagatggttgtcgtgtggtaaattgatgaatttcgattttgatgaatatgagatgatcgtcgtgtggtaaattgatgaatttcgattttgatgaatatgagatggtcgtcgtgtggtaaattgatgaatttcgattttgattaatatgagatgatcgtcgtgtggtaaattgatgaatttcgattttgatgaatatgagatggttgtcgtgtggtaaattgatgaatttcgattttgatgaatatgagatgatcgtcgtgtggtaaattgatgaatttcgattttgatgaatatgagatggtcgtcgtgtggtaaattgatgaatttcgattttgatgaacgtgagatggtcgtcgtgtggtaaattgatgaatttt

SEQ ID NO: 17532 - DNA, 710 bp, Artificial Sequence
  chemically treated genomic DNA (Homo sapiens) CpG-island No: 17532
aaaattcatcaatttaccacacgacgaccatctcacgttcatcaaaatcgaaattcatcaatttaccacacgacgaccatctcatattcatcaaaatcgaaattcatcaatttaccacacgacgatcatctcatattcatcaaaatcgaaattcatcaatttaccacacgacaaccatctcatattcatcaaaatcgaaattcatcaatttaccacacgacgatcatctcatattaatcaaaatcgaaattcatcaatttaccacacgacgaccatctcatattcatcaaaatcgaaattcatcaatttaccacacgacgatcatctcatattcatcaaaatcgaaattcatcaatttaccacacgacaaccatctcatattcatcaaaatcgaaattcatcaatttaccacacgacgatcatctcatattaatcaaaatcgaaattcatcaatttaccacacgacgaccatctcacgttcatcaaaatcgaaattcatcaatttaccacacgacgaccatctcacgttaatcaaaatcgaaattcatcaatttaccacacgacgatcatctcacgttcatcaaaatcgaaattcatcaatttaccacacgacgatcatctcacgttaatcaaaatcgaaattcatcaatttaccacacgacgatcatctcatattaatcaaaaaccttaacaacaaacctaaatatcta

SEQ ID NO: 17533 - DNA, 902 bp, Artificial Sequence
  chemically treated genomic DNA (Homo sapiens) CpG-island No: 17533
aacgtttcgtacgggtttcgcgaggcggtagagttttttttagacggaggggggtgcggggcgatgaggggagagttaggttggggatttcgtcgaggttcggtagcgttgttcgtttattttttgtcgtcgtcgttttttttttttttttttcggtcgtcgtcgtcgttttttttattagggtagtcgtttttatcgtcgttttcgttattacggtcgtcgttagcgtcgtcgtcgttttcggttttattcggtaggggggatattttagtttttttttttttttcgtttagtttttttcgttcgttcgtcgtcgttaatttttttcggtcgtcgtcgtcgttatcgtttttggttgagggggaggggagggggtcgggttgggtcgtttcgtcggcggttgtagtagattaaaaacgacggcggggcggtcgtcgttttttaatttttagtttcggttcgttcggtttttttatttttttttgtttttatttttttcgcgttcgtttgttttttttttatttttttagttttcgttcgttttcgtcgcggtttcgttagtttagtttaaattaaaatattgttatataatatggcggcgcggcggtcggtaaatatcgcgagatttgtagtcgcggttgaggcggcggttgtgacgaggttttttttagtcgaacggcgggggagtagtaggcggcggcggcggcggttgcggttgcggttcggggatgtttttttttcgatttgtatttttttttcgatattcgtagtttttacgtttgttttgttagggttggagggaggacgcgggtcgtcgttggggtcgtgcgaggggggtgtcggtgcgggtagttcggggagggttgaaatttttttttttcgtttgggttttttatttttgg

SEQ ID NO: 17534 - DNA, 902 bp, Artificial Sequence
  chemically treated genomic DNA (Homo sapiens) CpG-island No: 17534
ccaaaaataaaaaacccaaacgaaaaaaaaaaatttcaaccctccccgaactacccgcaccgacacccccctcgcacgaccccaacgacgacccgcgtcctccctccaaccctaacaaaacaaacgtaaaaactacgaatatcgaaaaaaaaatacaaatcgaaaaaaaaacatccccgaaccgcaaccgcaaccgccgccgccgccgcctactactcccccgccgttcgactaaaaaaaacctcgtcacaaccgccgcctcaaccgcgactacaaatctcgcgatatttaccgaccgccgcgccgccatattatataacaatattttaatttaaactaaactaacgaaaccgcgacgaaaacgaacgaaaactaaaaaaataaaaaaaaaacaaacgaacgcgaaaaaaataaaaacaaaaaaaaataaaaaaaccgaacgaaccgaaactaaaaattaaaaaacgacgaccgccccgccgtcgtttttaatctactacaaccgccgacgaaacgacccaacccgaccccctcccctccccctcaaccaaaaacgataacgacgacgacgaccgaaaaaaattaacgacgacgaacgaacgaaaaaaactaaacgaaaaaaaaaaaaaaactaaaatatcccccctaccgaataaaaccgaaaacgacgacgacgctaacgacgaccgtaataacgaaaacgacgataaaaacgactaccctaataaaaaaaacgacgacgacgaccgaaaaaaaaaaaaaaaaaacgacgacgacaaaaaataaacgaacaacgctaccgaacctcgacgaaatccccaacctaactctcccctcatcgccccgcacccccctccgtctaaaaaaaactctaccgcctcgcgaaacccgtacgaaacgtt

SEQ ID NO: 17535 - DNA, 902 bp, Artificial Sequence
  chemically treated genomic DNA (Homo sapiens) CpG-island No: 17535
ttaaggatggggggtttaggcggagaaagggggttttagtttttttcgggttgttcgtatcggtatttttttcgtacggttttagcggcggttcgcgttttttttttagttttagtaagataggcgtagagattgcgagtgtcgggggaggggtataggtcggaggaagagtattttcgggtcgtagtcgtagtcgtcgtcgtcgtcgtttgttgttttttcgtcgttcggttaggggaggtttcgttatagtcgtcgttttagtcgcggttgtagatttcgcggtgtttgtcggtcgtcgcgtcgttatattgtgtgatagtattttgatttggattgggttggcggagtcgcggcgagagcgagcgagagttgggggggtggggggagggtaggcgagcgcgaggggggtgggggtagagggaggtggggaggtcgagcgagtcggagttgaggattggggagcggcgatcgtttcgtcgtcgtttttgatttgttgtagtcgtcggcggggcgatttagttcgattttttttttttttttttagttaggagcggtggcggcggcggcggtcggagggagttggcggcggcgggcgagcggagggggttgagcggggagggagggagggttgaggtgttttttttgtcgggtggaatcggaggcggcggcggcgttggcggcggtcgtggtggcggaggcgacggtggagacggttgttttagtgggagaggcggcggcggcggtcgaggaggaggagggggaagcggcggcggtaaagggtaagcggatagcgttgtcgggtttcggcgggatttttaatttggttttttttttatcgtttcgtattttttttcgtttggaaggggttttgtcgtttcgcgaggttcgtgcggggcgtt

SEQ ID NO: 17536 - DNA, 902 bp, Artificial Sequence
  chemically treated genomic DNA (Homo sapiens) CpG-island No: 17536
aacgccccgcacgaacctcgcgaaacgacaaaaccccttccaaacgaaaaaaaatacgaaacgataaaaaaaaaaccaaattaaaaatcccgccgaaacccgacaacgctatccgcttaccctttaccgccgccgcttccccctcctcctcctcgaccgccgccgccgcctctcccactaaaacaaccgtctccaccgtcgcctccgccaccacgaccgccgccaacgccgccgccgcctccgattccacccgacaaaaaaaacacctcaaccctccctccctccccgctcaaccccctccgctcgcccgccgccgccaactccctccgaccgccgccgccgccaccgctcctaactaaaaaaaaaaaaaaaaaatcgaactaaatcgccccgccgacgactacaacaaatcaaaaacgacgacgaaacgatcgccgctccccaatcctcaactccgactcgctcgacctccccacctccctctacccccacccccctcgcgctcgcctaccctccccccacccccccaactctcgctcgctctcgccgcgactccgccaacccaatccaaatcaaaatactatcacacaatataacgacgcgacgaccgacaaacaccgcgaaatctacaaccgcgactaaaacgacgactataacgaaacctcccctaaccgaacgacgaaaaaacaacaaacgacgacgacgacgactacgactacgacccgaaaatactcttcctccgacctatacccctcccccgacactcgcaatctctacgcctatcttactaaaactaaaaaaaaaacgcgaaccgccgctaaaaccgtacgaaaaaaataccgatacgaacaacccgaaaaaaactaaaaccccctttctccgcctaaaccccccatccttaa

SEQ ID NO: 17537 - DNA, 710 bp, Artificial Sequence
  chemically treated genomic DNA (Homo sapiens) CpG-island No: 17537
gttttttcgtaggaagcggttttcgcgcgtgggcgcgggttcgagtggcgacgtgggtcgcggttttggcgggggagaagtattcggcgggtaggcgcggggtagggaagttcgggggaattcgtagttttttcgtagattcggttagggggcgcgcgttcgaaaacgtttcgtgtgtacgcgttcgttttttttttcgcgtttcgcgcgcgtttttcgtagtttggagtcggagcgttggtttcgcgcggtttggagaggcggagaggtttgtttatcgttttttttgtcgtttacgtttcgttgcgggtcggaggagtagttttcgttcgtaggtgttcggagaggtcgggtcgcggtttttataggtgtcgggaagcggtcgcgcgtatgcgtcggagtttattcgtttggttgcgcgtttcgggttcggcggttgaagaggagtcgcggcgaggtagggcggatttcggggaggtagcggcggggtttggcgggcggaacgggaagtagtcggaaggcgcgtcggaaggggcggcgggttggaagttgtcggcgaaaacggtagtaggcgggaagggaaaaaaagggaagtcggtaagggaaaagtcgggaagggaagtcgtaagggaaaagcgtttcgtatttggcgtaaggtgttttttttttatagttagacggtatagttgatgttttaacgtttggttttt

SEQ ID NO: 17538 - DNA, 710 bp, Artificial Sequence
  chemically treated genomic DNA (Homo sapiens) CpG-island No: 17538
aaaaaccaaacgttaaaacatcaactataccgtctaactataaaaaaaaaacaccttacgccaaatacgaaacgcttttcccttacgacttcccttcccgacttttcccttaccgacttccctttttttcccttcccgcctactaccgttttcgccgacaacttccaacccgccgccccttccgacgcgccttccgactacttcccgttccgcccgccaaaccccgccgctacctccccgaaatccgccctacctcgccgcgactcctcttcaaccgccgaacccgaaacgcgcaaccaaacgaataaactccgacgcatacgcgcgaccgcttcccgacacctataaaaaccgcgacccgacctctccgaacacctacgaacgaaaactactcctccgacccgcaacgaaacgtaaacgacaaaaaaaacgataaacaaacctctccgcctctccaaaccgcgcgaaaccaacgctccgactccaaactacgaaaaacgcgcgcgaaacgcgaaaaaaaaaacgaacgcgtacacacgaaacgttttcgaacgcgcgccccctaaccgaatctacgaaaaaactacgaattcccccgaacttccctaccccgcgcctacccgccgaatacttctcccccgccaaaaccgcgacccacgtcgccactcgaacccgcgcccacgcgcgaaaaccgcttcctacgaaaaaac

SEQ ID NO: 17539 - DNA, 710 bp, Artificial Sequence
  chemically treated genomic DNA (Homo sapiens) CpG-island No: 17539
aagggttaagcgttgaggtattagttgtgtcgtttaattgtgaaaagaaaatattttgcgttaaatacgaaacgttttttttttgcggttttttttttcggttttttttttgtcggttttttttttttttttttttcgtttattgtcgttttcgtcgataatttttaattcgtcgtttttttcgacgcgtttttcggttgtttttcgtttcgttcgttaggtttcgtcgttgttttttcggggttcgttttatttcgtcgcggtttttttttagtcgtcgggttcgggacgcgtagttaggcgggtgggtttcggcgtatgcgcgcggtcgtttttcggtatttgtgggagtcgcggttcggttttttcgagtatttgcgagcgggagttgttttttcgattcgtagcggggcgtgggcggtagagggggcggtggataggttttttcgtttttttaggtcgcgcggagttagcgtttcggttttaggttgcgaggggcgcgcgcggggcgcggggaggggggcgggcgcgtgtatacggggcgttttcgggcgcgcgttttttggtcgggtttgcggaggagttgcgggttttttcgggtttttttgtttcgcgtttgttcgtcgggtgtttttttttcgttaggatcgcggtttacgtcgttattcgagttcgcgtttacgcgcgggggtcgttttttgcgaggaggt

SEQ ID NO: 17540 - DNA, 710 bp, Artificial Sequence
  chemically treated genomic DNA (Homo sapiens) CpG-island No: 17540
acctcctcgcaaaaaacgacccccgcgcgtaaacgcgaactcgaataacgacgtaaaccgcgatcctaacgaaaaaaaaacacccgacgaacaaacgcgaaacaaaaaaacccgaaaaaacccgcaactcctccgcaaacccgaccaaaaaacgcgcgcccgaaaacgccccgtatacacgcgcccgcccccctccccgcgccccgcgcgcgcccctcgcaacctaaaaccgaaacgctaactccgcgcgacctaaaaaaacgaaaaaacctatccaccgccccctctaccgcccacgccccgctacgaatcgaaaaaacaactcccgctcgcaaatactcgaaaaaaccgaaccgcgactcccacaaataccgaaaaacgaccgcgcgcatacgccgaaacccacccgcctaactacgcgtcccgaacccgacgactaaaaaaaaaccgcgacgaaataaaacgaaccccgaaaaaacaacgacgaaacctaacgaacgaaacgaaaaacaaccgaaaaacgcgtcgaaaaaaacgacgaattaaaaattatcgacgaaaacgacaataaacgaaaaaaaaaaaaaaaaaaaaccgacaaaaaaaaaaccgaaaaaaaaaaccgcaaaaaaaaaacgtttcgtatttaacgcaaaatattttcttttcacaattaaacgacacaactaatacctcaacgcttaaccctt

SEQ ID NO: 17541 - DNA, 540 bp, Artificial Sequence
  chemically treated genomic DNA (Homo sapiens) CpG-island No: 17541
  unsure (42)
tcgcggggtgggcggcggtgggtggttttcgtttcgtttttnggaggtcgcgtggggggcgtgggggttttttcgcgggtttttataggttttttttcgggacgcggtaatttcggtcggaagataatgagtcgttcgcgtcgcgttcgtagttatcgttttcgtcgagggtttcgtcgttttagtcggtatagaagtaggagtagaagtcgaagttaagcgcgcggggttagggcgggggtttttttcggggttgtttcgtttggttttcggcggtcgcggggatcggttgttcggagcgaatgggggttttttttggattcggggttttggggaggggagcgcggtttttggtttttcgtcgtgcgttcggggtgcgggggtgttttggttgttgattttcgcgagtttcgagtatcgcgatttattcgttttatcgcgtcgcggttttcgagttttgtcgggcgttttttgtagttttcgttttatgtgttggggagattttcgggcggtttgggcgggatttcgtaggggtttttt

SEQ ID NO: 17542 - DNA, 540 bp, Artificial Sequence
  chemically treated genomic DNA (Homo sapiens) CpG-island No: 17542
  unsure (499)
aaaaaacccctacgaaatcccgcccaaaccgcccgaaaatctccccaacacataaaacgaaaactacaaaaaacgcccgacaaaactcgaaaaccgcgacgcgataaaacgaataaatcgcgatactcgaaactcgcgaaaatcaacaaccaaaacacccccgcaccccgaacgcacgacgaaaaaccaaaaaccgcgctcccctccccaaaaccccgaatccaaaaaaaacccccattcgctccgaacaaccgatccccgcgaccgccgaaaaccaaacgaaacaaccccgaaaaaaacccccgccctaaccccgcgcgcttaacttcgacttctactcctacttctataccgactaaaacgacgaaaccctcgacgaaaacgataactacgaacgcgacgcgaacgactcattatcttccgaccgaaattaccgcgtcccgaaaaaaaacctataaaaacccgcgaaaaaacccccacgccccccacgcgacctccnaaaaacgaaacgaaaaccacccaccgccgcccaccccgcga

SEQ ID NO: 17543 - DNA, 540 bp, Artificial Sequence
  chemically treated genomic DNA (Homo sapiens) CpG-island No: 17543
  unsure (499)
gagggatttttgcggaatttcgtttagatcgttcgggggtttttttagtatatggggcgggggttgtaaggggcgttcggtaggattcgggagtcgcggcgcggtggggcgggtgggtcgcggtgttcggggttcgcgggggttagtagttaggatattttcgtatttcgggcgtacggcggaggattaagggtcgcgtttttttttttagggtttcgagtttaggagagatttttattcgtttcggatagtcgattttcgcgatcgtcgagagttaagcggagtaatttcgggaggagttttcgttttggtttcgcgcgtttggtttcggtttttgtttttgtttttgtgtcggttggggcggcgggattttcggcgggggcggtgattgcgggcgcggcgcgggcggtttattgtttttcggtcggggttgtcgcgtttcgggggagggtttgtggagattcgcgaggaggtttttacgttttttacgcggtttttnggaggcggagcggaaattatttatcgtcgtttatttcgcgg

SEQ ID NO: 17544 - DNA, 540 bp, Artificial Sequence
  chemically treated genomic DNA (Homo sapiens) CpG-island No: 17544
  unsure (42)
ccgcgaaataaacgacgataaataatttccgctccgcctccnaaaaaccgcgtaaaaaacgtaaaaacctcctcgcgaatctccacaaaccctcccccgaaacgcgacaaccccgaccgaaaaacaataaaccgcccgcgccgcgcccgcaatcaccgcccccgccgaaaatcccgccgccccaaccgacacaaaaacaaaaacaaaaaccgaaaccaaacgcgcgaaaccaaaacgaaaactcctcccgaaattactccgcttaactctcgacgatcgcgaaaatcgactatccgaaacgaataaaaatctctcctaaactcgaaaccctaaaaaaaaaaacgcgacccttaatcctccgccgtacgcccgaaatacgaaaatatcctaactactaacccccgcgaaccccgaacaccgcgacccacccgccccaccgcgccgcgactcccgaatcctaccgaacgccccttacaacccccgccccatatactaaaaaaacccccgaacgatctaaacgaaattccgcaaaaatccctc

SEQ ID NO: 17545 - DNA, 2157 bp, Artificial Sequence
  chemically treated genomic DNA (Homo sapiens) CpG-island No: 17545
aaggttcgattttggttagatttgtaggttgcggaatcgggggcgcgcgggcgtagcgtagtatagttcggttatggagtacgcggtggttttttgcgttttttatttagggattgagttcggggttgtcggggagagcgagagcgagggcgtcgcgttttcggcgtagatattttgtagtttcggcgcgtttttgtgttttagtttcggggaagagttttcgtcgtagtttttcgttttagcggcggaaggcgcggttattttttcgttttttagcggtggttcgcgggtggtggagcggtagtgggaggtcggtagcgcgggcgtcgcgttttcggaggagttcgcgttttttgaggagcgcgcgtgttcggaagagttcgcggcgtcgtttttcgaatcgcgcgtttggtttgaggatttcgcgtttttcgaggagttcggggagttcgcgttcgtattttcggggttcggggcggtgtacggggagtcggatttggtgttggaggtgtcggggcgtcggttgcgcgcgtataaggcggtgttggcggcgcgtagcgattattttcgcgcgcgcgcgtcgcgggacgtgttgcgggtgtagggagtgagtttgacggcgttgcggttgttttttgtttacgtttatagcgagcgtatggcgggcgtgcggttcgataaagtggtcgaggtggtggtcggcgcgcgtcgtttgtagttgttcggcgtcgcgtagcgcgttatcgacgtcgtggggtcgtagttgagtttggttaattgttacgaggttttgagcgcggttaagcggtagcggttgaacgagttgcgcgacgtcgtttattgttttatgagtaataataattggaggtgttgcgcgagttcgtcgtgttcggtcgtttgtcgggcgtagagcgggatttgttgttgcgtcgtcgtttgcgcgtcggtcgcgtttattttttggtcgcggcgttcgggtcggcgggggagcgcgcgggtagtcggttttagagtttttcgggggatcggacgcgcgcggggacgcggtcgtttattgtttttacgcggcggtcggagagtggcgcgagttgacgcggttgttcgagggcgcgtcggcgcggggttgcggtttgtgcgttttttataattattttttcgtggcgggcggcgtggcgttcgcgggtttcgacggtcgcgcgcgttcgttcgattaggttttttgttataattcggttacggatagttggagcgtcgtgaggtttttgcgttaggcgcgttcgtagttgcggttgttggttttggacggttatttttacgtcgtgggcggcgagtgtttgtttagcgtggagcgttacgattcgcgcgtcgatcgttgggttttcgtggcgtcgttgtttcggggcgttttcgtcgtggcgtatgaggttattatttgttacggcgagatttacgtgttcgggggtttttttttttatcgtttgtttaagtatgattcgcggcgcgacgagtggtaggagtgttcgtgtagtagtagtcgcgagcgttcggtcgatatggtggttttcgacggttttatttatcgtttcgatttgagcggtagtcgcggcgaggcgtaggcggcggggtcgagcggggttagcgtgtttcgatattattgtttggttaagtagtggagttcgtgcgtcgcgtttttgcgttttttcggcggttttacgggtttgtagttttttcgttgcgtcgttttggacggcgttatttattgcgtgagtcgcgcgggtatttggcgtttttagtttgttcgggaaggcgaggtcggcggcgacgtaggttagggcggcggtttcgaggcgttgggcgtttttttggacgttcggggtgtgtttatttcgttcgtttttagtttgtttgagaagtcgtttcgaggggagtagggcgtttcgtaggtcggcggggtcggcgggcgtttttttcggtaggggtttgcggggtttaggtttttttgggttcgcggaggaggacgtggtggggagtcggggtcgttggttacgttggtggtttggatatttcgaaggagtttcgaggacgtttttagggtcgttttcgttttgttttttttttgtttgtttttgtttttgggggtggatgttttgagattta

SEQ ID NO: 17546 - DNA, 2157 bp, Artificial Sequence
  chemically treated genomic DNA (Homo sapiens) CpG-island No: 17546
taaatctcaaaacatccacccccaaaaacaaaaacaaacaaaaaaaaaacaaaacgaaaacgaccctaaaaacgtcctcgaaactccttcgaaatatccaaaccaccaacgtaaccaacgaccccgactccccaccacgtcctcctccgcgaacccaaaaaaacctaaaccccgcaaacccctaccgaaaaaaacgcccgccgaccccgccgacctacgaaacgccctactcccctcgaaacgacttctcaaacaaactaaaaacgaacgaaataaacacaccccgaacgtccaaaaaaacgcccaacgcctcgaaaccgccgccctaacctacgtcgccgccgacctcgccttcccgaacaaactaaaaacgccaaatacccgcgcgactcacgcaataaataacgccgtccaaaacgacgcaacgaaaaaactacaaacccgtaaaaccgccgaaaaaacgcaaaaacgcgacgcacgaactccactacttaaccaaacaataatatcgaaacacgctaaccccgctcgaccccgccgcctacgcctcgccgcgactaccgctcaaatcgaaacgataaataaaaccgtcgaaaaccaccatatcgaccgaacgctcgcgactactactacacgaacactcctaccactcgtcgcgccgcgaatcatacttaaacaaacgataaaaaaaaaaacccccgaacacgtaaatctcgccgtaacaaataataacctcatacgccacgacgaaaacgccccgaaacaacgacgccacgaaaacccaacgatcgacgcgcgaatcgtaacgctccacgctaaacaaacactcgccgcccacgacgtaaaaataaccgtccaaaaccaacaaccgcaactacgaacgcgcctaacgcaaaaacctcacgacgctccaactatccgtaaccgaattataacaaaaaacctaatcgaacgaacgcgcgcgaccgtcgaaacccgcgaacgccacgccgcccgccacgaaaaaataattataaaaaacgcacaaaccgcaaccccgcgccgacgcgccctcgaacaaccgcgtcaactcgcgccactctccgaccgccgcgtaaaaacaataaacgaccgcgtccccgcgcgcgtccgatcccccgaaaaactctaaaaccgactacccgcgcgctcccccgccgacccgaacgccgcgaccaaaaaataaacgcgaccgacgcgcaaacgacgacgcaacaacaaatcccgctctacgcccgacaaacgaccgaacacgacgaactcgcgcaacacctccaattattattactcataaaacaataaacgacgtcgcgcaactcgttcaaccgctaccgcttaaccgcgctcaaaacctcgtaacaattaaccaaactcaactacgaccccacgacgtcgataacgcgctacgcgacgccgaacaactacaaacgacgcgcgccgaccaccacctcgaccactttatcgaaccgcacgcccgccatacgctcgctataaacgtaaacaaaaaacaaccgcaacgccgtcaaactcactccctacacccgcaacacgtcccgcgacgcgcgcgcgcgaaaataatcgctacgcgccgccaacaccgccttatacgcgcgcaaccgacgccccgacacctccaacaccaaatccgactccccgtacaccgccccgaaccccgaaaatacgaacgcgaactccccgaactcctcgaaaaacgcgaaatcctcaaaccaaacgcgcgattcgaaaaacgacgccgcgaactcttccgaacacgcgcgctcctcaaaaaacgcgaactcctccgaaaacgcgacgcccgcgctaccgacctcccactaccgctccaccacccgcgaaccaccgctaaaaaacgaaaaaataaccgcgccttccgccgctaaaacgaaaaactacgacgaaaactcttccccgaaactaaaacacaaaaacgcgccgaaactacaaaatatctacgccgaaaacgcgacgccctcgctctcgctctccccgacaaccccgaactcaatccctaaataaaaaacgcaaaaaaccaccgcgtactccataaccgaactatactacgctacgcccgcgcgcccccgattccgcaacctacaaatctaaccaaaatcgaacctt

SEQ ID NO: 17547 - DNA, 2157 bp, Artificial Sequence
  chemically treated genomic DNA (Homo sapiens) CpG-island No: 17547
tgggttttaaggtatttatttttagaagtaaagataagtaaaaggaaagtaaagcgaaagcggttttgagagcgttttcggggttttttcgaagtgtttaaattattagcgtggttagcggtttcgattttttattacgttttttttcgcgggtttaaagggatttgggtttcgtaaatttttgtcgagggagacgttcgtcgatttcgtcggtttacggggcgttttgtttttttcggggcggttttttaggtaggttgagagcgaacgggatgagtatatttcggacgtttaagggggcgtttagcgtttcgaagtcgtcgttttggtttgcgtcgtcgtcggtttcgttttttcgggtaggttggaagcgttaggtgttcgcgcggtttacgtagtagatggcgtcgtttagggcggcgtagcggaagggttgtaggttcgtggggtcgtcggggaggcgtaggggcgcgacgtacgggttttattgtttggttaggtagtggtatcgggatacgttgatttcgttcggtttcgtcgtttgcgtttcgtcgcggttgtcgtttagatcgaagcggtagatgaagtcgtcgagagttattatgtcggtcgagcgttcgcggttgttgttgtacgggtatttttgttattcgtcgcgtcgcgggttatatttgagtaggcgatagaagagggagttttcggatacgtagatttcgtcgtggtaggtggtggttttatgcgttacggcgaaggcgtttcggggtagcggcgttacgggggtttagcggtcggcgcgcgggtcgtagcgttttacgttgagtaggtattcgtcgtttacggcgtagaggtgatcgtttagggttagtagtcgtagttgcgagcgcgtttggcgtaggggttttacggcgttttagttgttcgtggtcgggttgtagtagaagatttggtcggacgggcgcgcgcggtcgtcggggttcgcgggcgttacgtcgttcgttacgaagaggtagttgtagaggacgtataggtcgtagtttcgcgtcggcgcgttttcgggtagtcgcgttagttcgcgttatttttcggtcgtcgcgtggaagtagtagacggtcgcgttttcgcgcgcgttcggtttttcgaggggttttgaggtcggttgttcgcgcgttttttcgtcggttcgagcgtcgcggttaagaggtgggcgcggtcggcgcgtaggcggcggcgtagtagtaggtttcgttttgcgttcgataggcggtcgaatacggcgggttcgcgtagtatttttagttattgttgtttatgaagtagtaggcggcgtcgcgtagttcgtttagtcgttgtcgtttggtcgcgtttaggatttcgtagtagttggttaggtttagttgcggttttacggcgtcggtggcgcgttgcgcggcgtcgggtagttgtaggcggcgcgcgtcggttattatttcggttattttgtcgggtcgtacgttcgttatgcgttcgttgtaggcgtaggtaaggagtagtcgtagcgtcgttaggtttattttttgtattcgtagtacgtttcgcgacgcgcgcgcgcggaagtagtcgttgcgcgtcgttagtatcgttttgtgcgcgcgtagtcggcgtttcgatatttttagtattaggttcggtttttcgtatatcgtttcgaatttcgggggtacgggcgcgggtttttcgggtttttcgggggacgcggggtttttaagttaaacgcgcggttcgggggacggcgtcgcgggttttttcgggtacgcgcgttttttaggggacgcgagttttttcggggacgcggcgttcgcgttgtcggttttttattgtcgttttattattcgcgggttatcgttggagggcggggaggtggtcgcgtttttcgtcgttgaggcgagggattgcggcggggattttttttcggagttgaagtatagggacgcgtcgagattgtagggtgtttgcgtcggggacgcggcgttttcgttttcgtttttttcggtagtttcgggtttagtttttgggtagaggacgtagggggttatcgcgtgttttatggtcgggttgtgttgcgttgcgttcgcgcgttttcggtttcgtagtttgtaggtttggttaaggtcgagtttt

SEQ ID NO: 17548 - DNA, 2157 bp, Artificial Sequence
  chemically treated genomic DNA (Homo sapiens) CpG-island No: 17548
aaaactcgaccttaaccaaacctacaaactacgaaaccgaaaacgcgcgaacgcaacgcaacacaacccgaccataaaacacgcgataaccccctacgtcctctacccaaaaactaaacccgaaactaccgaaaaaaacgaaaacgaaaacgccgcgtccccgacgcaaacaccctacaatctcgacgcgtccctatacttcaactccgaaaaaaaatccccgccgcaatccctcgcctcaacgacgaaaaacgcgaccacctccccgccctccaacgataacccgcgaataataaaacgacaataaaaaaccgacaacgcgaacgccgcgtccccgaaaaaactcgcgtcccctaaaaaacgcgcgtacccgaaaaaacccgcgacgccgtcccccgaaccgcgcgtttaacttaaaaaccccgcgtcccccgaaaaacccgaaaaacccgcgcccgtacccccgaaattcgaaacgatatacgaaaaaccgaacctaatactaaaaatatcgaaacgccgactacgcgcgcacaaaacgatactaacgacgcgcaacgactacttccgcgcgcgcgcgtcgcgaaacgtactacgaatacaaaaaataaacctaacgacgctacgactactccttacctacgcctacaacgaacgcataacgaacgtacgacccgacaaaataaccgaaataataaccgacgcgcgccgcctacaactacccgacgccgcgcaacgcgccaccgacgccgtaaaaccgcaactaaacctaaccaactactacgaaatcctaaacgcgaccaaacgacaacgactaaacgaactacgcgacgccgcctactacttcataaacaacaataactaaaaatactacgcgaacccgccgtattcgaccgcctatcgaacgcaaaacgaaacctactactacgccgccgcctacgcgccgaccgcgcccacctcttaaccgcgacgctcgaaccgacgaaaaaacgcgcgaacaaccgacctcaaaacccctcgaaaaaccgaacgcgcgcgaaaacgcgaccgtctactacttccacgcgacgaccgaaaaataacgcgaactaacgcgactacccgaaaacgcgccgacgcgaaactacgacctatacgtcctctacaactacctcttcgtaacgaacgacgtaacgcccgcgaaccccgacgaccgcgcgcgcccgtccgaccaaatcttctactacaacccgaccacgaacaactaaaacgccgtaaaacccctacgccaaacgcgctcgcaactacgactactaaccctaaacgatcacctctacgccgtaaacgacgaatacctactcaacgtaaaacgctacgacccgcgcgccgaccgctaaacccccgtaacgccgctaccccgaaacgccttcgccgtaacgcataaaaccaccacctaccacgacgaaatctacgtatccgaaaactccctcttctatcgcctactcaaatataacccgcgacgcgacgaataacaaaaatacccgtacaacaacaaccgcgaacgctcgaccgacataataactctcgacgacttcatctaccgcttcgatctaaacgacaaccgcgacgaaacgcaaacgacgaaaccgaacgaaatcaacgtatcccgataccactacctaaccaaacaataaaacccgtacgtcgcgcccctacgcctccccgacgaccccacgaacctacaacccttccgctacgccgccctaaacgacgccatctactacgtaaaccgcgcgaacacctaacgcttccaacctacccgaaaaaacgaaaccgacgacgacgcaaaccaaaacgacgacttcgaaacgctaaacgcccccttaaacgtccgaaatatactcatcccgttcgctctcaacctacctaaaaaaccgccccgaaaaaaacaaaacgccccgtaaaccgacgaaatcgacgaacgtctccctcgacaaaaatttacgaaacccaaatccctttaaacccgcgaaaaaaaacgtaataaaaaatcgaaaccgctaaccacgctaataatttaaacacttcgaaaaaaccccgaaaacgctctcaaaaccgctttcgctttactttccttttacttatctttacttctaaaaataaataccttaaaaccca

SEQ ID NO: 17549 - DNA, 591 bp, Artificial Sequence
  chemically treated genomic DNA (Homo sapiens) CpG-island No: 17549
tttatatcgagtttttttgcgtacgcgcgttgcggagtcggatagttggtggtgttggtttggttcggttgttcgttttcgcgttttgtttcgaagcgcgcgatcgtggcgcgatacgtcggcgtataggcgttttcggggaggggcggcgcgtaggcgcggttgggggtgcgaggttgcgtaggcgcggacggcgttggtttgaagatttttagcgttgttttggcggagtagagataggttttcggggtggaggtgaggagagttgaggtcgcgcgggttttagtttcggagagcggtgggtcgcggtcgagtagagcgttaggcgggaggcgggtttaacggaggttttgtgggtagggagtaggttatcggggcgcggggggtcggggtcgttcgttttcgtcgggattcgttcgggttattttaggcgatggagtcgtagtacggcggggtaagtggttttcgggcgcgggtagcgatttatttcgtcggcgtgtggatcgtattttttttttaggggttagttagaaaggagatcggttttagggaagttggattttcgaattttatatttatttttcgttcgtt

SEQ ID NO: 17550 - DNA, 591 bp, Artificial Sequence
  chemically treated genomic DNA (Homo sapiens) CpG-island No: 17550
aacgaacgaaaaataaatataaaattcgaaaatccaacttccctaaaaccgatctcctttctaactaacccctaaaaaaaaaatacgatccacacgccgacgaaataaatcgctacccgcgcccgaaaaccacttaccccgccgtactacgactccatcgcctaaaataacccgaacgaatcccgacgaaaacgaacgaccccgaccccccgcgccccgataacctactccctacccacaaaacctccgttaaacccgcctcccgcctaacgctctactcgaccgcgacccaccgctctccgaaactaaaacccgcgcgacctcaactctcctcacctccaccccgaaaacctatctctactccgccaaaacaacgctaaaaatcttcaaaccaacgccgtccgcgcctacgcaacctcgcacccccaaccgcgcctacgcgccgcccctccccgaaaacgcctatacgccgacgtatcgcgccacgatcgcgcgcttcgaaacaaaacgcgaaaacgaacaaccgaaccaaaccaacaccaccaactatccgactccgcaacgcgcgtacgcaaaaaaactcgatataaa

SEQ ID NO: 17551 - DNA, 591 bp, Artificial Sequence
  chemically treated genomic DNA (Homo sapiens) CpG-island No: 17551
ggcgggcgggagatgggtgtggggttcgaggatttaatttttttagaatcgattttttttttagttgatttttgggaggaaagtgcggtttatacgtcggcgggataggtcgttgttcgcgttcggaggttatttgtttcgtcgtgttgcggttttatcgtttgaggtggttcgggcgggtttcggcgggagcgagcggtttcggtttttcgcgtttcggtagtttgttttttgtttatagagttttcgttaggttcgtttttcgtttggcgttttgttcggtcgcggtttatcgtttttcgggattggagttcgcgcggttttagttttttttatttttatttcgagggtttgtttttgtttcgttagggtaacgttgaaggtttttaaattaacgtcgttcgcgtttgcgtagtttcgtatttttagtcgcgtttgcgcgtcgttttttttcgagagcgtttgtgcgtcggcgtgtcgcgttacggtcgcgcgtttcggagtaaggcgcggagacgaatagtcgggttaagttagtattattaattgttcggtttcgtagcgcgcgtgcgtaggagggttcggtgtgga

SEQ ID NO: 17552 - DNA, 591 bp, Artificial Sequence
  chemically treated genomic DNA (Homo sapiens) CpG-island No: 17552
tccacaccgaaccctcctacgcacgcgcgctacgaaaccgaacaattaataatactaacttaacccgactattcgtctccgcgccttactccgaaacgcgcgaccgtaacgcgacacgccgacgcacaaacgctctcgaaaaaaaacgacgcgcaaacgcgactaaaaatacgaaactacgcaaacgcgaacgacgttaatttaaaaaccttcaacgttaccctaacgaaacaaaaacaaaccctcgaaataaaaataaaaaaaactaaaaccgcgcgaactccaatcccgaaaaacgataaaccgcgaccgaacaaaacgccaaacgaaaaacgaacctaacgaaaactctataaacaaaaaacaaactaccgaaacgcgaaaaaccgaaaccgctcgctcccgccgaaacccgcccgaaccacctcaaacgataaaaccgcaacacgacgaaacaaataacctccgaacgcgaacaacgacctatcccgccgacgtataaaccgcactttcctcccaaaaatcaactaaaaaaaaaatcgattctaaaaaaattaaatcctcgaaccccacacccatctcccgcccgcc

SEQ ID NO: 17553 - DNA, 595 bp, Artificial Sequence
  chemically treated genomic DNA (Homo sapiens) CpG-island No: 17553
aggtttcgcgtaggaggtagcgtagtaaaagaattttttatttcgtatttttttcgtttttgtattttgcgagtagtaggattatataaagtgatcggcgtttgtttttgttagtagttttgttcggcggtcggaggcgggacgaacgcgcgtatttcgttggggattaaaaatttgttgttcgtggtggtttcggacgtcgggacgtagttcgatttgcggaggtcggttcgtatttgtttgtacgtcggtgtagtggaaaagttgagggggtttgggaagggaggggatattaggcgttaggttgtgattagcgttgtaatcgtcgtaaattatcgacgggtagagttagtttatttaagttgaaagagagggggaaggcgatggaggttgcggttagttttttttaaaattcgttagtgttcgagttggtttcggcgtttttttttgtttttgtttaaatcgagggttagaagtttacggatttttttttggcggttaagatttttgttgagtatttttacgaatttattggaatcgagtaacgatttttttttttttgttggttttgttattttcgggaattcgaaatatt

SEQ ID NO: 17554 - DNA, 595 bp, Artificial Sequence
  chemically treated genomic DNA (Homo sapiens) CpG-island No: 17554
aatatttcgaattcccgaaaataacaaaaccaacaaaaaaaaaaaaatcgttactcgattccaataaattcgtaaaaatactcaacaaaaatcttaaccgccaaaaaaaaatccgtaaacttctaaccctcgatttaaacaaaaacaaaaaaaaacgccgaaaccaactcgaacactaacgaattttaaaaaaaactaaccgcaacctccatcgccttccccctctctttcaacttaaataaactaactctacccgtcgataatttacgacgattacaacgctaatcacaacctaacgcctaatatcccctcccttcccaaaccccctcaacttttccactacaccgacgtacaaacaaatacgaaccgacctccgcaaatcgaactacgtcccgacgtccgaaaccaccacgaacaacaaatttttaatccccaacgaaatacgcgcgttcgtcccgcctccgaccgccgaacaaaactactaacaaaaacaaacgccgatcactttatataatcctactactcgcaaaatacaaaaacgaaaaaaatacgaaataaaaaattcttttactacgctacctcctacgcgaaacct

SEQ ID NO: 17555 - DNA, 595 bp, Artificial Sequence
  chemically treated genomic DNA (Homo sapiens) CpG-island No: 17555
ggtgtttcgaattttcggaagtagtaaagttaataggaaagggagaatcgttgttcggttttagtgaattcgtggggatgtttagtaaaagttttggtcgttagaaagagattcgtgggtttttgattttcggtttaggtaaaaatagggggaggcgtcgagattagttcgagtattagcggattttgagagaaattgatcgtaatttttatcgtttttttttttttttttaatttggatgggttgattttattcgtcggtgatttacgacgattgtagcgttagttatagtttggcgtttggtgttttttttttttttaagtttttttagtttttttattgtatcggcgtataagtaagtgcgagtcggttttcgtaagtcggattacgtttcggcgttcgaggttattacgggtagtagatttttggtttttagcgaggtgcgcgcgttcgtttcgttttcgatcgtcgagtagagttgttagtagaagtaggcgtcggttattttatataattttgttgttcgtagggtgtaagagcgggaaaagtgcggagtagggaatttttttgttgcgttgttttttacgcggagttt

SEQ ID NO: 17556 - DNA, 595 bp, Artificial Sequence
  chemically treated genomic DNA (Homo sapiens) CpG-island No: 17556
aaactccgcgtaaaaaacaacgcaacaaaaaaattccctactccgcacttttcccgctcttacaccctacgaacaacaaaattatataaaataaccgacgcctacttctactaacaactctactcgacgatcgaaaacgaaacgaacgcgcgcacctcgctaaaaaccaaaaatctactacccgtaataacctcgaacgccgaaacgtaatccgacttacgaaaaccgactcgcacttacttatacgccgatacaataaaaaaactaaaaaaacttaaaaaaaaaaaaaacaccaaacgccaaactataactaacgctacaatcgtcgtaaatcaccgacgaataaaatcaacccatccaaattaaaaaaaaaaaaaaaaacgataaaaattacgatcaatttctctcaaaatccgctaatactcgaactaatctcgacgcctccccctatttttacctaaaccgaaaatcaaaaacccacgaatctctttctaacgaccaaaacttttactaaacatccccacgaattcactaaaaccgaacaacgattctccctttcctattaactttactacttccgaaaattcgaaacacc

SEQ ID NO: 17557 - DNA, 556 bp, Artificial Sequence
  chemically treated genomic DNA (Homo sapiens) CpG-island No: 17557
gtcggcgatgtttaggtgttttatgaagaagaagaggcgcgagtgtttttggcgtgtggtgcgtagttttagtagtatatacgggttttcgttaagcgttagaaggaggatagatatagtatagttattttacgggcgatagggtttcgtgtaatcgagggggttcgacggtgcggttgttttcggtttacggcggagcggcgttggagttggatgtttcggcgttttagttggatgcgagcgcgttttttatgattttggcggtatcggtgcgtttcggttttcgagttttttacggtttggcgcggttgggtcgtattaggcgtgtagaagggtgtaggggcgttcggggttttatttttggagattttacgaacggatatgttgggtttatcgtgaaataaatcgggagggtcgtgaggagatcgtcgcgtttttttttagacgcgggtagggcgtgtttgttttatttttaggaatttaatttatttgaaataatagggtataatcgtcggtttcgggttgtttagtcgttattttagaaattttcgttgga

SEQ ID NO: 17558 - DNA, 556 bp, Artificial Sequence
  chemically treated genomic DNA (Homo sapiens) CpG-island No: 17558
tccaacgaaaatttctaaaataacgactaaacaacccgaaaccgacgattataccctattatttcaaataaattaaattcctaaaaataaaacaaacacgccctacccgcgtctaaaaaaaaacgcgacgatctcctcacgaccctcccgatttatttcacgataaacccaacatatccgttcgtaaaatctccaaaaataaaaccccgaacgcccctacacccttctacacgcctaatacgacccaaccgcgccaaaccgtaaaaaactcgaaaaccgaaacgcaccgataccgccaaaatcataaaaaacgcgctcgcatccaactaaaacgccgaaacatccaactccaacgccgctccgccgtaaaccgaaaacaaccgcaccgtcgaaccccctcgattacacgaaaccctatcgcccgtaaaataactatactatatctatcctccttctaacgcttaacgaaaacccgtatatactactaaaactacgcaccacacgccaaaaacactcgcgcctcttcttcttcataaaacacctaaacatcgccgac

SEQ ID NO: 17559 - DNA, 556 bp, Artificial Sequence
  chemically treated genomic DNA (Homo sapiens) CpG-island No: 17559
tttaacggggatttttggggtggcggttgagtaattcgaggtcggcggttgtgttttgttgttttagatgagttgggtttttgggaatgggataagtacgttttattcgcgtttgaagagaaacgcggcggtttttttacggttttttcggtttgttttacggtggatttagtatattcgttcgtggagtttttaggagtggagtttcgggcgtttttatatttttttatacgtttgatgcggtttagtcgcgttaagtcgtaaagggttcgaaggtcggggcgtatcgatgtcgttagggttatggagggcgcgttcgtatttaattggagcgtcgaggtatttaattttagcgtcgtttcgtcgtgggtcgaaggtaatcgtatcgtcggattttttcggttgtacgaggttttgtcgttcgtgaagtagttgtgttgtgtttattttttttttggcgtttaacgggaattcgtgtgtgttgttggggttgcgtattatacgttagaagtattcgcgtttttttttttttatgaagtatttaagtatcgtcgat

SEQ ID NO: 17560 - DNA, 556 bp, Artificial Sequence
  chemically treated genomic DNA (Homo sapiens) CpG-island No: 17560
atcgacgatacttaaatacttcataaaaaaaaaaaaacgcgaatacttctaacgtataatacgcaaccccaacaacacacacgaattcccgttaaacgccaaaaaaaaaataaacacaacacaactacttcacgaacgacaaaacctcgtacaaccgaaaaaatccgacgatacgattaccttcgacccacgacgaaacgacgctaaaattaaatacctcgacgctccaattaaatacgaacgcgccctccataaccctaacgacatcgatacgccccgaccttcgaaccctttacgacttaacgcgactaaaccgcatcaaacgtataaaaaaatataaaaacgcccgaaactccactcctaaaaactccacgaacgaatatactaaatccaccgtaaaacaaaccgaaaaaaccgtaaaaaaaccgccgcgtttctcttcaaacgcgaataaaacgtacttatcccattcccaaaaacccaactcatctaaaacaacaaaacacaaccgccgacctcgaattactcaaccgccaccccaaaaatccccgttaaa

SEQ ID NO: 17561 - DNA, 1360 bp, Artificial Sequence
  chemically treated genomic DNA (Homo sapiens) CpG-island No: 17561
gttttcggcgatatttggagttcgtagttgagttattgatttttattcgggttttttcgttttcgttcggtcgtgatttgtttcggttttaaaagggaggaagggcgggaatgttcgggaagagtttggggttggtaggatttttagggggtggaatgaatgtcgtgagggcgagtaaggaggtatcggttggggttgaaaatgcgtacggggattatgagggtgattcgttttgagtcgttgcgaacgttttgcgagttggggtggttttggaggttttggagtagaagttaggttttcgtagagttcgttgtagcgtcgttggcgatcgggttgggttttattttttacgaaaagtttcgcggtttcggtcgcggaggtgttggagtttttgcgtttagacgaagggtcgaacggttagggttaggtcgcgtttttagagtttggcgagggtttcgcgttgttgggaaggcggaaacgtcggggcgcgcgtgtattttcgcgtttgtagcgtcgcgtacggtcgttaggtgtcgttgtggcgtttagcgcgtcgttcgtttcgttttagggaacgcgaaagtggcgcgggtttggacggcgggacggattacgtagggcgttgagaaggtcgcgttacggtgggcggggtttcgggtttttttttttcggtttttttcgcgttgtggttcgtttcgggcgcgttgcgttcgcgagtttttaggaggtttggcgggtatcgtaattagcgtcgcggatatcggtatcggcgttacggatttcgtaggatttcgcgttcgtcgtcgtcgttatgttggggttgttggtggcgttgttggttttggggttcgttgtttttgcgttgttggacgtttggtatttggtgcgtttttcgtgcgtcgtgttgcgcgcgcgtttgttgtagtcgcgcgttcgtgatttgttagttgagtagcgtttttcgggtcgcgtgttgttttcggatttggatttgttgttgtatatgaataacgcgcgttatttgcgcgaggtcgattttgcgcgcgtcgcgtatttgattcgttgcggggtgttcggggcgttgagggagttgcgggcgtatacggtgttggcggtttcgtgcgcgcgttatcgtcgttcgttgcgtttgttggaattttttaaggtgcgtattcgtttgttgggttgggataatcgcgcgttttatttggaagcgcgttttgttagtttgcgggacggtttcgtgtgcgcgttgttgcgttttcggtagtatttgttgggtattttattcgagcgcgtcgtgtagtttttgtgttagcgtagggtgagcggttttcgtttttggtttcggagtagggtt

SEQ ID NO: 17562 - DNA, 1360 bp, Artificial Sequence
  chemically treated genomic DNA (Homo sapiens) CpG-island No: 17562
aaccctactccgaaaccaaaaacgaaaaccgctcaccctacgctaacacaaaaactacacgacgcgctcgaataaaatacccaacaaatactaccgaaaacgcaacaacgcgcacacgaaaccgtcccgcaaactaacaaaacgcgcttccaaataaaacgcgcgattatcccaacccaacaaacgaatacgcaccttaaaaaattccaacaaacgcaacgaacgacgataacgcgcgcacgaaaccgccaacaccgtatacgcccgcaactccctcaacgccccgaacaccccgcaacgaatcaaatacgcgacgcgcgcaaaatcgacctcgcgcaaataacgcgcgttattcatatacaacaacaaatccaaatccgaaaacaacacgcgacccgaaaaacgctactcaactaacaaatcacgaacgcgcgactacaacaaacgcgcgcgcaacacgacgcacgaaaaacgcaccaaataccaaacgtccaacaacgcaaaaacaacgaaccccaaaaccaacaacgccaccaacaaccccaacataacgacgacgacgaacgcgaaatcctacgaaatccgtaacgccgataccgatatccgcgacgctaattacgatacccgccaaacctcctaaaaactcgcgaacgcaacgcgcccgaaacgaaccacaacgcgaaaaaaaccgaaaaaaaaaaacccgaaaccccgcccaccgtaacgcgaccttctcaacgccctacgtaatccgtcccgccgtccaaacccgcgccactttcgcgttccctaaaacgaaacgaacgacgcgctaaacgccacaacgacacctaacgaccgtacgcgacgctacaaacgcgaaaatacacgcgcgccccgacgtttccgccttcccaacaacgcgaaaccctcgccaaactctaaaaacgcgacctaaccctaaccgttcgacccttcgtctaaacgcaaaaactccaacacctccgcgaccgaaaccgcgaaacttttcgtaaaaaataaaacccaacccgatcgccaacgacgctacaacgaactctacgaaaacctaacttctactccaaaacctccaaaaccaccccaactcgcaaaacgttcgcaacgactcaaaacgaatcaccctcataatccccgtacgcattttcaaccccaaccgatacctccttactcgccctcacgacattcattccaccccctaaaaatcctaccaaccccaaactcttcccgaacattcccgcccttcctcccttttaaaaccgaaacaaatcacgaccgaacgaaaacgaaaaaacccgaataaaaatcaataactcaactacgaactccaaatatcgccgaaaac

SEQ ID NO: 17563 - DNA, 1360 bp, Artificial Sequence
  chemically treated genomic DNA (Homo sapiens) CpG-island No: 17563
ggttttgtttcggggttaggggcgggggtcgtttattttgcgttggtataggagttgtacgacgcgttcgggtgaggtgtttagtaggtgttgtcggaagcgtagtagcgcgtatacgaaatcgtttcgtaggttgataaagcgcgtttttaggtagaacgcgcggttgttttagtttagtaggcgggtgcgtattttgaagggttttagtaggcgtagcgagcggcggtggcgcgcgtacgaggtcgttagtatcgtgtgcgttcgtaatttttttagcgtttcgagtatttcgtagcgggttaggtgcgcgacgcgcgtaaagtcggtttcgcgtaggtagcgcgcgttgtttatgtgtaatagtaggtttaagttcgagggtagtacgcggttcgggaagcgttgtttagttagtaggttacggacgcgcggttgtagtaggcgcgcgcgtagtacggcgtacggaaggcgtattaggtattagacgtttagtagcgtaaagatagcgagttttagggttagtaacgttattagtagttttagtatagcggcggcggcgggcgcggggttttgcggagttcgtggcgtcggtgtcggtgttcgcggcgttggttacggtgttcgttaggttttttgggaattcgcgagcgtagcgcgttcggagcgaattatagcgcgagggaggtcgagggggaggggttcggagtttcgtttatcgtggcgcgatttttttagcgttttacgtggttcgtttcgtcgtttaggttcgcgttattttcgcgttttttggggcggggcgggcggcgcgttgagcgttatagcggtatttggcggtcgtgcgcggcgttgtaggcgcgagggtgtacgcgcgtttcggcgttttcgtttttttagtagcgcgagattttcgttaggttttgaagacgcggtttggttttggtcgttcggtttttcgtttgagcgtaaaggttttagtattttcgcggtcgaagtcgcgggatttttcgtggaaaatgggatttagttcgatcgttagcggcgttgtagcggattttgcgggaatttagtttttgttttaggatttttagggttattttagttcgtagggcgttcgtagcggtttagggcgaattatttttatggttttcgtgcgtatttttagttttagtcggtatttttttattcgtttttacgatatttattttattttttaaaggttttgttaattttaggtttttttcgagtattttcgtttttttttttttttgaaatcggagtaaattacggtcgggcggaagcgggggagttcgggtgagagttagtgatttagttgcggattttaagtgtcgtcggaggt

SEQ ID NO: 17564 - DNA, 1360 bp, Artificial Sequence
  chemically treated genomic DNA (Homo sapiens) CpG-island No: 17564
acctccgacgacacttaaaatccgcaactaaatcactaactctcacccgaactcccccgcttccgcccgaccgtaatttactccgatttcaaaaaaaaaaaaaaacgaaaatactcgaaaaaaacctaaaattaacaaaacctttaaaaaataaaataaatatcgtaaaaacgaataaaaaaataccgactaaaactaaaaatacgcacgaaaaccataaaaataattcgccctaaaccgctacgaacgccctacgaactaaaataaccctaaaaatcctaaaacaaaaactaaattcccgcaaaatccgctacaacgccgctaacgatcgaactaaatcccattttccacgaaaaatcccgcgacttcgaccgcgaaaatactaaaacctttacgctcaaacgaaaaaccgaacgaccaaaaccaaaccgcgtcttcaaaacctaacgaaaatctcgcgctactaaaaaaacgaaaacgccgaaacgcgcgtacaccctcgcgcctacaacgccgcgcacgaccgccaaataccgctataacgctcaacgcgccgcccgccccgccccaaaaaacgcgaaaataacgcgaacctaaacgacgaaacgaaccacgtaaaacgctaaaaaaatcgcgccacgataaacgaaactccgaacccctccccctcgacctccctcgcgctataattcgctccgaacgcgctacgctcgcgaattcccaaaaaacctaacgaacaccgtaaccaacgccgcgaacaccgacaccgacgccacgaactccgcaaaaccccgcgcccgccgccgccgctatactaaaactactaataacgttactaaccctaaaactcgctatctttacgctactaaacgtctaatacctaatacgccttccgtacgccgtactacgcgcgcgcctactacaaccgcgcgtccgtaacctactaactaaacaacgcttcccgaaccgcgtactaccctcgaacttaaacctactattacacataaacaacgcgcgctacctacgcgaaaccgactttacgcgcgtcgcgcacctaacccgctacgaaatactcgaaacgctaaaaaaattacgaacgcacacgatactaacgacctcgtacgcgcgccaccgccgctcgctacgcctactaaaacccttcaaaatacgcacccgcctactaaactaaaacaaccgcgcgttctacctaaaaacgcgctttatcaacctacgaaacgatttcgtatacgcgctactacgcttccgacaacacctactaaacacctcacccgaacgcgtcgtacaactcctataccaacgcaaaataaacgacccccgcccctaaccccgaaacaaaacc

SEQ ID NO: 17565 - DNA, 631 bp, Artificial Sequence
  chemically treated genomic DNA (Homo sapiens) CpG-island No: 17565
acgaggcgaggttttttagaggtttttaggcgttacgggtcgtttgaacgtttcgtttttacggtttggtcggggcggtggttacgcggtgttaggtaaacgtcgttcggttttgttttttcggttcgtggttgtggagggcgagttaggtttattcgttcgttgggagttttttggatttcgttgtttcgtagttaggttggcgtttgtttatattcgcggtagggttacgattagtagtaaggcgagtagcgttatcgtttttagcggtgtttagggaaggttagcgcgcggcgtttttttttcgtttttttggaattttcgtagttttcgcgcgtttttttttgggtttggtcggtagggggagtttcgttcgtttcggggcgcgcgttttttattcgtcggggtttgtttgggtttttggatttttattttagggttttttcgtcgttggcggttttgaacgtcggttttgattttttttttttgttgttgtttggacgcggtcggttggttatgtatgaaacgggcgcgggacgttttgtgaaagggttttttttgaaacgtttttttttattttattgggttttttttttgtggattttacgggttatataatgttgtcggcggt

SEQ ID NO: 17566 - DNA, 631 bp, Artificial Sequence
  chemically treated genomic DNA (Homo sapiens) CpG-island No: 17566
accgccgacaacattatataacccgtaaaatccacaaaaaaaaaacccaataaaataaaaaaaaacgtttcaaaaaaaaccctttcacaaaacgtcccgcgcccgtttcatacataaccaaccgaccgcgtccaaacaacaacaaaaaaaaaaaatcaaaaccgacgttcaaaaccgccaacgacgaaaaaaccctaaaataaaaatccaaaaacccaaacaaaccccgacgaataaaaaacgcgcgccccgaaacgaacgaaactccccctaccgaccaaacccaaaaaaaaacgcgcgaaaactacgaaaattccaaaaaaacgaaaaaaaaacgccgcgcgctaaccttccctaaacaccgctaaaaacgataacgctactcgccttactactaatcgtaaccctaccgcgaatataaacaaacgccaacctaactacgaaacaacgaaatccaaaaaactcccaacgaacgaataaacctaactcgccctccacaaccacgaaccgaaaaaacaaaaccgaacgacgtttacctaacaccgcgtaaccaccgccccgaccaaaccgtaaaaacgaaacgttcaaacgacccgtaacgcctaaaaacctctaaaaaacctcgcctcgt

SEQ ID NO: 17567 - DNA, 631 bp, Artificial Sequence
  chemically treated genomic DNA (Homo sapiens) CpG-island No: 17567
gtcgtcgataatattatgtggttcgtggggtttataagaagaaggtttaatgggataagggggggcgttttaaaaagagtttttttatagggcgtttcgcgttcgttttatgtatggttagtcggtcgcgtttaaatagtagtaaaaggggggaattagaatcggcgtttagggtcgttagcggcggggaggttttgagatgagggtttaaagatttaaataggtttcggcgggtgggaggcgcgcgtttcggggcgggcggggttttttttatcggttagatttagggagaggcgcgcggaggttgcgaaggttttagaagggcggggagggggcgtcgcgcgttgattttttttgggtatcgttggggacgatggcgttgttcgttttgttgttggtcgtggttttatcgcgggtgtggatagacgttaatttgattgcgagataacgagatttagaggatttttagcggacgggtgagtttggttcgttttttatagttacgggtcgagaggatagggtcgggcggcgtttgtttggtatcgcgtggttatcgtttcgattaggtcgtgagaacggagcgtttaggcggttcgtggcgtttggaagtttttggggagtttcgtttcgt

SEQ ID NO: 17568 - DNA, 631 bp, Artificial Sequence
  chemically treated genomic DNA (Homo sapiens) CpG-island No: 17568
acgaaacgaaactccccaaaaacttccaaacgccacgaaccgcctaaacgctccgttctcacgacctaatcgaaacgataaccacgcgataccaaacaaacgccgcccgaccctatcctctcgacccgtaactataaaaaacgaaccaaactcacccgtccgctaaaaatcctctaaatctcgttatctcgcaatcaaattaacgtctatccacacccgcgataaaaccacgaccaacaacaaaacgaacaacgccatcgtccccaacgatacccaaaaaaaatcaacgcgcgacgccccctccccgcccttctaaaaccttcgcaacctccgcgcgcctctccctaaatctaaccgataaaaaaaaccccgcccgccccgaaacgcgcgcctcccacccgccgaaacctatttaaatctttaaaccctcatctcaaaacctccccgccgctaacgaccctaaacgccgattctaattccccccttttactactatttaaacgcgaccgactaaccatacataaaacgaacgcgaaacgccctataaaaaaactctttttaaaacgcccccccttatcccattaaaccttcttcttataaaccccacgaaccacataatattatcgacgac

SEQ ID NO: 17569 - DNA, 1394 bp, Artificial Sequence
  chemically treated genomic DNA (Homo sapiens) CpG-island No: 17569
cgtgtcgtatttgtatagcgttgatgtcggcgttttgtttgttttttagtttttgtagttgtttttttagcgttttatttatgtttcggtatgtttcgatttttagggttttggttttgagtagacgacggttttcggatatttcgtttttggcggcgcgtacggcgtcggtgtttttggcggcgttttcggttagtacggtgaagcggtttttgaattattttttagcgttttgtatgtttttggcggttagtttttcgtattgcgcgcggatgtttttgagcgcggcggaaaggtcgggtttggttacgtttatttttacggagatttgcgcgtattggatttgcgtttgtagttcggcgatttttttttcgtgtattttttttagaaaagagatttcgtttattaagttgtcgatgcgtttttcgagttcggcgcgagcgagcgtcgtttcgtcggcgtttttgcgcgtttttattagtcggttttcggcgttttcgcggtttagtattttttttttatagcgcgtttgtaggttgcgtagggttttttttagtttttcgcgttcgttttggagcgtttgtttttcgttggtggtatttttcgtcgttaggcgtaggtcgcggattttttgttcgtatagcgttcggaagcgggatggttcggagtgtttttggcgtagtattagtagttcggtttttaggattttgttttgttgttttagttcgtgtacgcgttcgatgaagttggcgaagcggttattgaggttttggagttgcgtttttttttgcgtgcggatggatttgaggtcgttgttgatggcggttatttggtttaggtcgaggttttttagattgggtattaacgatttagagttggaggagtagttgcggcgtacggatagcgaggaagatatcggcgtcgagtagttggagtaagttgagcgtgcggtgttgtagtcgttgcgtacgttggagatgtgtattcggggcgtttttacgtagcgtcgtttgtaggaggtcgagtagtacggttcgtagttgaaggaatttatggtggcggtcggtggtttttcggttcgcggcggcggtgggagttcggagagagaggataggggagagagggaagggggaggatggatggttgtgtgcggttcggcgtcgttttgttatttttatttatacgtcgggaggtttttgacgtagtttgcgatcgattacggtacgtcggttagtgggggtagcgcgttgttgtagttaaggcgaggattttgcgtaaaagggaaggcggggtcgagttacggttcgaggagttgcggcggtcgttttttttattttgtttagagggttttgattttttttgagattttatgtttttttatttatttttttttt

SEQ ID NO: 17570 - DNA, 1394 bp, Artificial Sequence
  chemically treated genomic DNA (Homo sapiens) CpG-island No: 17570
aaaaaaaaaataaataaaaaaacataaaatctcaaaaaaaatcaaaaccctctaaacaaaataaaaaaaacgaccgccgcaactcctcgaaccgtaactcgaccccgccttcccttttacgcaaaatcctcgccttaactacaacaacgcgctacccccactaaccgacgtaccgtaatcgatcgcaaactacgtcaaaaacctcccgacgtataaataaaaataacaaaacgacgccgaaccgcacacaaccatccatcctcccccttccctctctcccctatcctctctctccgaactcccaccgccgccgcgaaccgaaaaaccaccgaccgccaccataaattccttcaactacgaaccgtactactcgacctcctacaaacgacgctacgtaaaaacgccccgaatacacatctccaacgtacgcaacgactacaacaccgcacgctcaacttactccaactactcgacgccgatatcttcctcgctatccgtacgccgcaactactcctccaactctaaatcgttaatacccaatctaaaaaacctcgacctaaaccaaataaccgccatcaacaacgacctcaaatccatccgcacgcaaaaaaaaacgcaactccaaaacctcaataaccgcttcgccaacttcatcgaacgcgtacacgaactaaaacaacaaaacaaaatcctaaaaaccgaactactaatactacgccaaaaacactccgaaccatcccgcttccgaacgctatacgaacaaaaaatccgcgacctacgcctaacgacgaaaaataccaccaacgaaaaacaaacgctccaaaacgaacgcgaaaaactaaaaaaaaccctacgcaacctacaaacgcgctataaaaaaaaaatactaaaccgcgaaaacgccgaaaaccgactaataaaaacgcgcaaaaacgccgacgaaacgacgctcgctcgcgccgaactcgaaaaacgcatcgacaacttaataaacgaaatctcttttctaaaaaaaatacacgaaaaaaaaatcgccgaactacaaacgcaaatccaatacgcgcaaatctccgtaaaaataaacgtaaccaaacccgacctttccgccgcgctcaaaaacatccgcgcgcaatacgaaaaactaaccgccaaaaacatacaaaacgctaaaaaataattcaaaaaccgcttcaccgtactaaccgaaaacgccgccaaaaacaccgacgccgtacgcgccgccaaaaacgaaatatccgaaaaccgtcgtctactcaaaaccaaaaccctaaaaatcgaaacataccgaaacataaataaaacgctaaaaaaacaactacaaaaactaaaaaacaaacaaaacgccgacatcaacgctatacaaatacgacacg

SEQ ID NO: 17571 - DNA, 1394 bp, Artificial Sequence
  chemically treated genomic DNA (Homo sapiens) CpG-island No: 17571
agaagggaaatgagtgagggggtatgggattttagagaaaattagggttttttgagtaaagtggaaaggacgatcgtcgtagtttttcgggtcgtagttcgatttcgtttttttttttgcgtagaattttcgttttggttgtagtagcgcgttgtttttattggtcggcgtgtcgtgatcgatcgtaggttgcgttaggagtttttcggcgtataaataggggtggtagaacggcgtcgagtcgtatatagttatttattttttttttttttttttttttttgtttttttttttcgggtttttatcgtcgtcgcgggtcggggagttatcggtcgttattatgagtttttttagttacgagtcgtattattcgattttttataagcggcgttacgtggagacgtttcgggtgtatatttttagcgtgcgtagcggttatagtatcgtacgtttagtttattttagttattcggcgtcggtgtttttttcgttgttcgtgcgtcgtagttatttttttagttttggatcgttgatgtttagtttggagaatttcgatttgagttaggtagtcgttattagtaacgattttaagtttattcgtacgtaggagaaggcgtagttttaggattttaatgatcgtttcgttagttttatcgagcgcgtgtacgagttggagtagtagaataaggttttggaagtcgagttgttggtgttgcgttagaagtatttcgagttatttcgttttcgggcgttgtacgagtaggagattcgcgatttgcgtttggcggcggaagatgttattaacgagaagtaggcgttttagggcgagcgcgaagggttggaggagattttgcgtaatttgtaggcgcgttatgaagaggaggtgttgagtcgcgaggacgtcgagggtcggttgatggaagcgcgtaaaggcgtcgacgaggcggcgttcgttcgcgtcgagttcgagaagcgtatcgatagtttgatggacgaaattttttttttgaagaaagtgtacgaagaggagatcgtcgaattgtaggcgtagatttagtacgcgtagattttcgtggagatggacgtgattaagttcgattttttcgtcgcgtttaaggatattcgcgcgtagtacgagaagttggtcgttaagaatatgtagaacgttgaggaatggtttaagagtcgttttatcgtgttgatcgagagcgtcgttaagaatatcgacgtcgtgcgcgtcgttaaggacgaggtgttcgagagtcgtcgtttgtttaaggttaagattttggaaatcgaagtatgtcggggtatgaatgaagcgttggagaagtagttgtaggagttggaggataagtagaacgtcgatattagcgttatgtaggtgcggtacg

SEQ ID NO: 17572 - DNA, 1394 bp, Artificial Sequence
  chemically treated genomic DNA (Homo sapiens) CpG-island No: 17572
cgtaccgcacctacataacgctaatatcgacgttctacttatcctccaactcctacaactacttctccaacgcttcattcataccccgacatacttcgatttccaaaatcttaaccttaaacaaacgacgactctcgaacacctcgtccttaacgacgcgcacgacgtcgatattcttaacgacgctctcgatcaacacgataaaacgactcttaaaccattcctcaacgttctacatattcttaacgaccaacttctcgtactacgcgcgaatatccttaaacgcgacgaaaaaatcgaacttaatcacgtccatctccacgaaaatctacgcgtactaaatctacgcctacaattcgacgatctcctcttcgtacactttcttcaaaaaaaaaatttcgtccatcaaactatcgatacgcttctcgaactcgacgcgaacgaacgccgcctcgtcgacgcctttacgcgcttccatcaaccgaccctcgacgtcctcgcgactcaacacctcctcttcataacgcgcctacaaattacgcaaaatctcctccaacccttcgcgctcgccctaaaacgcctacttctcgttaataacatcttccgccgccaaacgcaaatcgcgaatctcctactcgtacaacgcccgaaaacgaaataactcgaaatacttctaacgcaacaccaacaactcgacttccaaaaccttattctactactccaactcgtacacgcgctcgataaaactaacgaaacgatcattaaaatcctaaaactacgccttctcctacgtacgaataaacttaaaatcgttactaataacgactacctaactcaaatcgaaattctccaaactaaacatcaacgatccaaaactaaaaaaataactacgacgcacgaacaacgaaaaaaacaccgacgccgaataactaaaataaactaaacgtacgatactataaccgctacgcacgctaaaaatatacacccgaaacgtctccacgtaacgccgcttataaaaaatcgaataatacgactcgtaactaaaaaaactcataataacgaccgataactccccgacccgcgacgacgataaaaacccgaaaaaaaaaaacaaaaaaaaaaaaaaaaaaaaaaaataaataactatatacgactcgacgccgttctaccacccctatttatacgccgaaaaactcctaacgcaacctacgatcgatcacgacacgccgaccaataaaaacaacgcgctactacaaccaaaacgaaaattctacgcaaaaaaaaaaacgaaatcgaactacgacccgaaaaactacgacgatcgtcctttccactttactcaaaaaaccctaattttctctaaaatcccataccccctcactcatttcccttct

SEQ ID NO: 17573 - DNA, 1076 bp, Artificial Sequence
  chemically treated genomic DNA (Homo sapiens) CpG-island No: 17573
gattcgttttgtgtttagtttaagcgttggtcggattttaagtatttttgtttattatttcgtttcgcgttttcgattttagtcgggttttggttcgggagcgtttattttgtagcgtagttcgcgtttagtgtggatgtatagcgttcgggatatatgttcgcgttcggttaggggtagtagtaggtagtcggcgatgcggttgggtttcggcgcgttttcggagttttcgtcggttttcggagcggtaggcgggggttgcgggttgtagggcgagtcgggggggttgaggtagttcggggggttggagtattcggagaggcgcgggtatttggtcgttatagtcgtcgcgtcgtcggcgtttagtaggcgtttggtcgggacgtttcgggtggttgggaagagtagggtcgggtcgcggggttgcgaggcgtcgtttatggtagagcgtatcggatcgattcgtatttcgttttgggtcggggtggtttcggttttttaagtttcgggattcgcgcgggaagacgttgcgggtttggtgtcggtttcgcgattttttttagtcggcgggatggagtttgtagattggttttggttcggtttttacgaggggtaaagtaggagttatttttcggcgttcgcgttgtacgcggggattacgttggttgtgcgttcggggggcggaggtcggttcgagttttcggattttcgtaggtaagggttttcggagtttcgttgggggcggtcgttattattgttgtcgaggttgtcgatagttcgggaggtagaggcggcggcggtagcggttagcgatttcggggtttcgagtcgcgaggataggatttagtaggttcggcggagttacgaagtaaatgtattttttaaagcgatgagtttttagtaaaagtcgggggaattttttcgcggcgttcgggattttgagcgtttttgggtttcgggcgtgtatgagagcgagcgagacgcgtttagagagagtgattgtgagtgagtgtgagcgttgtatcgatttcggttagtgtattttttttttttttttttttttatttttttcgttt

SEQ ID NO: 17574 - DNA, 1076 bp, Artificial Sequence
  chemically treated genomic DNA (Homo sapiens) CpG-island No: 17574
aaacgaaaaaaataaaaaaaaaaaaaaaaaaaaaatacactaaccgaaatcgatacaacgctcacactcactcacaatcactctctctaaacgcgtctcgctcgctctcatacacgcccgaaacccaaaaacgctcaaaatcccgaacgccgcgaaaaaattcccccgacttttactaaaaactcatcgctttaaaaaatacatttacttcgtaactccgccgaacctactaaatcctatcctcgcgactcgaaaccccgaaatcgctaaccgctaccgccgccgcctctacctcccgaactatcgacaacctcgacaacaataataacgaccgcccccaacgaaactccgaaaacccttacctacgaaaatccgaaaactcgaaccgacctccgccccccgaacgcacaaccaacgtaatccccgcgtacaacgcgaacgccgaaaaataactcctactttacccctcgtaaaaaccgaaccaaaaccaatctacaaactccatcccgccgactaaaaaaaatcgcgaaaccgacaccaaacccgcaacgtcttcccgcgcgaatcccgaaacttaaaaaaccgaaaccaccccgacccaaaacgaaatacgaatcgatccgatacgctctaccataaacgacgcctcgcaaccccgcgacccgaccctactcttcccaaccacccgaaacgtcccgaccaaacgcctactaaacgccgacgacgcgacgactataacgaccaaatacccgcgcctctccgaatactccaaccccccgaactacctcaacccccccgactcgccctacaacccgcaacccccgcctaccgctccgaaaaccgacgaaaactccgaaaacgcgccgaaacccaaccgcatcgccgactacctactactacccctaaccgaacgcgaacatatatcccgaacgctatacatccacactaaacgcgaactacgctacaaaataaacgctcccgaaccaaaacccgactaaaatcgaaaacgcgaaacgaaataataaacaaaaatacttaaaatccgaccaacgcttaaactaaacacaaaacgaatc

SEQ ID NO: 17575 - DNA, 1076 bp, Artificial Sequence
  chemically treated genomic DNA (Homo sapiens) CpG-island No: 17575
aggcggaggaggtggaggaaaaggagaaggaggagtgtattggtcgggatcggtgtagcgtttatatttatttatagttattttttttgagcgcgtttcgttcgtttttatatacgttcggagtttaggagcgtttaggatttcgagcgtcgcgaaaaagttttttcggtttttgttggagatttatcgttttgggaagtgtatttgtttcgtggtttcgtcgagtttgttgaattttgttttcgcggttcgggatttcgggatcgttgatcgttgtcgtcgtcgtttttgtttttcggattatcggtagtttcggtaataatagtggcggtcgtttttagcgaggtttcgggagtttttgtttgcgggggttcggggattcgagtcggttttcgtttttcggacgtatagttagcgtggttttcgcgtgtaacgcgagcgtcggggagtggtttttgttttgtttttcgtgggggtcgagttaagattagtttgtaaattttatttcgtcggttggaagaagtcgcggagtcggtattaaattcgtagcgttttttcgcgcggatttcgggatttaaaaagtcggggttatttcggtttaggacgggatgcgggtcggttcggtgcgttttgttatgagcggcgtttcgtagtttcgcggttcggttttgttttttttagttattcgaggcgtttcggttaaacgtttgttggacgtcgacgacgcggcggttgtggcggttaagtgttcgcgttttttcgagtgttttagtttttcggattattttagttttttcggttcgttttgtagttcgtagttttcgtttgtcgtttcgggggtcggcggaggtttcgggagcgcgtcggggtttagtcgtatcgtcgattatttgttgttgtttttagtcgagcgcgagtatgtgtttcgggcgttgtgtatttatattggacgcgagttgcgttgtaaggtaggcgttttcgggttaggattcggttggggtcgggggcgcgggacggggtggtaggtaaaggtgtttggggttcggttaacgtttgggttgggtatagggcggatt

SEQ ID NO: 17576 - DNA, 1076 bp, Artificial Sequence
  chemically treated genomic DNA (Homo sapiens) CpG-island No: 17576
aatccgccctatacccaacccaaacgttaaccgaaccccaaacacctttacctaccaccccgtcccgcgcccccgaccccaaccgaatcctaacccgaaaacgcctaccttacaacgcaactcgcgtccaatataaatacacaacgcccgaaacacatactcgcgctcgactaaaaacaacaacaaataatcgacgatacgactaaaccccgacgcgctcccgaaacctccgccgacccccgaaacgacaaacgaaaactacgaactacaaaacgaaccgaaaaaactaaaataatccgaaaaactaaaacactcgaaaaaacgcgaacacttaaccgccacaaccgccgcgtcgtcgacgtccaacaaacgtttaaccgaaacgcctcgaataactaaaaaaaacaaaaccgaaccgcgaaactacgaaacgccgctcataacaaaacgcaccgaaccgacccgcatcccgtcctaaaccgaaataaccccgactttttaaatcccgaaatccgcgcgaaaaaacgctacgaatttaataccgactccgcgacttcttccaaccgacgaaataaaatttacaaactaatcttaactcgacccccacgaaaaacaaaacaaaaaccactccccgacgctcgcgttacacgcgaaaaccacgctaactatacgtccgaaaaacgaaaaccgactcgaatccccgaacccccgcaaacaaaaactcccgaaacctcgctaaaaacgaccgccactattattaccgaaactaccgataatccgaaaaacaaaaacgacgacgacaacgatcaacgatcccgaaatcccgaaccgcgaaaacaaaattcaacaaactcgacgaaaccacgaaacaaatacacttcccaaaacgataaatctccaacaaaaaccgaaaaaactttttcgcgacgctcgaaatcctaaacgctcctaaactccgaacgtatataaaaacgaacgaaacgcgctcaaaaaaaataactataaataaatataaacgctacaccgatcccgaccaatacactcctccttctccttttcctccacctcctccgcct

SEQ ID NO: 17577 - DNA, 540 bp, Artificial Sequence
  chemically treated genomic DNA (Homo sapiens) CpG-island No: 17577
tagcgcgcgttcgggcgtaggtggtgcgtttcgggtcggtttggacgcgcgtatacgtttttagggttgggaggggttgggtaggaggcggcgcgcgcgttttttcgtaggtttttagtttagcggagaagtcgaaggagggggcggaggaaaagttttcgtgacgtaagggttcggggaagtgggcgggagggacggggttgcggggagcgaaacgatcgttgattggtgcgcgcgttttatttatagtaagtataatgggttgcgggcgcgaggcgggagcgcgtattacggttttttgtattcgtcgttcgttgtagtttcgcggcgacgtttttcgtttcggggatttttttatcgtttagcgtttggggagtttcggttggagtcgtgggcgtcgtcgaggttcggttgtagtcggaggaaggagggggatagggaggtgatgaattttagaattagttatttatttttacgcggtagtttcggggaagatttgtgcgtggtagtggatgtggtttttttttttttttttttttg

SEQ ID NO: 17578 - DNA, 540 bp, Artificial Sequence
  chemically treated genomic DNA (Homo sapiens) CpG-island No: 17578
caaaaaaaaaaaaaaaaaaaaaccacatccactaccacgcacaaatcttccccgaaactaccgcgtaaaaataaataactaattctaaaattcatcacctccctatccccctccttcctccgactacaaccgaacctcgacgacgcccacgactccaaccgaaactccccaaacgctaaacgataaaaaaatccccgaaacgaaaaacgtcgccgcgaaactacaacgaacgacgaatacaaaaaaccgtaatacgcgctcccgcctcgcgcccgcaacccattatacttactataaataaaacgcgcgcaccaatcaacgatcgtttcgctccccgcaaccccgtccctcccgcccacttccccgaacccttacgtcacgaaaacttttcctccgccccctccttcgacttctccgctaaactaaaaacctacgaaaaaacgcgcgcgccgcctcctacccaacccctcccaaccctaaaaacgtatacgcgcgtccaaaccgacccgaaacgcaccacctacgcccgaacgcgcgcta

SEQ ID NO: 17579 - DNA, 540 bp, Artificial Sequence
  chemically treated genomic DNA (Homo sapiens) CpG-island No: 17579
taggaaaagggaaaaaaaaaagttatatttattattacgtataggtttttttcggaattatcgcgtgggggtgaatgattgattttggaatttattatttttttatttttttttttttttcggttgtagtcgggtttcggcggcgtttacggttttaatcggagttttttaggcgttgggcggtggggggattttcggggcgaaaggcgtcgtcgcggggttgtagcgagcggcgggtgtagagaatcgtggtgcgcgttttcgtttcgcgttcgtagtttattgtgtttattgtgaatgaggcgcgcgtattaattagcggtcgtttcgtttttcgtagtttcgtttttttcgtttattttttcgggtttttacgttacgggaatttttttttcgttttttttttcggttttttcgttgagttgggggtttgcgggagggcgcgcgcgtcgttttttgtttagttttttttagttttgggggcgtgtgcgcgcgtttaggtcggttcgggacgtattatttgcgttcgagcgcgcgttg

SEQ ID NO: 17580 - DNA, 540 bp, Artificial Sequence
  chemically treated genomic DNA (Homo sapiens) CpG-island No: 17580
caacgcgcgctcgaacgcaaataatacgtcccgaaccgacctaaacgcgcgcacacgcccccaaaactaaaaaaaactaaacaaaaaacgacgcgcgcgccctcccgcaaacccccaactcaacgaaaaaaccgaaaaaaaaaacgaaaaaaaaattcccgtaacgtaaaaacccgaaaaaataaacgaaaaaaacgaaactacgaaaaacgaaacgaccgctaattaatacgcgcgcctcattcacaataaacacaataaactacgaacgcgaaacgaaaacgcgcaccacgattctctacacccgccgctcgctacaaccccgcgacgacgcctttcgccccgaaaatccccccaccgcccaacgcctaaaaaactccgattaaaaccgtaaacgccgccgaaacccgactacaaccgaaaaaaaaaaaaaaataaaaaaataataaattccaaaatcaatcattcacccccacgcgataattccgaaaaaaacctatacgtaataataaatataacttttttttttcccttttccta

SEQ ID NO: 17581 - DNA, 746 bp, Artificial Sequence
  chemically treated genomic DNA (Homo sapiens) CpG-island No: 17581
gggttcggcgtttattggttcgtcgttgcggcgttggttcgcgattggtcgggcggcgtcggttcggcggtttttttatttttcggcgttagttttcgtagcgtttgtaagcgggcgggggcggggtgtgaggcgttgcggacggggttgcgggttcggtagcggtagttttagggcgcgagcgcggcggtgtcgattattgtaggtaatagaggcgttgcgagggtagtcgcggttttgtggaggtgagcgagacgtcgagggggttcgggtgtttatcgcggggcgggaagtgcggtatggggcggtatcgtttatagttagtcggtttcgtcgcggttttttatttcgggcggggttttatttgtttaaacgttttcgaacgttttcgtgtatagttttagtcggtcgcgtttcgagtagttagttggttcgcgtttcgttattcgttcggtttatgtttttgtagatcgtttcgttcgcgtatagcggcgggaattttagtttttgcgcgttcggtcgcgtttcgggtttttgtttcgtttcgttttcgttgttcggcgtttttgttcgttttgcgtttttggagtttttgtgtttttacgggcgggagcggggcgcgaaggtttgggggtgtttcgaggacgcgtcgcgtagtgagttttcgggtttaaggtttgattggttttgattttatgtcggttttgggatgtgattttatttttttttttagttgatttcgattt

SEQ ID NO: 17582 - DNA, 746 bp, Artificial Sequence
  chemically treated genomic DNA (Homo sapiens) CpG-island No: 17582
aaatcgaaatcaactaaaaaaaaaaataaaatcacatcccaaaaccgacataaaatcaaaaccaatcaaaccttaaacccgaaaactcactacgcgacgcgtcctcgaaacacccccaaaccttcgcgccccgctcccgcccgtaaaaacacaaaaactccaaaaacgcaaaacgaacaaaaacgccgaacaacgaaaacgaaacgaaacaaaaacccgaaacgcgaccgaacgcgcaaaaactaaaattcccgccgctatacgcgaacgaaacgatctacaaaaacataaaccgaacgaataacgaaacgcgaaccaactaactactcgaaacgcgaccgactaaaactatacacgaaaacgttcgaaaacgtttaaacaaataaaaccccgcccgaaataaaaaaccgcgacgaaaccgactaactataaacgataccgccccataccgcacttcccgccccgcgataaacacccgaaccccctcgacgtctcgctcacctccacaaaaccgcgactaccctcgcaacgcctctattacctacaataatcgacaccgccgcgctcgcgccctaaaactaccgctaccgaacccgcaaccccgtccgcaacgcctcacaccccgcccccgcccgcttacaaacgctacgaaaactaacgccgaaaaataaaaaaaccgccgaaccgacgccgcccgaccaatcgcgaaccaacgccgcaacgacgaaccaataaacgccgaaccc

SEQ ID NO: 17583 - DNA, 746 bp, Artificial Sequence
  chemically treated genomic DNA (Homo sapiens) CpG-island No: 17583
agatcggagttagttggaggagaaagtaaaattatattttagaatcggtatgaggttaaagttagttaaattttgggttcggaggtttattacgcggcgcgttttcggggtatttttagattttcgcgtttcgttttcgttcgtggaggtatagaaattttaggggcgtagagcggataaaggcgtcgggtagcgggagcgaggcggggtagaggttcggggcgcggtcgggcgcgtagaagttggggttttcgtcgttgtgcgcgggcgggacggtttgtagggatatggatcgggcgggtgacgggacgcgggttagttggttgttcgaggcgcggtcggttgaggttgtgtacgggggcgttcgggggcgtttgggtaagtgggatttcgttcggggtgggaagtcgcggcgggatcggttggttgtgagcggtatcgttttatgtcgtatttttcgtttcgcggtgggtattcgagttttttcggcgtttcgtttatttttatagggtcgcggttgttttcgtagcgtttttgttatttgtagtggtcggtatcgtcgcgttcgcgttttgaagttgtcgttatcgagttcgtaatttcgttcgtagcgttttatatttcgttttcgttcgtttgtaggcgttgcggagattagcgtcgaggggtgggggagtcgtcgagtcgacgtcgttcggttaatcgcgggttagcgtcgtagcggcgagttaatgagcgtcgagttt

SEQ ID NO: 17584 - DNA, 746 bp, Artificial Sequence
  chemically treated genomic DNA (Homo sapiens) CpG-island No: 17584
aaactcgacgctcattaactcgccgctacgacgctaacccgcgattaaccgaacgacgtcgactcgacgactcccccacccctcgacgctaatctccgcaacgcctacaaacgaacgaaaacgaaatataaaacgctacgaacgaaattacgaactcgataacgacaacttcaaaacgcgaacgcgacgataccgaccactacaaataacaaaaacgctacgaaaacaaccgcgaccctataaaaataaacgaaacgccgaaaaaactcgaatacccaccgcgaaacgaaaaatacgacataaaacgataccgctcacaaccaaccgatcccgccgcgacttcccaccccgaacgaaatcccacttacccaaacgcccccgaacgcccccgtacacaacctcaaccgaccgcgcctcgaacaaccaactaacccgcgtcccgtcacccgcccgatccatatccctacaaaccgtcccgcccgcgcacaacgacgaaaaccccaacttctacgcgcccgaccgcgccccgaacctctaccccgcctcgctcccgctacccgacgcctttatccgctctacgcccctaaaatttctatacctccacgaacgaaaacgaaacgcgaaaatctaaaaataccccgaaaacgcgccgcgtaataaacctccgaacccaaaatttaactaactttaacctcataccgattctaaaatataattttactttctcctccaactaactccgatct

SEQ ID NO: 17585 - DNA, 775 bp, Artificial Sequence
  chemically treated genomic DNA (Homo sapiens) CpG-island No: 17585
gtcgtcgttagtcgcgttagcgttagttgtttacgttggtttcgttttttcgtttttttacgatttagtgggggtttttttggttttatttggttatggcggcgtggattgggcggaaaataaggaaaggtcgcggcgtttaaggtttcgaagttagcgttttcggtcgtcgagtttcggggcggcgcgttcgtagtttttagaaattgttagaaggtttcgttttcggtttcgtttcgttttgtcgcggcgcgttcgggagttttagtcgggatttgggaggcgggtcgcgcggggacggcggacgcggacgcggggttgggagaggtttgggtcgtcggggttcgttgcgtttttttaacgttagggcgggacggggttgtttgggtcgttgcgaagggcgagggcgttgtaagttcgcggtgttggcgggttcgtgattttcggcgtcggaagtagggcgttgagtagcgggtgtttgagagtttaatcggtagtgtagacgcgatatcgtcgttagtgtttcggtaggttttttatagttttcgaggatacgatttcgaacgtttaggtcgttgtaagatcggtttttggggtatagcgcgtatacgttatatcgtttgcggatttcgtttaagagcgagttcgcgtttagttgtcgcgttgcgtattttttcgcgacgtagtttttcgttttttttttttttcggtatttttttaattagttttatgttattgcgggagtatttttattttatttacgtaataatttttt

SEQ ID NO: 17586 - DNA, 775 bp, Artificial Sequence
  chemically treated genomic DNA (Homo sapiens) CpG-island No: 17586
aaaaaattattacgtaaataaaataaaaatactcccgcaataacataaaactaattaaaaaaataccgaaaaaaaaaaaaaacgaaaaactacgtcgcgaaaaaatacgcaacgcgacaactaaacgcgaactcgctcttaaacgaaatccgcaaacgatataacgtatacgcgctataccccaaaaaccgatcttacaacgacctaaacgttcgaaatcgtatcctcgaaaactataaaaaacctaccgaaacactaacgacgatatcgcgtctacactaccgattaaactctcaaacacccgctactcaacgccctacttccgacgccgaaaatcacgaacccgccaacaccgcgaacttacaacgccctcgcccttcgcaacgacccaaacaaccccgtcccgccctaacgttaaaaaaacgcaacgaaccccgacgacccaaacctctcccaaccccgcgtccgcgtccgccgtccccgcgcgacccgcctcccaaatcccgactaaaactcccgaacgcgccgcgacaaaacgaaacgaaaccgaaaacgaaaccttctaacaatttctaaaaactacgaacgcgccgccccgaaactcgacgaccgaaaacgctaacttcgaaaccttaaacgccgcgacctttccttattttccgcccaatccacgccgccataaccaaataaaaccaaaaaaacccccactaaatcgtaaaaaaacgaaaaaacgaaaccaacgtaaacaactaacgctaacgcgactaacgacgac

SEQ ID NO: 17587 - DNA, 775 bp, Artificial Sequence
  chemically treated genomic DNA (Homo sapiens) CpG-island No: 17587
aaaggattattacgtgaataaaatggaaatattttcgtagtaatatgggattagttggaaaggtgtcgggaaggggggagggcgagagattgcgtcgcggaaaaatacgtagcgcggtaattgggcgcggattcgtttttaggcgaaattcgtaaacggtgtgacgtgtgcgcgttgtgttttaaaggtcggttttatagcgatttgggcgttcgaggtcgtgttttcgagagttatagggagtttgtcgaggtattgacggcggtgtcgcgtttatattgtcggttggatttttaggtattcgttatttagcgttttgttttcggcgtcgggaattacgagttcgttagtatcgcggatttgtagcgttttcgtttttcgtagcggtttagatagtttcgtttcgttttagcgttaggagagcgtagcgaatttcggcggtttaagttttttttagtttcgcgttcgcgttcgtcgttttcgcgcgattcgttttttagatttcggttggggttttcgggcgcgtcgcggtagggcggggcggggtcgggggcggggttttttggtagtttttgggagttgcgaacgcgtcgtttcggggttcggcggtcggaaacgttggtttcggagttttaggcgtcgcggtttttttttgtttttcgtttagtttacgtcgttatggttaagtggggttaggggaatttttattggatcgtggaggagcgggaggacgggattaacgtgaataattggcgttggcgcggttggcggcggt

SEQ ID NO: 17588 - DNA, 775 bp, Artificial Sequence
  chemically treated genomic DNA (Homo sapiens) CpG-island No: 17588
accgccgccaaccgcgccaacgccaattattcacgttaatcccgtcctcccgctcctccacgatccaataaaaattcccctaaccccacttaaccataacgacgtaaactaaacgaaaaacaaaaaaaaaccgcgacgcctaaaactccgaaaccaacgtttccgaccgccgaaccccgaaacgacgcgttcgcaactcccaaaaactaccaaaaaaccccgcccccgaccccgccccgccctaccgcgacgcgcccgaaaaccccaaccgaaatctaaaaaacgaatcgcgcgaaaacgacgaacgcgaacgcgaaactaaaaaaaacttaaaccgccgaaattcgctacgctctcctaacgctaaaacgaaacgaaactatctaaaccgctacgaaaaacgaaaacgctacaaatccgcgatactaacgaactcgtaattcccgacgccgaaaacaaaacgctaaataacgaatacctaaaaatccaaccgacaatataaacgcgacaccgccgtcaatacctcgacaaactccctataactctcgaaaacacgacctcgaacgcccaaatcgctataaaaccgacctttaaaacacaacgcgcacacgtcacaccgtttacgaatttcgcctaaaaacgaatccgcgcccaattaccgcgctacgtatttttccgcgacgcaatctctcgccctccccccttcccgacacctttccaactaatcccatattactacgaaaatatttccattttattcacgtaataatccttt

SEQ ID NO: 17589 - DNA, 806 bp, Artificial Sequence
  chemically treated genomic DNA (Homo sapiens) CpG-island No: 17589
gcgcgcgggggtgcgggcggtagggtgcgcgcgtggtcgtgggggagcgcgcgcgcgggtcggggttcgtgttggggtttttaaagaaaagttgtagcgaggcgtttttcggcgttcggcgtttgggttcggtcgggggtgtttcgttagttttttttttcgtcgcggtcgtaggttagtttggttcgttttaattcggcgtttcgcgcgggaagcgtagttatcggggatcgggggttttgggttggttttcgtaatagtcgttgggagatcgttcgcggttttcgttttcgttatcgttttcgttttttcgggtcgtttttattttttcggggaggcggcgttcgggtttagttgttcgggaatttaggtttgcggcgttttcgggtagcgaaggcggattggcgcgcggcggagtcggggattgtagttttttcgtttcgttttttgtaattggtttcgttcgaaagtgttcggaaagtaaggttgggtcgcgttcgtttcgtcggggacggggtgatttttcggtttttagtcgtgtttttgttgtttgttttttttggggtggttttttttgcgtaggagaaaacgtttcggcgggagtatttggtcggttcgtagcgtattagcgtagtattttgggtaataataacgtttggttttagcgcggttttttttatttaattttttatagtttcggattttagcggaaatgttttttcggggtcggtttattgggataattggagatgggggggttaagtagggtgttacggtttagacgttttaaattattttaatatata

SEQ ID NO: 17590 - DNA, 806 bp, Artificial Sequence
  chemically treated genomic DNA (Homo sapiens) CpG-island No: 17590
tatatattaaaataatttaaaacgtctaaaccgtaacaccctacttaacccccccatctccaattatcccaataaaccgaccccgaaaaaacatttccgctaaaatccgaaactataaaaaattaaataaaaaaaaccgcgctaaaaccaaacgttattattacccaaaatactacgctaatacgctacgaaccgaccaaatactcccgccgaaacgttttctcctacgcaaaaaaaaccaccccaaaaaaaacaaacaacaaaaacacgactaaaaaccgaaaaatcaccccgtccccgacgaaacgaacgcgacccaaccttactttccgaacactttcgaacgaaaccaattacaaaaaacgaaacgaaaaaactacaatccccgactccgccgcgcgccaatccgccttcgctacccgaaaacgccgcaaacctaaattcccgaacaactaaacccgaacgccgcctccccgaaaaaataaaaacgacccgaaaaaacgaaaacgataacgaaaacgaaaaccgcgaacgatctcccaacgactattacgaaaaccaacccaaaacccccgatccccgataactacgcttcccgcgcgaaacgccgaattaaaacgaaccaaactaacctacgaccgcgacgaaaaaaaaaactaacgaaacacccccgaccgaacccaaacgccgaacgccgaaaaacgcctcgctacaacttttctttaaaaaccccaacacgaaccccgacccgcgcgcgcgctcccccacgaccacgcgcgcaccctaccgcccgcacccccgcgcgc

SEQ ID NO: 17591 - DNA, 806 bp, Artificial Sequence
  chemically treated genomic DNA (Homo sapiens) CpG-island No: 17591
tgtgtattggaatgatttggagcgtttaagtcgtggtattttatttaatttttttatttttagttattttaatgaatcgatttcgagggggtattttcgttgaagttcggggttgtaaaaaattaagtgagaagagtcgcgttaaagttaagcgttgttgttatttaaggtattgcgttgatgcgttgcgggtcgattaggtgttttcgtcggggcgtttttttttacgtaggaagggttattttaaaagaggtaggtaataagggtacggttggaggtcggaaggttatttcgttttcggcggggcgggcgcggtttaattttatttttcgggtattttcgggcggggttaattgtagggaacggggcggggaggttatagttttcggtttcgtcgcgcgttagttcgttttcgttgttcggaggcgtcgtaggtttgggttttcggatagttgaattcgagcgtcgttttttcgaaaaggtgaaggcggttcggggaggcggggacggtgacgggggcgggggtcgcgggcggttttttaacggttgttgcgggggttagtttaaagttttcgattttcggtagttgcgtttttcgcgcggggcgtcggattagggcgggttaagttggtttgcggtcgcggcgggaagaagggttagcgaagtattttcgatcgggtttaggcgtcggacgtcggggggcgtttcgttgtaatttttttttggaagttttaatacgagtttcggttcgcgcgcgcgtttttttacggttacgcgcgtattttgtcgttcgtattttcgcgcgt

SEQ ID NO: 17592 - DNA, 806 bp, Artificial Sequence
  chemically treated genomic DNA (Homo sapiens) CpG-island No: 17592
acgcgcgaaaatacgaacgacaaaatacgcgcgtaaccgtaaaaaaacgcgcgcgcgaaccgaaactcgtattaaaacttccaaaaaaaaattacaacgaaacgccccccgacgtccgacgcctaaacccgatcgaaaatacttcgctaacccttcttcccgccgcgaccgcaaaccaacttaacccgccctaatccgacgccccgcgcgaaaaacgcaactaccgaaaatcgaaaactttaaactaacccccgcaacaaccgttaaaaaaccgcccgcgacccccgcccccgtcaccgtccccgcctccccgaaccgccttcaccttttcgaaaaaacgacgctcgaattcaactatccgaaaacccaaacctacgacgcctccgaacaacgaaaacgaactaacgcgcgacgaaaccgaaaactataacctccccgccccgttccctacaattaaccccgcccgaaaatacccgaaaaataaaattaaaccgcgcccgccccgccgaaaacgaaataaccttccgacctccaaccgtacccttattacctacctcttttaaaataacccttcctacgtaaaaaaaaacgccccgacgaaaacacctaatcgacccgcaacgcatcaacgcaataccttaaataacaacaacgcttaactttaacgcgactcttctcacttaattttttacaaccccgaacttcaacgaaaataccccctcgaaatcgattcattaaaataactaaaaataaaaaaattaaataaaataccacgacttaaacgctccaaatcattccaatacaca

SEQ ID NO: 17593 - DNA, 751 bp, Artificial Sequence
  chemically treated genomic DNA (Homo sapiens) CpG-island No: 17593
gtcgcgttttcgggtgttgaatgtcgtttttgttttttcgtaaattcgtagtatttatggtcgtttacgtagtattttaatgaggagcgttattcgttcgcgtttaggagtatgaagggttttttcggaagtcggatttagtcgtcgttgtgtttcgggtatacgtgtggtttggcgtttcggaggattgcgagtatttgtattacgggttcgacgcgcggtcgttttatttgttgagtttcgtcgatagttgtttcggggggcgttatcgttgttcgtcgcgtagttcggtgtattcggagtgcgtgatgatgtcggtggtgttgggcgattacgtgtttagtagtattttttcgcggatgtattatagttcgtattacgatacgcgcgacgattgcgttgtggtttacgcgggcgttaagattaatcgtatttcggttaatttgttggattagttcgagaagtagttgtcgttgtatcgggacggtttttatacgttgtagtattagaggacgttcgcggtcgtcgagtagcgtagcgagagtttcgggcggattcgttatttggtatatttcgtgtagaagttttttattaagtcgtattcgttggagggtttttttaaaagtaacgttaacggtattaaggcggacggtcgggcggataattattattacgtttattacgttaagtatagtaagaggagtaagagtaaggagcgtaagtcggagggtaagtttcggttcggtatgag

SEQ ID NO: 17594 - DNA, 751 bp, Artificial Sequence
  chemically treated genomic DNA (Homo sapiens) CpG-island No: 17594
ctcataccgaaccgaaacttaccctccgacttacgctccttactcttactcctcttactatacttaacgtaataaacgtaataataattatccgcccgaccgtccgccttaataccgttaacgttacttttaaaaaaaccctccaacgaatacgacttaataaaaaacttctacacgaaatataccaaataacgaatccgcccgaaactctcgctacgctactcgacgaccgcgaacgtcctctaatactacaacgtataaaaaccgtcccgatacaacgacaactacttctcgaactaatccaacaaattaaccgaaatacgattaatcttaacgcccgcgtaaaccacaacgcaatcgtcgcgcgtatcgtaatacgaactataatacatccgcgaaaaaatactactaaacacgtaatcgcccaacaccaccgacatcatcacgcactccgaatacaccgaactacgcgacgaacaacgataacgccccccgaaacaactatcgacgaaactcaacaaataaaacgaccgcgcgtcgaacccgtaatacaaatactcgcaatcctccgaaacgccaaaccacacgtatacccgaaacacaacgacgactaaatccgacttccgaaaaaacccttcatactcctaaacgcgaacgaataacgctcctcattaaaatactacgtaaacgaccataaatactacgaatttacgaaaaaacaaaaacgacattcaacacccgaaaacgcgac

SEQ ID NO: 17595 - DNA, 751 bp, Artificial Sequence
  chemically treated genomic DNA (Homo sapiens) CpG-island No: 17595
tttatgtcgggtcggggtttgtttttcggtttgcgttttttgtttttgttttttttgttgtgtttggcgtggtgggcgtggtggtggttgttcgttcggtcgttcgttttggtgtcgttggcgttgtttttggaggagttttttagcgagtgcgatttggtgaagagtttttgtacggagtgtattaggtggcggattcgttcggggttttcgttgcgttgttcggcggtcgcggacgttttttggtattgtagcgtgtggaagtcgtttcggtgtagcggtagttgtttttcgaattggtttagtaggttggtcgggatgcggttgattttggcgttcgcgtgggttatagcgtagtcgtcgcgcgtgtcgtagtgcgagttgtagtgtattcgcgggaaggtgttgttggatacgtggtcgtttagtattatcggtattattacgtatttcgagtgtatcgagttgcgcggcgagtagcggtggcgtttttcggggtagttgtcggcggggtttagtaggtagggcggtcgcgcgtcgggttcgtggtgtaggtgttcgtagtttttcggggcgttagattatacgtgtgttcggaatatagcggcggttgggttcgattttcggaaaggttttttatgtttttgggcgcgggcgagtagcgttttttattgaagtgttgcgtgggcgattatgagtattgcgggtttgcggggaaatagaaacggtatttaatattcggaagcgcggt

SEQ ID NO: 17596 - DNA, 751 bp, Artificial Sequence
  chemically treated genomic DNA (Homo sapiens) CpG-island No: 17596
accgcgcttccgaatattaaataccgtttctatttccccgcaaacccgcaatactcataatcgcccacgcaacacttcaataaaaaacgctactcgcccgcgcccaaaaacataaaaaacctttccgaaaatcgaacccaaccgccgctatattccgaacacacgtataatctaacgccccgaaaaactacgaacacctacaccacgaacccgacgcgcgaccgccctacctactaaaccccgccgacaactaccccgaaaaacgccaccgctactcgccgcgcaactcgatacactcgaaatacgtaataataccgataatactaaacgaccacgtatccaacaacaccttcccgcgaatacactacaactcgcactacgacacgcgcgacgactacgctataacccacgcgaacgccaaaatcaaccgcatcccgaccaacctactaaaccaattcgaaaaacaactaccgctacaccgaaacgacttccacacgctacaataccaaaaaacgtccgcgaccgccgaacaacgcaacgaaaaccccgaacgaatccgccacctaatacactccgtacaaaaactcttcaccaaatcgcactcgctaaaaaactcctccaaaaacaacgccaacgacaccaaaacgaacgaccgaacgaacaaccaccaccacgcccaccacgccaaacacaacaaaaaaaacaaaaacaaaaaacgcaaaccgaaaaacaaaccccgacccgacataaa

SEQ ID NO: 17597 - DNA, 1220 bp, Artificial Sequence
  chemically treated genomic DNA (Homo sapiens) CpG-island No: 17597
ttcgaattcgtcggtttttatttgtgttattttcgatttcgtcggtttttatttgtgttattttcgatttcgtcggtttttatttgtgttattttcgatttcgtcggtttttatttgtgttattttcgatttcgtcggtttttatttgtgttattttcgatttcgtcggtttttatttgtgttattttcgaattcgtcggtttttatttgtgttattttcgaattcgtcggtttttatttgtgttattttggaattcgtcggtttttatttgtgttattttcgatttcgtcggtttttatttgtgttattttcgatttcgtcggtttttatttgtgttattttcgatttcgtcggtttttatttgtgttatttttttaattcgtcggtttttatttgtgttattttcgaattcgtcggtttttatttgtgttattttttaattcgtcggtttttatttgtgttattttttaattcgtcggtttttatttgtgttattttcgatttcgtcggtttttatttgtgttattttcgatttcgtcggtttttatttgtgttattttcgatttcgttggtttttatttgtgttattttggaattcgtcggtttttatttgtgttattttcgatttcgtcggtttttatttgtgttattttttaaattcgtcggtttttatttgtgttattttcgaattcgtcggtttttatttgtgttattttttaattcgtcggtttttatttgtgttattttttaattcgtcggtttttatttgtgttattttcgatttcgtcggtttttatttgtgttattttcgatttcgtcggtttttatttgtgttattttcgatttcgtcggtttttatttgtgttattttggaattcgtcggtttttatttgtgttattttcgaattcgtcggtttttatttgtgttattttcgatttcgtcggtttttatttgtgttattttcgatttcgttagtttttatttgtgttattttcgatttcgtcggtttttatttgtgttattttggaattcgtcggtttttatttgtgttattttcgaattcgtcggtttttatttgtgttattttcgatttcgtcggtttttatttgtgttattttttaattcgtcggtttttatttgtgttattttcgatttcgtcggtttttatttgtgttatttttcggggttgaaattattttaagtgtttatttgggtgtt

SEQ ID NO: 17598 - DNA, 1220 bp, Artificial Sequence
  chemically treated genomic DNA (Homo sapiens) CpG-island No: 17598
aacacccaaataaacacttaaaataatttcaaccccgaaaaataacacaaataaaaaccgacgaaatcgaaaataacacaaataaaaaccgacgaattaaaaaataacacaaataaaaaccgacgaaatcgaaaataacacaaataaaaaccgacgaattcgaaaataacacaaataaaaaccgacgaattccaaaataacacaaataaaaaccgacgaaatcgaaaataacacaaataaaaactaacgaaatcgaaaataacacaaataaaaaccgacgaaatcgaaaataacacaaataaaaaccgacgaattcgaaaataacacaaataaaaaccgacgaattccaaaataacacaaataaaaaccgacgaaatcgaaaataacacaaataaaaaccgacgaaatcgaaaataacacaaataaaaaccgacgaaatcgaaaataacacaaataaaaaccgacgaattaaaaaataacacaaataaaaaccgacgaattaaaaaataacacaaataaaaaccgacgaattcgaaaataacacaaataaaaaccgacgaatttaaaaaataacacaaataaaaaccgacgaaatcgaaaataacacaaataaaaaccgacgaattccaaaataacacaaataaaaaccaacgaaatcgaaaataacacaaataaaaaccgacgaaatcgaaaataacacaaataaaaaccgacgaaatcgaaaataacacaaataaaaaccgacgaattaaaaaataacacaaataaaaaccgacgaattaaaaaataacacaaataaaaaccgacgaattcgaaaataacacaaataaaaaccgacgaattaaaaaaataacacaaataaaaaccgacgaaatcgaaaataacacaaataaaaaccgacgaaatcgaaaataacacaaataaaaaccgacgaaatcgaaaataacacaaataaaaaccgacgaattccaaaataacacaaataaaaaccgacgaattcgaaaataacacaaataaaaaccgacgaattcgaaaataacacaaataaaaaccgacgaaatcgaaaataacacaaataaaaaccgacgaaatcgaaaataacacaaataaaaaccgacgaaatcgaaaataacacaaataaaaaccgacgaaatcgaaaataacacaaataaaaaccgacgaaatcgaaaataacacaaataaaaaccgacgaattcgaa

SEQ ID NO: 17599 - DNA, 1220 bp, Artificial Sequence
  chemically treated genomic DNA (Homo sapiens) CpG-island No: 17599
ggtatttaggtgagtatttaaaatggttttagtttcgaggggtgatataggtgaggatcggcggggtcgagggtgatataggtgagggtcggcgggttggagggtgatataggtgaggatcggcggggtcgagggtgatataggtgaggatcggcgggttcgagggtgatataggtgaggatcggcgggttttagggtgatataggtgaggatcggcggggtcgagggtgatataggtgaggattggcggggtcgagggtgatataggtgagggtcggcggggtcgagggtgatataggtgaggatcggcgggttcgagggtgatataggtgaggatcggcgggttttagggtgatataggtgaggatcggcggggtcgagggtgatataggtgaggatcggcggggtcgagggtgatataggtgagggtcggcggggtcgagggtgatataggtgagggtcggcgggttggagggtgatataggtgggggtcggcgggttggagggtgatataggtgagggtcggcgggttcgagggtgatataggtgaggatcggcgggtttgaggggtgatataggtgaggatcggcggggtcgagggtgatataggtgaggatcggcgggttttagggtgatataggtgaggattagcggggtcgagggtgatataggtgagggtcggcggggtcgagggtgatataggtgagggtcggcggggtcgagggtgatataggtgagggtcggcgggttggagggtgatataggtgggggtcggcgggttggagggtgatataggtgagggtcggcgggttcgagggtgatataggtgagggtcggcgggttggaggggtgatataggtgagggtcggcggggtcgagggtgatataggtgagggtcggcggggtcgagggtgatataggtgaggatcggcggggtcgagggtgatataggtgaggatcggcgggttttagggtgatataggtgaggatcggcgggttcgagggtgatataggtgagggtcggcgggttcgagggtgatataggtgaggatcggcggggtcgagggtgatataggtgaggatcggcggggtcgagggtgatataggtgagggtcggcggggtcgagggtgatataggtggggatcggcggggtcgagggtgatataggtgaggatcggcggggtcgagggtgatataggtggggatcggcgggttcgag

SEQ ID NO: 17600 - DNA, 1220 bp, Artificial Sequence
  chemically treated genomic DNA (Homo sapiens) CpG-island No: 17600
ctcgaacccgccgatccccacctatatcaccctcgaccccgccgatcctcacctatatcaccctcgaccccgccgatccccacctatatcaccctcgaccccgccgaccctcacctatatcaccctcgaccccgccgatcctcacctatatcaccctcgaccccgccgatcctcacctatatcaccctcgaacccgccgaccctcacctatatcaccctcgaacccgccgatcctcacctatatcaccctaaaacccgccgatcctcacctatatcaccctcgaccccgccgatcctcacctatatcaccctcgaccccgccgaccctcacctatatcaccctcgaccccgccgaccctcacctatatcacccctccaacccgccgaccctcacctatatcaccctcgaacccgccgaccctcacctatatcaccctccaacccgccgacccccacctatatcaccctccaacccgccgaccctcacctatatcaccctcgaccccgccgaccctcacctatatcaccctcgaccccgccgaccctcacctatatcaccctcgaccccgctaatcctcacctatatcaccctaaaacccgccgatcctcacctatatcaccctcgaccccgccgatcctcacctatatcacccctcaaacccgccgatcctcacctatatcaccctcgaacccgccgaccctcacctatatcaccctccaacccgccgacccccacctatatcaccctccaacccgccgaccctcacctatatcaccctcgaccccgccgaccctcacctatatcaccctcgaccccgccgatcctcacctatatcaccctcgaccccgccgatcctcacctatatcaccctaaaacccgccgatcctcacctatatcaccctcgaacccgccgatcctcacctatatcaccctcgaccccgccgaccctcacctatatcaccctcgaccccgccaatcctcacctatatcaccctcgaccccgccgatcctcacctatatcaccctaaaacccgccgatcctcacctatatcaccctcgaacccgccgatcctcacctatatcaccctcgaccccgccgatcctcacctatatcaccctccaacccgccgaccctcacctatatcaccctcgaccccgccgatcctcacctatatcacccctcgaaactaaaaccattttaaatactcacctaaatacc

SEQ ID NO: 17601 - DNA, 552 bp, Artificial Sequence
  chemically treated genomic DNA (Homo sapiens) CpG-island No: 17601
ggtgggcgttttcggtggttgcgattgtagcggagttgtgagggtgaagatgaggtgggcggtttcggtggttcgggtagagttgtgagggtgaagacgaggtgggcggtttcggtggttgaggcggagttgtgagggtgaagacgaggtgggcggtttcggtgattgaggcggagttgtgagggtgaaaacgaggtgggcggtttcggtggttgaggttgagttgtgagggtgaagacgaggtgggcggtttcggtggttgaggcggagttgtgagggtgaagacgaggtgggcgttttcggtggttgtgattgaggcggagttgtgagggtgaagacgaggtgggcggtatcggtggttgaggttgagttgtgagggtgaagatgaggtgggcggtttcggtggttgaggttgagttgtgagggtgaagacgaggtgggcggtttcggtggtcgaggttgagttgtgagggtgaagatgaggtgggcggtttcggtggttcgggtagagttgtgagggtgaagacgaggtgggtggtttcggtggttgtg

SEQ ID NO: 17602 - DNA, 552 bp, Artificial Sequence
  chemically treated genomic DNA (Homo sapiens) CpG-island No: 17602
cacaaccaccgaaaccacccacctcgtcttcaccctcacaactctacccgaaccaccgaaaccgcccacctcatcttcaccctcacaactcaacctcgaccaccgaaaccgcccacctcgtcttcaccctcacaactcaacctcaaccaccgaaaccgcccacctcatcttcaccctcacaactcaacctcaaccaccgataccgcccacctcgtcttcaccctcacaactccgcctcaatcacaaccaccgaaaacgcccacctcgtcttcaccctcacaactccgcctcaaccaccgaaaccgcccacctcgtcttcaccctcacaactcaacctcaaccaccgaaaccgcccacctcgttttcaccctcacaactccgcctcaatcaccgaaaccgcccacctcgtcttcaccctcacaactccgcctcaaccaccgaaaccgcccacctcgtcttcaccctcacaactctacccgaaccaccgaaaccgcccacctcatcttcaccctcacaactccgctacaatcgcaaccaccgaaaacgcccacc

SEQ ID NO: 17603 - DNA, 552 bp, Artificial Sequence
  chemically treated genomic DNA (Homo sapiens) CpG-island No: 17603
tatagttatcgaggttatttatttcgtttttatttttatagttttgttcgagttatcggggtcgtttattttatttttatttttatagtttagtttcggttatcgaggtcgtttatttcgtttttatttttatagtttagttttagttatcgaggtcgtttattttatttttatttttatagtttagttttagttatcgatgtcgtttatttcgtttttatttttatagtttcgttttagttatagttatcgaggacgtttatttcgtttttatttttatagtttcgttttagttatcgaggtcgtttatttcgtttttatttttatagtttagttttagttatcgaggtcgtttatttcgtttttatttttatagtttcgttttagttatcgaggtcgtttatttcgtttttatttttatagtttcgttttagttatcgaggtcgtttatttcgtttttatttttatagttttgttcgagttatcgaggtcgtttattttatttttatttttatagtttcgttatagtcgtagttatcgaggacgtttatt

SEQ ID NO: 17604 - DNA, 552 bp, Artificial Sequence
  chemically treated genomic DNA (Homo sapiens) CpG-island No: 17604
aataaacgtcctcgataactacgactataacgaaactataaaaataaaaataaaataaacgacctcgataactcgaacaaaactataaaaataaaaacgaaataaacgacctcgataactaaaacgaaactataaaaataaaaacgaaataaacgacctcgataactaaaacgaaactataaaaataaaaacgaaataaacgacctcgataactaaaactaaactataaaaataaaaacgaaataaacgacctcgataactaaaacgaaactataaaaataaaaacgaaataaacgtcctcgataactataactaaaacgaaactataaaaataaaaacgaaataaacgacatcgataactaaaactaaactataaaaataaaaataaaataaacgacctcgataactaaaactaaactataaaaataaaaacgaaataaacgacctcgataaccgaaactaaactataaaaataaaaataaaataaacgaccccgataactcgaacaaaactataaaaataaaaacgaaataaataacctcgataactata

SEQ ID NO: 17605 - DNA, 991 bp, Artificial Sequence
  chemically treated genomic DNA (Homo sapiens) CpG-island No: 17605
tcgtcggtttttatttgtgttattttcgatttcgtcggtttttatttgtgttattttttaattcgtcggtttttatttgtgttattttcgatttcgtcggtttttatttgtgttattttcgatttcgtcggtttttatttgtgttattttcgatttcgtcggtttttatttgtgttattttcgatttcgtcggtttttatttgtgttattttttaattcgtcggtttttatttgtgttattttcgatttcgtcggtttttatttgtgttattttttaattcgtcggtttttatttgtgttattttcgaattcgtcggtttttatttgtgttattttcgatttcgtcggtttttatttgtgttattttttaattcgtcggtttttatttgtgttattttttaattcgtcggtttttatttgtgttattttttaattcgtcggtttttatttgtgttattttttaattcgtcggtttttatttgtgttattttttaattcgtcggtttttatttgtgttattttcgatttcgtcggtttttatttgtgttattttttaattcgtcggtttttatttgtgttattttcgatttcgtcggtttttatttgtgttatttttataattattcggtttttatatgtgttatttacgatttcgtcggtttttatttgtgttattttcgatttcgtcggtttttatttgtgttattttttaattcgtcggtttttatttgtgttattttcgatttcgtcggtttttatttgtgttattttttaattcgtcggtttttatttgtgttattttttaattcgtcggtttttatttgtgttattttttaattcgtcggtttttatatgtgttattttcgatttcgtcggtttttatttgtgttattttcgatttcgtcggtttttatttgtgttattttttaattcgtcggtttttatttgtgttatttttcggggttgaaattattttaagtgtttatttggg

SEQ ID NO: 17606 - DNA, 991 bp, Artificial Sequence
  chemically treated genomic DNA (Homo sapiens) CpG-island No: 17606
cccaaataaacacttaaaataatttcaaccccgaaaaataacacaaataaaaaccgacgaattaaaaaataacacaaataaaaaccgacgaaatcgaaaataacacaaataaaaaccgacgaaatcgaaaataacacatataaaaaccgacgaattaaaaaataacacaaataaaaaccgacgaattaaaaaataacacaaataaaaaccgacgaattaaaaaataacacaaataaaaaccgacgaaatcgaaaataacacaaataaaaaccgacgaattaaaaaataacacaaataaaaaccgacgaaatcgaaaataacacaaataaaaaccgacgaaatcgtaaataacacatataaaaaccgaataattataaaaataacacaaataaaaaccgacgaaatcgaaaataacacaaataaaaaccgacgaattaaaaaataacacaaataaaaaccgacgaaatcgaaaataacacaaataaaaaccgacgaattaaaaaataacacaaataaaaaccgacgaattaaaaaataacacaaataaaaaccgacgaattaaaaaataacacaaataaaaaccgacgaattaaaaaataacacaaataaaaaccgacgaattaaaaaataacacaaataaaaaccgacgaaatcgaaaataacacaaataaaaaccgacgaattcgaaaataacacaaataaaaaccgacgaattaaaaaataacacaaataaaaaccgacgaaatcgaaaataacacaaataaaaaccgacgaattaaaaaataacacaaataaaaaccgacgaaatcgaaaataacacaaataaaaaccgacgaaatcgaaaataacacaaataaaaaccgacgaaatcgaaaataacacaaataaaaaccgacgaaatcgaaaataacacaaataaaaaccgacgaattaaaaaataacacaaataaaaaccgacgaaatcgaaaataacacaaataaaaaccgacga

SEQ ID NO: 17607 - DNA, 991 bp, Artificial Sequence
  chemically treated genomic DNA (Homo sapiens) CpG-island No: 17607
tttaggtgagtatttaaaatggttttagtttcgaggggtgatataggtgaggatcggcgggttggagggtgatataggtgaggatcggcggggtcgagggtgatataggtgaggatcggcggggtcgagggtgatatatgtgagggtcggcgggttggagggtgatataggtgagggtcggcgggttggagggtgatataggtgagggtcggcgggttggagggtgatataggtgagggtcggcggggtcgagggtgatataggtgagggtcggcgggttggagggtgatataggtgaggatcggcggggtcgagggtgatataggtgaggatcggcggggtcgtgggtgatatatgtgagggtcggatggttgtgagggtgatataggtgaggatcggcggggtcgagggtgatataggtgaggatcggcgggttggagggtgatataggtgaggatcggcggggtcgagggtgatataggtgagggtcggcgggttggagggtgatataggtgggggtcggcgggttggagggtgatataggtgagggtcggcgggttggagggtgatataggtgagggtcggcgggttggagggtgatataggtgaggatcggcgggttggagggtgatataggtgaggatcggcggggtcgagggtgatataggtgagggtcggcgggttcgagggtgatataggtgagggtcggcgggttggagggtgatataggtgaggatcggcggggtcgagggtgatataggtgagggtcggcgggttggagggtgatataggtgaggatcggcggggtcgagggtgatataggtgaggatcggcggggtcgagggtgatataggtgagggtcggcggggtcgagggtgatataggtgagggtcggcggggtcgagggtgatataggtgagggtcggcgggttggagggtgatataggtgaggatcggcggggtcgagggtgatataggtgagggtcggcgg

SEQ ID NO: 17608 - DNA, 991 bp, Artificial Sequence
  chemically treated genomic DNA (Homo sapiens) CpG-island No: 17608
ccgccgaccctcacctatatcaccctcgaccccgccgatcctcacctatatcaccctccaacccgccgaccctcacctatatcaccctcgaccccgccgaccctcacctatatcaccctcgaccccgccgaccctcacctatatcaccctcgaccccgccgatcctcacctatatcaccctcgaccccgccgatcctcacctatatcaccctccaacccgccgaccctcacctatatcaccctcgaccccgccgatcctcacctatatcaccctccaacccgccgaccctcacctatatcaccctcgaacccgccgaccctcacctatatcaccctcgaccccgccgatcctcacctatatcaccctccaacccgccgatcctcacctatatcaccctccaacccgccgaccctcacctatatcaccctccaacccgccgaccctcacctatatcaccctccaacccgccgacccccacctatatcaccctccaacccgccgaccctcacctatatcaccctcgaccccgccgatcctcacctatatcaccctccaacccgccgatcctcacctatatcaccctcgaccccgccgatcctcacctatatcaccctcacaaccatccgaccctcacatatatcacccacgaccccgccgatcctcacctatatcaccctcgaccccgccgatcctcacctatatcaccctccaacccgccgaccctcacctatatcaccctcgaccccgccgaccctcacctatatcaccctccaacccgccgaccctcacctatatcaccctccaacccgccgaccctcacctatatcaccctccaacccgccgaccctcacatatatcaccctcgaccccgccgatcctcacctatatcaccctcgaccccgccgatcctcacctatatcaccctccaacccgccgatcctcacctatatcacccctcgaaactaaaaccattttaaatactcacctaaa

SEQ ID NO: 17609 - DNA, 994 bp, Artificial Sequence
  chemically treated genomic DNA (Homo sapiens) CpG-island No: 17609
gttcgcgtttcggggtgatcgtttatttgtagtttcggggcgtttatttttggagtacgcggggttataaagggcggttttggcgttttagcggtatcgtacgggcggtttttttttgtttcgcgtcgcgtttgggagaagagggcgcgggtttatttaacgcgagggagaaaggaaaggacggtgtcgaggttggcggtttaacgtttcgcggaaatcgagggcggatggtgaattgataagttttagtattagttgggagttaggcgaggtttgtttacgttcgggcggaaggcgattttataggcgtcgcggtttcgttttcgcgtttcgttttttttagattttcgtagttttagtacgtagtcgggatatattttttttttcgttttttgtttttttttttcgggcgcgtcgggttgggttgggtttcggtagcgttcggcgggcgtttattggagtcgtcgtttgttgtttaagtattcgtaggggcgcggtcgggaggggtatttgggttcgggttgtgggtcggttttgtaatttttttcgaatttagggtttcggtttgtgtagcgggcgcgtgtgttttgttcggaagaggcgtttgtgtgtttgtgcgtgtttatgtgcgcgttcgtgcgtgtgtatgtggatttttttgtgttttcgtatgggcggaggttttttatatttgttttagagttttttttaagagtttcgttgcgttacgttttgagcgattttttttattttttgtaggttttattagttcggttttttagtcggattcggttgtttgtttagtagtcgttttcgttttcgttcgataggtttttttcgatttttagtttttcgtgtcgttaaagttttcgttgaaattttcgttttcgtttaatttcgtttatattgtttatcgtcgtttagcgtttatttttttttttatttttttagttttaagtatatttattggattttgtttattgggttttttttt

SEQ ID NO: 17610 - DNA, 994 bp, Artificial Sequence
  chemically treated genomic DNA (Homo sapiens) CpG-island No: 17610
aaaaaaaaacccaataaacaaaatccaataaatatacttaaaactaaaaaaataaaaaaaaaaataaacgctaaacgacgataaacaatataaacgaaattaaacgaaaacgaaaatttcaacgaaaactttaacgacacgaaaaactaaaaatcgaaaaaaacctatcgaacgaaaacgaaaacgactactaaacaaacaaccgaatccgactaaaaaaccgaactaataaaacctacaaaaaataaaaaaaatcgctcaaaacgtaacgcaacgaaactcttaaaaaaaactctaaaacaaatataaaaaacctccgcccatacgaaaacacaaaaaaatccacatacacacgcacgaacgcgcacataaacacgcacaaacacacaaacgcctcttccgaacaaaacacacgcgcccgctacacaaaccgaaaccctaaattcgaaaaaaattacaaaaccgacccacaacccgaacccaaatacccctcccgaccgcgcccctacgaatacttaaacaacaaacgacgactccaataaacgcccgccgaacgctaccgaaacccaacccaacccgacgcgcccgaaaaaaaaaaacaaaaaacgaaaaaaaaaatatatcccgactacgtactaaaactacgaaaatctaaaaaaaacgaaacgcgaaaacgaaaccgcgacgcctataaaatcgccttccgcccgaacgtaaacaaacctcgcctaactcccaactaatactaaaacttatcaattcaccatccgccctcgatttccgcgaaacgttaaaccgccaacctcgacaccgtcctttcctttctccctcgcgttaaataaacccgcgccctcttctcccaaacgcgacgcgaaacaaaaaaaaaccgcccgtacgataccgctaaaacgccaaaaccgccctttataaccccgcgtactccaaaaataaacgccccgaaactacaaataaacgatcaccccgaaacgcgaac

SEQ ID NO: 17611 - DNA, 994 bp, Artificial Sequence
  chemically treated genomic DNA (Homo sapiens) CpG-island No: 17611
aaaaaagagtttagtgggtaaggtttagtgagtgtgtttaaaattgggaaaatgaggggaagggtaagcgttgggcggcggtgggtaatatggacgagattaaacgggagcgaggattttagcgagagttttggcgatacggaaggttgagaatcggagggagtttgtcgggcgaaagcgaaggcggttgttgggtaggtagtcgaattcggttggagagtcgagttggtgagatttataggaagtgaagggagtcgtttagggcgtggcgtaacgagatttttagaagaaattttgaggtagatatggggggttttcgtttatacggagatataaggaagtttatatgtatacgtacgagcgcgtatatgaatacgtataagtatataaacgtttttttcgggtagggtatacgcgttcgttgtataggtcgaggttttggattcggaggggattgtagagtcgatttataattcgggtttagatgtttttttcggtcgcgtttttacgaatgtttgggtaataggcggcggttttagtgggcgttcgtcgggcgttgtcggagtttagtttagttcggcgcgttcgggaggagggagtagggagcggggaaaggggtgtgtttcggttgcgtgttgggattgcgagggtttgggaggggcgaggcgcgggggcggggtcgcggcgtttataaagtcgtttttcgttcggacgtaaataaatttcgtttggtttttagttggtgttgaagtttgttagtttattattcgttttcggttttcgcggggcgttgggtcgttagtttcggtatcgtttttttttttttttttcgcgttaggtaagttcgcgttttttttttttaggcgcgacgcggagtagaaaggggtcgttcgtgcggtgtcgttggagcgttaggatcgttttttgtagtttcgcgtattttaggagtaagcgtttcggagttgtaagtgggcggttatttcggggcgcgggt

SEQ ID NO: 17612 - DNA, 994 bp, Artificial Sequence
  chemically treated genomic DNA (Homo sapiens) CpG-island No: 17612
acccgcgccccgaaataaccgcccacttacaactccgaaacgcttactcctaaaatacgcgaaactacaaaaaacgatcctaacgctccaacgacaccgcacgaacgacccctttctactccgcgtcgcgcctaaaaaaaaaaaacgcgaacttacctaacgcgaaaaaaaaaaaaaaaaacgataccgaaactaacgacccaacgccccgcgaaaaccgaaaacgaataataaactaacaaacttcaacaccaactaaaaaccaaacgaaatttatttacgtccgaacgaaaaacgactttataaacgccgcgaccccgcccccgcgcctcgcccctcccaaaccctcgcaatcccaacacgcaaccgaaacacacccctttccccgctccctactccctcctcccgaacgcgccgaactaaactaaactccgacaacgcccgacgaacgcccactaaaaccgccgcctattacccaaacattcgtaaaaacgcgaccgaaaaaaacatctaaacccgaattataaatcgactctacaatcccctccgaatccaaaacctcgacctatacaacgaacgcgtataccctacccgaaaaaaacgtttatatacttatacgtattcatatacgcgctcgtacgtatacatataaacttccttatatctccgtataaacgaaaaccccccatatctacctcaaaatttcttctaaaaatctcgttacgccacgccctaaacgactcccttcacttcctataaatctcaccaactcgactctccaaccgaattcgactacctacccaacaaccgccttcgctttcgcccgacaaactccctccgattctcaaccttccgtatcgccaaaactctcgctaaaatcctcgctcccgtttaatctcgtccatattacccaccgccgcccaacgcttacccttcccctcattttcccaattttaaacacactcactaaaccttacccactaaactctttttt

SEQ ID NO: 17613 - DNA, 725 bp, Artificial Sequence
  chemically treated genomic DNA (Homo sapiens) CpG-island No: 17613
cgtagcggggatttagttcgtaggaagtttcgtacgtgtcggatttcgggtacgtatttgtagggtcgttttttttacgtcgcgttcgagagcggttggggtttgtattgtaaggagagcgcgggacgcgcgggttacggcggcggtgatcgtttcgttttttcggtcgcgtttttagttttttcgaatcgatattttagtaagagaagtcggggttttagcgtttagagtagttggattgtattcgttacggttttcgtttcgtcgcgcgtcggaaacgttagtttttatttttggttcgttttttcggtattttcggcgacgttttgggtagcgggaggatagcgcgttcggcggcgggagagcgggacggtttagtcgcggcgtttttagtttatcggttgttcgtaggcgtcggtcgagttttttttgtcgggtaggaagttttgtttcgtggggggtaaggtcgagtcgttggcgcgtcgggattcggttcgagttaattgaggatcgggtattcgtaggacgtgttaggaggtgtcgaaggttcgttgtggggcggttacgcgcgttttcgttcgtttttcgcggcgtttcgcgtttgtttcgggtttcgttcggtttacgggattttttaggttttcggggttgtggtagtacgcgggtttcgagcgtgggtttttttggggtcgagagtttggagcgttttaggcgttgtttttcgt

SEQ ID NO: 17614 - DNA, 725 bp, Artificial Sequence
  chemically treated genomic DNA (Homo sapiens) CpG-island No: 17614
acgaaaaacaacgcctaaaacgctccaaactctcgaccccaaaaaaacccacgctcgaaacccgcgtactaccacaaccccgaaaacctaaaaaatcccgtaaaccgaacgaaacccgaaacaaacgcgaaacgccgcgaaaaacgaacgaaaacgcgcgtaaccgccccacaacgaaccttcgacacctcctaacacgtcctacgaatacccgatcctcaattaactcgaaccgaatcccgacgcgccaacgactcgaccttaccccccacgaaacaaaacttcctacccgacaaaaaaaactcgaccgacgcctacgaacaaccgataaactaaaaacgccgcgactaaaccgtcccgctctcccgccgccgaacgcgctatcctcccgctacccaaaacgtcgccgaaaataccgaaaaaacgaaccaaaaataaaaactaacgtttccgacgcgcgacgaaacgaaaaccgtaacgaatacaatccaactactctaaacgctaaaaccccgacttctcttactaaaatatcgattcgaaaaaactaaaaacgcgaccgaaaaaacgaaacgatcaccgccgccgtaacccgcgcgtcccgcgctctccttacaatacaaaccccaaccgctctcgaacgcgacgtaaaaaaaacgaccctacaaatacgtacccgaaatccgacacgtacgaaacttcctacgaactaaatccccgctacg

SEQ ID NO: 17615 - DNA, 725 bp, Artificial Sequence
  chemically treated genomic DNA (Homo sapiens) CpG-island No: 17615
gcggggggtagcgtttggggcgttttaagttttcggttttaaggaagtttacgttcgggattcgcgtgttgttatagtttcgggggtttggagggtttcgtgagtcgagcgggattcgggataagcgcgggacgtcgcggggaacggacgggaacgcgcgtggtcgttttatagcgggttttcgatattttttgatacgttttgcgggtgttcggtttttagttggttcgagtcggatttcggcgcgttaacggttcgattttgttttttacgaggtagggttttttgttcggtaggaaggattcggtcggcgtttgcgggtaatcgatgagttgaaggcgtcgcggttgggtcgtttcgttttttcgtcgtcgagcgcgttgttttttcgttgtttagagcgtcgtcggaagtgtcgagggggcgggttaggggtggagattggcgttttcggcgcgcgacggggcggggatcgtagcgggtgtagtttagttgttttggacgttgaggtttcggttttttttgttggggtgtcgattcgggagggttgagggcgcggtcgagagaacggggcggttatcgtcgtcgtggttcgcgcgtttcgcgttttttttgtagtgtaggttttagtcgttttcgggcgcggcgtgggggaggcggttttgtaggtgcgtattcggggttcgatacgtgcggggttttttgcgagttgagttttcgttgcg

SEQ ID NO: 17616 - DNA, 725 bp, Artificial Sequence
  chemically treated genomic DNA (Homo sapiens) CpG-island No: 17616
cgcaacgaaaactcaactcgcaaaaaaccccgcacgtatcgaaccccgaatacgcacctacaaaaccgcctcccccacgccgcgcccgaaaacgactaaaacctacactacaaaaaaaacgcgaaacgcgcgaaccacgacgacgataaccgccccgttctctcgaccgcgccctcaaccctcccgaatcgacaccccaacaaaaaaaaccgaaacctcaacgtccaaaacaactaaactacacccgctacgatccccgccccgtcgcgcgccgaaaacgccaatctccacccctaacccgccccctcgacacttccgacgacgctctaaacaacgaaaaaacaacgcgctcgacgacgaaaaaacgaaacgacccaaccgcgacgccttcaactcatcgattacccgcaaacgccgaccgaatccttcctaccgaacaaaaaaccctacctcgtaaaaaacaaaatcgaaccgttaacgcgccgaaatccgactcgaaccaactaaaaaccgaacacccgcaaaacgtatcaaaaaatatcgaaaacccgctataaaacgaccacgcgcgttcccgtccgttccccgcgacgtcccgcgcttatcccgaatcccgctcgactcacgaaaccctccaaacccccgaaactataacaacacgcgaatcccgaacgtaaacttccttaaaaccgaaaacttaaaacgccccaaacgctaccccccgc

SEQ ID NO: 17617 - DNA, 569 bp, Artificial Sequence
  chemically treated genomic DNA (Homo sapiens) CpG-island No: 17617
tcgtcgtatttgtagggtttttcgtcgttgtggatgcgtaggtgttgcgtgaagtgcgagttgtggttgaaggcgcggtcgtattggtcgtattcgtagggtttttcgttcgtgtggatgcggtggtgttggatgaagttcgattagtcgcggaagcgtttgtcgtattcgtggtaggcgtagggtttttcgttcgtgtggatgcgttggtgttttaggagtagcgagttatatttgaaatttttgtcgtaggtttcgtatttgtgcggtttggtttttcgcgcgttgttttgtcggtttcgatcgaagttgatttttagttcggtagttcgttcgggcgtattttcgggttcggtcgttgtttgttgtacgagcgttacgcgttaggcgtttcgcggttgggcgtaagggacggttttaggcggttggttcgtcggtcgtttcgcgttggatttaggttcgaagtcggcgttgtatcgggttttgcggggaaggttttttaggaggttgcgtagcgtttcgttcgttttttcgttaggggtttgagagttaggagagcgtggagtttg

SEQ ID NO: 17618 - DNA, 569 bp, Artificial Sequence
  chemically treated genomic DNA (Homo sapiens) CpG-island No: 17618
caaactccacgctctcctaactctcaaacccctaacgaaaaaacgaacgaaacgctacgcaacctcctaaaaaaccttccccgcaaaacccgatacaacgccgacttcgaacctaaatccaacgcgaaacgaccgacgaaccaaccgcctaaaaccgtcccttacgcccaaccgcgaaacgcctaacgcgtaacgctcgtacaacaaacaacgaccgaacccgaaaatacgcccgaacgaactaccgaactaaaaatcaacttcgatcgaaaccgacaaaacaacgcgcgaaaaaccaaaccgcacaaatacgaaacctacgacaaaaatttcaaatataactcgctactcctaaaacaccaacgcatccacacgaacgaaaaaccctacgcctaccacgaatacgacaaacgcttccgcgactaatcgaacttcatccaacaccaccgcatccacacgaacgaaaaaccctacgaatacgaccaatacgaccgcgccttcaaccacaactcgcacttcacgcaacacctacgcatccacaacgacgaaaaaccctacaaatacgacga

SEQ ID NO: 17619 - DNA, 569 bp, Artificial Sequence
  chemically treated genomic DNA (Homo sapiens) CpG-island No: 17619
taggttttacgtttttttggtttttaggtttttgacgagggggcgggcggggcgttgcgtaattttttgaggagtttttttcgtagggttcggtgtagcgtcggtttcgggtttgaatttagcgcggagcggtcggcgggttagtcgtttggggtcgttttttgcgtttagtcgcggggcgtttggcgcgtgacgttcgtgtagtaagtagcggtcgggttcgagggtgcgttcgagcgggttgtcgagttgggagttaatttcggtcggagtcggtagggtagcgcgcggggggttaagtcgtataggtgcgaggtttgcggtaagagttttaagtataattcgttgtttttgaagtattagcgtatttatacgggcgagaagttttacgtttgttacgagtgcggtaagcgttttcgcggttggtcgggttttatttagtattatcgtatttatacgggcgagaagttttacgagtgcggttagtgcggtcgcgtttttagttatagttcgtattttacgtagtatttgcgtatttataacggcgagaagttttataagtgcggcga

SEQ ID NO: 17620 - DNA, 569 bp, Artificial Sequence
  chemically treated genomic DNA (Homo sapiens) CpG-island No: 17620
tcgccgcacttataaaacttctcgccgttataaatacgcaaatactacgtaaaatacgaactataactaaaaacgcgaccgcactaaccgcactcgtaaaacttctcgcccgtataaatacgataatactaaataaaacccgaccaaccgcgaaaacgcttaccgcactcgtaacaaacgtaaaacttctcgcccgtataaatacgctaatacttcaaaaacaacgaattatacttaaaactcttaccgcaaacctcgcacctatacgacttaaccccccgcgcgctaccctaccgactccgaccgaaattaactcccaactcgacaacccgctcgaacgcaccctcgaacccgaccgctacttactacacgaacgtcacgcgccaaacgccccgcgactaaacgcaaaaaacgaccccaaacgactaacccgccgaccgctccgcgctaaattcaaacccgaaaccgacgctacaccgaaccctacgaaaaaaactcctcaaaaaattacgcaacgccccgcccgccccctcgtcaaaaacctaaaaaccaaaaaaacgtaaaaccta

SEQ ID NO: 17621 - DNA, 834 bp, Artificial Sequence
  chemically treated genomic DNA (Homo sapiens) CpG-island No: 17621
ttcgttgttgtttcgcgatttttaggagtttatttcgtttttcgggtttggtttaaggttaaggttacggcgagcggcggttgtaagggtcgtacggttcggttgggtagggttgtatcgcggagtacggcgtacgagttcggattgggttggttttaggtattcggagtcgtcgtcgtcgttcgcgtttatttatttttcgagcgggaggaggacgtcgcgcgtcggacggaagtgttcggtttcgttttatttcgttcggttggcgcgtattttcgggacgatttgggtttcgggaggatcgtacgtttcggtggtcgtgtgggggcggggtcgggagcgaagaggaggttttttttcgttttttttttcgtgggttgcgttcgcgcgtggttttcgcgtatacgatggttcggatttcgttcgcgtttgtaaagcgttcgggcgcggggagcggcgttgcgtggggcgtagaagtcggcgtttcggagttttttttttgacgtcggttttgtatcgttcggggagttagcgcggggtcgggtttcgggagatgacggcgtcgtttttacgttgttcgcggttttttcgtgtattttaggttttcgggggttttcggttggagttgtttttacgtttagttcgcgagtttttttcgtcgtttttttgggtttttttttcgggatgtgttcgtagcgatggttatcggcggtcgggaatcgttgcgagacgcgcgatttttcgtttttttcgcgggggttttagcgttttcgattttgtttgttttttaggggcgttttcgggagtttgaggaggatgttataggttttttaa

SEQ ID NO: 17622 - DNA, 834 bp, Artificial Sequence
  chemically treated genomic DNA (Homo sapiens) CpG-island No: 17622
ttaaaaaacctataacatcctcctcaaactcccgaaaacgcccctaaaaaacaaacaaaatcgaaaacgctaaaacccccgcgaaaaaaacgaaaaatcgcgcgtctcgcaacgattcccgaccgccgataaccatcgctacgaacacatcccgaaaaaaaaacccaaaaaaacgacgaaaaaaactcgcgaactaaacgtaaaaacaactccaaccgaaaacccccgaaaacctaaaatacacgaaaaaaccgcgaacaacgtaaaaacgacgccgtcatctcccgaaacccgaccccgcgctaactccccgaacgatacaaaaccgacgtcaaaaaaaaaactccgaaacgccgacttctacgccccacgcaacgccgctccccgcgcccgaacgctttacaaacgcgaacgaaatccgaaccatcgtatacgcgaaaaccacgcgcgaacgcaacccacgaaaaaaaaaacgaaaaaaaacctcctcttcgctcccgaccccgcccccacacgaccaccgaaacgtacgatcctcccgaaacccaaatcgtcccgaaaatacgcgccaaccgaacgaaataaaacgaaaccgaacacttccgtccgacgcgcgacgtcctcctcccgctcgaaaaataaataaacgcgaacgacgacgacgactccgaatacctaaaaccaacccaatccgaactcgtacgccgtactccgcgatacaaccctacccaaccgaaccgtacgacccttacaaccgccgctcgccgtaaccttaaccttaaaccaaacccgaaaaacgaaataaactcctaaaaatcgcgaaacaacaacgaa

SEQ ID NO: 17623 - DNA, 834 bp, Artificial Sequence
  chemically treated genomic DNA (Homo sapiens) CpG-island No: 17623
ttggggaatttgtaatattttttttaggttttcggggacgtttttggaaagtaggtagaatcgagggcgttggggttttcgcgaggggagcgggaggtcgcgcgtttcgtagcggttttcggtcgtcggtgattatcgttgcggatatatttcgaggagggaatttaagagggcggcgggggggattcgcgagttgaacgtggaagtaattttagtcgaggattttcggaggtttggagtgtacggaggggtcgcgggtagcgtggggacggcgtcgttatttttcgaagttcggtttcgcgttggtttttcgggcggtgtagggtcggcgttaggaaggaggtttcgaggcgtcggtttttgcgttttacgtagcgtcgtttttcgcgttcgggcgttttgtaggcgcgggcgggattcgggttatcgtgtacgcgaaagttacgcgcgggcgtagtttacgaggggaggggcggggaaaggtttttttttcgttttcggtttcgtttttatacggttatcgaggcgtgcggttttttcggggtttaaatcgtttcggaagtgcgcgttagtcgggcggagtggggcggggtcggatattttcgttcggcgcgcggcgtttttttttcgttcggaaggtgagtgggcgcgggcggcggcggcggtttcgggtgtttgggattagtttagttcgagttcgtgcgtcgtatttcgcggtgtagttttgtttagtcgggtcgtgcggtttttgtagtcgtcgttcgtcgtgattttggttttgggttaagttcggggagcggggtgggtttttgggggtcgcggagtagtagcgga

SEQ ID NO: 17624 - DNA, 834 bp, Artificial Sequence
  chemically treated genomic DNA (Homo sapiens) CpG-island No: 17624
tccgctactactccgcgacccccaaaaacccaccccgctccccgaacttaacccaaaaccaaaatcacgacgaacgacgactacaaaaaccgcacgacccgactaaacaaaactacaccgcgaaatacgacgcacgaactcgaactaaactaatcccaaacacccgaaaccgccgccgccgcccgcgcccactcaccttccgaacgaaaaaaaaacgccgcgcgccgaacgaaaatatccgaccccgccccactccgcccgactaacgcgcacttccgaaacgatttaaaccccgaaaaaaccgcacgcctcgataaccgtataaaaacgaaaccgaaaacgaaaaaaaaacctttccccgcccctcccctcgtaaactacgcccgcgcgtaactttcgcgtacacgataacccgaatcccgcccgcgcctacaaaacgcccgaacgcgaaaaacgacgctacgtaaaacgcaaaaaccgacgcctcgaaacctccttcctaacgccgaccctacaccgcccgaaaaaccaacgcgaaaccgaacttcgaaaaataacgacgccgtccccacgctacccgcgacccctccgtacactccaaacctccgaaaatcctcgactaaaattacttccacgttcaactcgcgaatcccccccgccgccctcttaaattccctcctcgaaatatatccgcaacgataatcaccgacgaccgaaaaccgctacgaaacgcgcgacctcccgctcccctcgcgaaaaccccaacgccctcgattctacctactttccaaaaacgtccccgaaaacctaaaaaaaatattacaaattccccaa

SEQ ID NO: 17625 - DNA, 1082 bp, Artificial Sequence
  chemically treated genomic DNA (Homo sapiens) CpG-island No: 17625
ggggcgagttttgattttattaattttagtacgcggggcgagttttgattttattaattttagtacgcggggtgagttttgattttattaatattagtacgtagggcgagttttgattttattaatattagtacgcggggcgagtcgtgattttattaatattagtacgcggggcgagttttgattttattaattttagtacgcggggcgagttttgattttattaatattagtacgcggggcgagttttgattttattaatattagtacgcggggcgagtcgtgattttattaatattagtacgcggggcgagttttgattttattaatattagtacgcggggtgagttttgattttaagaatattagtacgcggggtgagttttgattttattaatattagtacgcggggcgagttttgattttattaattttagtacgcggggagagttttgattttattaatattagtacgcggggcgagtcgtgattttattaatattagtacgcggggcgagttttgattttattaatattagtacgcggggcgagttttgattttaagaatattagtacgcggggcgagttttgattttattaatattagtacgcggggcgagttttgattttattaattttagtacgcggggagagttttgattttattaatattagtacgcggggtgagtcgtgattttattaatattagtacgcggggcgagttttgattttattaattttagtacgtggggcgagttttgattttattaatattagtacgcggggtgagttttgattttattaatattagacgcggggcgagttttgattttaagaatattagtacgcggggcgagttttgattttattaattttagtacgtggggcgagttttgattttattaatattagtacgcggggtgagttttgattttattaatattagacgcggggtgagttttgattttaagaatattagtacgcggggcgagttttgattttattaatattagatacggggcgagttgatacggttatatagttcgtaggatttagtagtgtgtttacgacgttacgtatta

SEQ ID NO: 17626 - DNA, 1082 bp, Artificial Sequence
  chemically treated genomic DNA (Homo sapiens) CpG-island No: 17626
taatacgtaacgtcgtaaacacactactaaatcctacgaactatataaccgtatcaactcgccccgtatctaatattaataaaatcaaaactcgccccgcgtactaatattcttaaaatcaaaactcaccccgcgtctaatattaataaaatcaaaactcaccccgcgtactaatattaataaaatcaaaactcgccccacgtactaaaattaataaaatcaaaactcgccccgcgtactaatattcttaaaatcaaaactcgccccgcgtctaatattaataaaatcaaaactcaccccgcgtactaatattaataaaatcaaaactcgccccacgtactaaaattaataaaatcaaaactcgccccgcgtactaatattaataaaatcacgactcaccccgcgtactaatattaataaaatcaaaactctccccgcgtactaaaattaataaaatcaaaactcgccccgcgtactaatattaataaaatcaaaactcgccccgcgtactaatattcttaaaatcaaaactcgccccgcgtactaatattaataaaatcaaaactcgccccgcgtactaatattaataaaatcacgactcgccccgcgtactaatattaataaaatcaaaactctccccgcgtactaaaattaataaaatcaaaactcgccccgcgtactaatattaataaaatcaaaactcaccccgcgtactaatattcttaaaatcaaaactcaccccgcgtactaatattaataaaatcaaaactcgccccgcgtactaatattaataaaatcacgactcgccccgcgtactaatattaataaaatcaaaactcgccccgcgtactaatattaataaaatcaaaactcgccccgcgtactaaaattaataaaatcaaaactcgccccgcgtactaatattaataaaatcacgactcgccccgcgtactaatattaataaaatcaaaactcgccctacgtactaatattaataaaatcaaaactcaccccgcgtactaaaattaataaaatcaaaactcgccccgcgtactaaaattaataaaatcaaaactcgcccc

SEQ ID NO: 17627 - DNA, 1082 bp, Artificial Sequence
  chemically treated genomic DNA (Homo sapiens) CpG-island No: 17627
taatacgtgacgtcgtaagtatattgttggattttacgaattgtgtgatcgtgttagttcgtttcgtgtttggtgttagtgagattagagttcgtttcgcgtgttggtgtttttgagattagggtttatttcgcgtttagtgttagtgagattagagtttatttcgcgtgttggtgttagtgagattagggttcgttttacgtgttggagttagtgagattagggttcgtttcgcgtgttggtgtttttgagattagggttcgtttcgcgtttagtgttagtgagattagagtttatttcgcgtgttggtgttagtgagattagggttcgttttacgtgttggagttagtgagattagggttcgtttcgcgtgttggtgttagtgagattacggtttatttcgcgtgttggtgttagtgagattagggtttttttcgcgtgttagagttagtgagattagggttcgtttcgcgtgttggtgttagtgagattagggttcgtttcgcgtgttggtgtttttgagattagggttcgtttcgcgtgttggtgttagtgagattagggttcgtttcgcgtgttggtgttagtgagattacggttcgtttcgcgtgttggtgttagtgagattagggtttttttcgcgtgttagagttagtgagattagggttcgtttcgcgtgttggtgttagtgagattagggtttatttcgcgtgttggtgtttttgagattagggtttatttcgcgtgttggtgttagtgagattagggttcgtttcgcgtgttggtgttagtgagattacggttcgtttcgcgtgttggtgttagtgagattagggttcgtttcgcgtgttggtgttagtgagattagggttcgtttcgcgtgttggagttagtgagattagggttcgtttcgcgtgttggtgttagtgagattacggttcgtttcgcgtgttggtgttagtgagattagggttcgttttgcgtgttggtgttagtgagattagggtttatttcgcgtgttggagttagtgagattagggttcgtttcgcgtgttggagttagtgagattagggttcgtttt

SEQ ID NO: 17628 - DNA, 1082 bp, Artificial Sequence
  chemically treated genomic DNA (Homo sapiens) CpG-island No: 17628
aaaacgaaccctaatctcactaactccaacacgcgaaacgaaccctaatctcactaactccaacacgcgaaataaaccctaatctcactaacaccaacacgcaaaacgaaccctaatctcactaacaccaacacgcgaaacgaaccgtaatctcactaacaccaacacgcgaaacgaaccctaatctcactaactccaacacgcgaaacgaaccctaatctcactaacaccaacacgcgaaacgaaccctaatctcactaacaccaacacgcgaaacgaaccgtaatctcactaacaccaacacgcgaaacgaaccctaatctcactaacaccaacacgcgaaataaaccctaatctcaaaaacaccaacacgcgaaataaaccctaatctcactaacaccaacacgcgaaacgaaccctaatctcactaactctaacacgcgaaaaaaaccctaatctcactaacaccaacacgcgaaacgaaccgtaatctcactaacaccaacacgcgaaacgaaccctaatctcactaacaccaacacgcgaaacgaaccctaatctcaaaaacaccaacacgcgaaacgaaccctaatctcactaacaccaacacgcgaaacgaaccctaatctcactaactctaacacgcgaaaaaaaccctaatctcactaacaccaacacgcgaaataaaccgtaatctcactaacaccaacacgcgaaacgaaccctaatctcactaactccaacacgtaaaacgaaccctaatctcactaacaccaacacgcgaaataaactctaatctcactaacactaaacgcgaaacgaaccctaatctcaaaaacaccaacacgcgaaacgaaccctaatctcactaactccaacacgtaaaacgaaccctaatctcactaacaccaacacgcgaaataaactctaatctcactaacactaaacgcgaaataaaccctaatctcaaaaacaccaacacgcgaaacgaactctaatctcactaacaccaaacacgaaacgaactaacacgatcacacaattcgtaaaatccaacaatatacttacgacgtcacgtatta

SEQ ID NO: 17629 - DNA, 1237 bp, Artificial Sequence
  chemically treated genomic DNA (Homo sapiens) CpG-island No: 17629
gtaggtttcggcgtaaaaggcgggggtagttggaaggggcggtttttttcgtgcggcgtttgtggtcgtagttttaagtgtttttcggacgcggtaaagtatcggagtatttattcgggggagaaatcgtacgagtgtagcgattgcgggaaggtttttatttattgttcgtacgtggttcggtattagcgggcgtatagcggggagaggttttacgcgtgcgtcgagtgcggtaaggttttcggttagagttttaatttttttcggtattagcgcgtgtatacgggcgagaagttttacgcgtgcgtcgattgcggtaaggttttcggttagaggtcggacgtcgttaagtatcgtcgtatttatatcggggagaggttgtacgcgtgcggcgagtgcgggaagcgttttttgtatagttcgaacgtggttcggtatcggcggatttattacggggagaattcgtacgagtgtcgggagtgcggttaggtttttagttagagttttaattttttttagtattagcgcgtgtatacgggggagcggtttttcgtttgttaggattgcggtcgcgtttttagtcgtagttttttttttcgcgagtatcgtcgtatttatatcggggagaagttttattagtgcggttattgcgggcgcgcgtttcgggcgttgtcgggtttttttcggtattagcgattttatacgggcgagaagtcgtttcgttgtatcgagtgcggtcgcgtttttcgtttgagtttttattttatttagtatcggcgggtgtatggcgtcgagtgagtcggggttgcggcggaagagatgtcggcggtttggtgggcgcgaggtcgaggtcgggggaggtttttgttcgtttcgtgcgcggtgaggaagtaatagtcggttgcgcgtttggttttcgggttgcgaaagtttcgttaggtttgtattcgttttggtttgggagtaattaggagagatagggttcggggaaggcgagcgttgttcgcgggaggcgatttttagaggcggggaggtttttggggtttgtttcgggtcggtcgttcgtttttgaaatttttcgttttttacggttagttgttgcggggtagtggtcggtgattgaatcggttattttttcgtaattaggtttttattaaaattttgtatgagatgacggtttcgggtttcgggttggtgaaggcggggtgggggggtagttacgaagggggcgtttaga

SEQ ID NO: 17630 - DNA, 1237 bp, Artificial Sequence
  chemically treated genomic DNA (Homo sapiens) CpG-island No: 17630
tctaaacgcccccttcgtaactacccccccaccccgccttcaccaacccgaaacccgaaaccgtcatctcatacaaaattttaataaaaacctaattacgaaaaaataaccgattcaatcaccgaccactaccccgcaacaactaaccgtaaaaaacgaaaaatttcaaaaacgaacgaccgacccgaaacaaaccccaaaaacctccccgcctctaaaaatcgcctcccgcgaacaacgctcgccttccccgaaccctatctctcctaattactcccaaaccaaaacgaatacaaacctaacgaaactttcgcaacccgaaaaccaaacgcgcaaccgactattacttcctcaccgcgcacgaaacgaacaaaaacctcccccgacctcgacctcgcgcccaccaaaccgccgacatctcttccgccgcaaccccgactcactcgacgccatacacccgccgatactaaataaaataaaaactcaaacgaaaaacgcgaccgcactcgatacaacgaaacgacttctcgcccgtataaaatcgctaataccgaaaaaaacccgacaacgcccgaaacgcgcgcccgcaataaccgcactaataaaacttctccccgatataaatacgacgatactcgcgaaaaaaaaaactacgactaaaaacgcgaccgcaatcctaacaaacgaaaaaccgctcccccgtatacacgcgctaatactaaaaaaaattaaaactctaactaaaaacctaaccgcactcccgacactcgtacgaattctccccgtaataaatccgccgataccgaaccacgttcgaactatacaaaaaacgcttcccgcactcgccgcacgcgtacaacctctccccgatataaatacgacgatacttaacgacgtccgacctctaaccgaaaaccttaccgcaatcgacgcacgcgtaaaacttctcgcccgtatacacgcgctaataccgaaaaaaattaaaactctaaccgaaaaccttaccgcactcgacgcacgcgtaaaacctctccccgctatacgcccgctaataccgaaccacgtacgaacaataaataaaaaccttcccgcaatcgctacactcgtacgatttctcccccgaataaatactccgatactttaccgcgtccgaaaaacacttaaaactacgaccacaaacgccgcacgaaaaaaaccgccccttccaactacccccgccttttacgccgaaacctac

SEQ ID NO: 17631 - DNA, 1237 bp, Artificial Sequence
  chemically treated genomic DNA (Homo sapiens) CpG-island No: 17631
tttgggcgtttttttcgtaattgtttttttatttcgtttttattaattcgaagttcgaggtcgttattttatgtagggttttgatggaggtttggttgcggaggaatgatcgatttaattatcggttattgtttcgtagtagttgatcgtgggaggcggggagttttagaggcgggcggtcggttcgggatagattttagagattttttcgtttttgggaatcgtttttcgcgggtagcgttcgtttttttcgagttttgttttttttgattgtttttaagttaaggcggatgtaggtttggcgaggttttcgtaattcgagaattaggcgcgtagtcggttgttatttttttatcgcgtacggggcggataggagtttttttcggtttcggtttcgcgtttattaggtcgtcggtatttttttcgtcgtagtttcggtttattcggcgttatgtattcgtcggtgttggatgaggtggaagtttaggcggaaggcgcggtcgtattcggtgtagcggaacggtttttcgttcgtgtggagtcgttggtgtcggaagaagttcgatagcgttcggaacgcgcgttcgtagtggtcgtattggtggggttttttttcggtgtggatgcggcggtgttcgcggaggaaggagttgcggttgaaggcgcggtcgtagttttggtaggcgaagggtcgttttttcgtgtgtacgcgttggtgttggaggaggttggagttttggttgaaggtttggtcgtattttcggtattcgtacgggtttttttcgtggtgggttcgtcggtgtcggattacgttcgagttgtgtaggaagcgtttttcgtattcgtcgtacgcgtatagttttttttcggtgtgggtgcggcggtgtttggcggcgttcgatttttggtcgaaggttttgtcgtagtcggcgtacgcgtagggtttttcgttcgtgtgtacgcgttggtgtcggaggaggttgaagttttggtcgaaggttttgtcgtattcggcgtacgcgtagggttttttttcgttgtgcgttcgttggtgtcggattacgtgcgagtagtggatgaaggttttttcgtagtcgttgtattcgtacggtttttttttcgagtggatgtttcggtgttttgtcgcgttcgaggagtatttgaagttgcggttataggcgtcgtacgggaaaggtcgttttttttagttgttttcgttttttgcgtcggggtttgt

SEQ ID NO: 17632 - DNA, 1237 bp, Artificial Sequence
  chemically treated genomic DNA (Homo sapiens) CpG-island No: 17632
acaaaccccgacgcaaaaaacgaaaacaactaaaaaaaacgacctttcccgtacgacgcctataaccgcaacttcaaatactcctcgaacgcgacaaaacaccgaaacatccactcgaaaaaaaaaccgtacgaatacaacgactacgaaaaaaccttcatccactactcgcacgtaatccgacaccaacgaacgcacaacgaaaaaaaaccctacgcgtacgccgaatacgacaaaaccttcgaccaaaacttcaacctcctccgacaccaacgcgtacacacgaacgaaaaaccctacgcgtacgccgactacgacaaaaccttcgaccaaaaatcgaacgccgccaaacaccgccgcacccacaccgaaaaaaaactatacgcgtacgacgaatacgaaaaacgcttcctacacaactcgaacgtaatccgacaccgacgaacccaccacgaaaaaaacccgtacgaataccgaaaatacgaccaaaccttcaaccaaaactccaacctcctccaacaccaacgcgtacacacgaaaaaacgacccttcgcctaccaaaactacgaccgcgccttcaaccgcaactccttcctccgcgaacaccgccgcatccacaccgaaaaaaaaccccaccaatacgaccactacgaacgcgcgttccgaacgctatcgaacttcttccgacaccaacgactccacacgaacgaaaaaccgttccgctacaccgaatacgaccgcgccttccgcctaaacttccacctcatccaacaccgacgaatacataacgccgaataaaccgaaactacgacgaaaaaaataccgacgacctaataaacgcgaaaccgaaaccgaaaaaaactcctatccgccccgtacgcgataaaaaaataacaaccgactacgcgcctaattctcgaattacgaaaacctcgccaaacctacatccgccttaacttaaaaacaatcaaaaaaaacaaaactcgaaaaaaacgaacgctacccgcgaaaaacgattcccaaaaacgaaaaaatctctaaaatctatcccgaaccgaccgcccgcctctaaaactccccgcctcccacgatcaactactacgaaacaataaccgataattaaatcgatcattcctccgcaaccaaacctccatcaaaaccctacataaaataacgacctcgaacttcgaattaataaaaacgaaataaaaaaacaattacgaaaaaaacgcccaaa

SEQ ID NO: 17633 - DNA, 2391 bp, Artificial Sequence
  chemically treated genomic DNA (Homo sapiens) CpG-island No: 17633
atacgtacgttatatatacgtacgttatatatacgtacgttatatacgtacgttatacgtacgttatatacgtacgttatatatacgtattttatatacgtacgttatatatacgtacgttatatacgtacgttatatatacgtacgttatataggtacgttatacgtacgtacgttatacgtacgtacgttatacgtacgttatatataggtacgttatatataggtacgttatatatacgtacgttatatacgtacgttacgtacgtacgttacgtatatatgttatatacgtacgttatatataggtacgttatatacgtacgttataaatataggtacgttatatatacgtacgttatatacgtacgttatatacgtacgttatatatatacgtacgttatatatatacgttatacgtacgttatatacgtatgttatacgtatattatacgtacgttatatataggtacgttatatatataggtacgttatatatatgtacgttatatacgtacgttatatacgtacgttatatatatgtttattatacgtacgttatatatatgtacgttatatatatgtacgttatatttataggtacgttatatagatgtatgttatatatataggtacgttatatacgtacgttatatataggtatgttaaatacgtacgttatatatgtacgttatatatataggtacgttatataggtacgttatacgtacgttatatacgtatgttatacgtacgttatataggtacgttatatatataggtacgttatatataggtacgttatatatatgtatgttatatacgtacgttatatatatacgttatatatatgtacgttatatatatgtacgttatatttataggtacgttatatagatgtatgttatatatataggtacgttatatacgtacgttatatatataggtacgttatatacgtacgttatatatatgtttattatatacgtacgttatatatatgtatattatacgtacgttatatataggtatgttatataggtacgttatataggtacgttatacgtacgttatatatataggtacgttatataataggtacgttaaagatgtacgttatatatacgtacgttatatatagatacgttatatatatgtacgttatatatatgtaggttatatatatgtatgttatataggtacgttatatatatacgttatacgtatattatatacgtacgttatatacgtacgttatatacgtacgttatacgtacgttatacgtacgttatatataggtacgttatatacgttatatacgtacgtacgttatatacgtacgttatatataggtacgttatatatatgtatatatatatgtatgttatatataggtacgttatatgcgtatattatatacgtacgtaatatatacgtacgttatacgtacgtaatatacgtacgttatacgtacgttatatacgtacgttatatacgtacgttatatataggtacgttatatacgttatatacgtacgttatatacgtacgtacgttatatacgtacgttatatataggtacgttatatatatgtatatatatatatgtacgttatataggtacgttatatataggtatattatatacgtacgttatatataggtatgttaaatacgtacgttatatatgtacgttatatatataggtatattatatataggtacgttatataggtacgttatatatataggtacgttatatacgtatgttatatataggtacgttatataggtacgttatatataggtacgttatatatataggtacgttatatatatgtacgttatatacgtacgttatatacgtacgttatatatatgtttattatacgtacgttatatatatgtacgttatatatatgtacgttatatttataggtacgttatatagatgtatgttatatatataggtacgttatatacgtacgttatatatataggtacgttatatacgtacgttatacgtacgttatatatatgtttattatatacgtacgttatatatatgtacgttatataggtacgttatatatatatgtacgttatatatatgtttattatatacgtacgttatatatatgtacgttatatatataggtacgttatatatatacgtacgttatatatataggtacgttatatacgtacgttatacgtacgttatatatatgtttattatatacgtacgttatatatatgtacgttatatatataggtatattatatatatgtacgttatatatatatgtacgttatatatatgtacgttttatatagatatgttatatataggtatattatacgtataagtgtatatatattatataat

SEQ ID NO: 17634 - DNA, 2391 bp, Artificial Sequence
  chemically treated genomic DNA (Homo sapiens) CpG-island No: 17634
attatataatatatatacacttatacgtataatatacctatatataacatatctatataaaacgtacatatatataacgtacatatatatataacgtacatatatataatatacctatatatataacgtacatatatataacgtacgtatataataaacatatatataacgtacgtataacgtacgtatataacgtacctatatatataacgtacgtatatatataacgtacctatatatataacgtacatatatataacgtacgtatataataaacatatatataacgtacatatatatataacgtacctatataacgtacatatatataacgtacgtatataataaacatatatataacgtacgtataacgtacgtatataacgtacctatatatataacgtacgtatataacgtacctatatatataacatacatctatataacgtacctataaatataacgtacatatatataacgtacatatatataacgtacgtataataaacatatatataacgtacgtatataacgtacgtatataacgtacatatatataacgtacctatatatataacgtacctatatataacgtacctatataacgtacctatatataacatacgtatataacgtacctatatatataacgtacctatataacgtacctatatataatatacctatatatataacgtacatatataacgtacgtatttaacatacctatatataacgtacgtatataatatacctatatataacgtacctatataacgtacatatatatatatacatatatataacgtacctatatataacgtacgtatataacgtacgtacgtatataacgtacgtatataacgtatataacgtacctatatataacgtacgtatataacgtacgtatataacgtacgtataacgtacgtatattacgtacgtataacgtacgtatatattacgtacgtatataatatacgcatataacgtacctatatataacatacatatatatatacatatatataacgtacctatatataacgtacgtatataacgtacgtacgtatataacgtatataacgtacctatatataacgtacgtataacgtacgtataacgtacgtatataacgtacgtatataacgtacgtatataatatacgtataacgtatatatataacgtacctatataacatacatatatataacctacatatatataacgtacatatatataacgtatctatatataacgtacgtatatataacgtacatctttaacgtacctattatataacgtacctatatatataacgtacgtataacgtacctatataacgtacctatataacatacctatatataacgtacgtataatatacatatatataacgtacgtatataataaacatatatataacgtacgtatataacgtacctatatatataacgtacgtatataacgtacctatatatataacatacatctatataacgtacctataaatataacgtacatatatataacgtacatatatataacgtatatatataacgtacgtatataacatacatatatataacgtacctatatataacgtacctatatatataacgtacctatataacgtacgtataacatacgtatataacgtacgtataacgtacctatataacgtacctatatatataacgtacatatataacgtacgtatttaacatacctatatataacgtacgtatataacgtacctatatatataacatacatctatataacgtacctataaatataacgtacatatatataacgtacatatatataacgtacgtataataaacatatatataacgtacgtatataacgtacgtatataacgtacatatatataacgtacctatatatataacgtacctatatataacgtacgtataatatacgtataacatacgtatataacgtacgtataacgtatatatataacgtacgtatatatataacgtacgtatataacgtacgtatataacgtacgtatatataacgtacctatatttataacgtacgtatataacgtacctatatataacgtacgtatataacatatatacgtaacgtacgtacgtaacgtacgtatataacgtacgtatatataacgtacctatatataacgtacctatatataacgtacgtataacgtacgtacgtataacgtacgtacgtataacgtacctatataacgtacgtatatataacgtacgtatataacgtacgtatatataacgtacgtatataaaatacgtatatataacgtacgtatataacgtacgtataacgtacgtatataacgtacgtatatataacgtacgtatatataacgtacgtat

SEQ ID NO: 17635 - DNA, 2391 bp, Artificial Sequence
  chemically treated genomic DNA (Homo sapiens) CpG-island No: 17635
attgtgtggtgtgtgtgtatttgtgcgtgtggtgtgtttgtgtgtggtatgtttgtgtggggcgtgtatgtgtgtggcgtgtatgtgtgtgtggcgtgtatgtgtgtggtgtgtttgtgtgtgtggcgtgtatgtgtgtggcgtgcgtgtgtggtgagtatgtgtgtggcgtgcgtgtggcgtgcgtgtgtggcgtgtttgtgtgtgtggcgtgcgtgtgtgtgtggcgtgtttgtgtgtgtggcgtgtatgtgtgtggcgtgcgtgtgtggtgagtatgtgtgtggcgtgtatgtgtgtgtggcgtgtttgtgtggcgtgtatgtgtgtggcgtgcgtgtgtggtgagtatgtgtgtggcgtgcgtgtggcgtgcgtgtgtggcgtgtttgtgtgtgtggcgtgcgtgtgtggcgtgtttgtgtgtgtggtatgtatttgtgtggcgtgtttgtgggtgtggcgtgtatgtgtgtggcgtgtatgtgtgtggcgtgcgtgtggtgagtatgtgtgtggcgtgcgtgtgtggcgtgcgtgtgtggcgtgtatgtgtgtggcgtgtttgtgtgtgtggcgtgtttgtgtgtggcgtgtttgtgtggcgtgtttgtgtgtggtatgcgtgtgtggcgtgtttgtgtgtgtggcgtgtttgtgtggcgtgtttgtgtgtggtgtgtttgtgtgtgtggcgtgtatgtgtggcgtgcgtgtttggtatgtttgtgtgtggcgtgcgtgtgtggtgtgtttgtgtgtggcgtgtttgtgtggcgtgtatgtgtgtgtgtgtatgtgtgtggcgtgtttgtgtgtggcgtgcgtgtgtggcgtgcgtgcgtgtgtggcgtgcgtgtgtggcgtgtgtggcgtgtttgtgtgtggcgtgcgtgtgtggcgtgcgtgtgtggcgtgcgtgtggcgtgcgtgtgttgcgtgcgtgtggcgtgcgtgtgtgttgcgtgcgtgtgtggtgtgcgtatgtggcgtgtttgtgtgtggtatgtatgtgtgtgtgtatgtgtgtggcgtgtttgtgtgtggcgtgcgtgtgtggcgtgcgtgcgtgtgtggcgtgtgtggcgtgtttgtgtgtggcgtgcgtgtggcgtgcgtgtggcgtgcgtgtgtggcgtgcgtgtgtggcgtgcgtgtgtggtgtgcgtgtggcgtgtgtgtgtgacgtgtttgtgtggtatgtatgtgtgtggtttgtatgtgtgtggcgtgtatgtgtgtggcgtgtttgtgtgtggcgtgcgtgtgtgtggcgtgtatttttggcgtgtttgttgtgtggcgtgtttgtgtgtgtggcgtgcgtgtggcgtgtttgtgtggcgtgtttgtgtggtatgtttgtgtgtggcgtgcgtgtggtgtgtatgtgtgtggcgtgcgtgtgtggtgagtatgtgtgtggcgtgcgtgtgtggcgtgtttgtgtgtgtggcgtgcgtgtgtggcgtgtttgtgtgtgtggtatgtatttgtatggcgtgtttgtgggtgtggcgtgtatgtgtgtggcgtgtatgtgtgtggcgtgtgtgtgtggcgtgcgtgtgtggtatgtatgtgtgtggcgtgtttgtgtgtggcgtgtttgtgtgtgtggcgtgtttgtgtggcgtgcgtgtggtatgcgtgtgtggcgtgcgtgtggcgtgtttgtgtggcgtgtttgtgtgtgtggcgtgtatgtgtggcgtgcgtgtttggtatgtttgtgtgtggcgtgcgtgtgtggcgtgtttgtgtgtgtggtatgtatttgtatggcgtgtttgtgggtgtggcgtgtatgtgtgtggcgtgtatgtgtgtggcgtgcgtgtggtgagtatgtgtgtggcgtgcgtgtgtggcgtgcgtgtgtggcgtgtatgtgtgtggcgtgtttgtgtgtgtggcgtgtttgtgtgtggcgtgcgtgtggtgtgcgtgtggtatgcgtgtgtggcgtgcgtgtggcgtgtgtgtgtaacgtgcgtgtgtgtgtagcgtgcgtgtgtggcgtgcgtgtgtggcgtgcgtgtgtgtggcgtgtttgtgtttgtggcgtgcgtgtgtggcgtatttgtgtgtggcgtgcgtgtgtggtatgtgtgcgtggcgtgcgtgcgtggcgtgcgtgtgtggcgtgcgtgtgtgtggcgtgtttgtgtgtggcgtgtttgtgtgtggcgtgcgtgtggcgtgcgtgcgtgtggcgtgcgtgcgtgtggcgtgtttgtgtggcgtgcgtgtgtgtggcgtgcgtgtgtggcgtgcgtgtgtgtggcgtgcgtgtgtggagtgcgtgtgtgtggcgtgcgtgtgtggcgtgcgtgtggcgtgcgtgtgtggcgtgcgtgtgtgtggcgtgcgtgtgtgtggcgtgcgtgt

SEQ ID NO: 17636 - DNA, 2391 bp, Artificial Sequence
  chemically treated genomic DNA (Homo sapiens) CpG-island No: 17636
acacgcacgccacacacacgcacgccacacacacgcacgccacacacgcacgccacacgcacgccacacacgcacgccacacacacgcactccacacacgcacgccacacacacgcacgccacacacgcacgccacacacacgcacgccacacaaacacgccacacgcacgcacgccacacgcacgcacgccacacgcacgccacacacaaacacgccacacacaaacacgccacacacacgcacgccacacacgcacgccacgcacgcacgccacgcacacataccacacacgcacgccacacacaaatacgccacacacgcacgccacaaacacaaacacgccacacacacgcacgccacacacgcacgccacacacgcacgctacacacacacgcacgttacacacacacgccacacgcacgccacacacgcataccacacgcacaccacacgcacgccacacacaaacacgccacacacacaaacacgccacacacatacacgccacacacgcacgccacacacgcacgccacacacatactcaccacacgcacgccacacacatacacgccacacacatacacgccacacccacaaacacgccatacaaatacataccacacacacaaacacgccacacacgcacgccacacacaaacataccaaacacgcacgccacacatacacgccacacacacaaacacgccacacaaacacgccacacgcacgccacacacgcataccacacgcacgccacacaaacacgccacacacacaaacacgccacacacaaacacgccacacacatacataccacacacgcacgccacacacacacgccacacacatacacgccacacacatacacgccacacccacaaacacgccatacaaatacataccacacacacaaacacgccacacacgcacgccacacacacaaacacgccacacacgcacgccacacacatactcaccacacacgcacgccacacacatacacaccacacgcacgccacacacaaacataccacacaaacacgccacacaaacacgccacacgcacgccacacacacaaacacgccacacaacaaacacgccaaaaatacacgccacacacacgcacgccacacacaaacacgccacacacatacacgccacacacatacaaaccacacacatacataccacacaaacacgtcacacacacacgccacacgcacaccacacacgcacgccacacacgcacgccacacacgcacgccacacgcacgccacacgcacgccacacacaaacacgccacacacgccacacacgcacgcacgccacacacgcacgccacacacaaacacgccacacacatacacacacacatacataccacacacaaacacgccacatacgcacaccacacacgcacgcaacacacacgcacgccacacgcacgcaacacacgcacgccacacgcacgccacacacgcacgccacacacgcacgccacacacaaacacgccacacacgccacacacgcacgccacacacgcacgcacgccacacacgcacgccacacacaaacacgccacacacatacacacacacacatacacgccacacaaacacgccacacacaaacacaccacacacgcacgccacacacaaacataccaaacacgcacgccacacatacacgccacacacacaaacacaccacacacaaacacgccacacaaacacgccacacacacaaacacgccacacacgcataccacacacaaacacgccacacaaacacgccacacacaaacacgccacacacacaaacacgccacacacatacacgccacacacgcacgccacacacgcacgccacacacatactcaccacacgcacgccacacacatacacgccacacacatacacgccacacccacaaacacgccacacaaatacataccacacacacaaacacgccacacacgcacgccacacacacaaacacgccacacacgcacgccacacgcacgccacacacatactcaccacacacgcacgccacacacatacacgccacacaaacacgccacacacacatacacgccacacacatactcaccacacacgcacgccacacacatacacgccacacacacaaacacgccacacacacacgcacgccacacacacaaacacgccacacacgcacgccacacgcacgccacacacatactcaccacacacgcacgccacacacatacacgccacacacacaaacacaccacacacatacacgccacacacacatacacgccacacacatacacgccccacacaaacataccacacacaaacacaccacacgcacaaatacacacacaccacacaat

SEQ ID NO: 17637 - DNA, 756 bp, Artificial Sequence
  chemically treated genomic DNA (Homo sapiens) CpG-island No: 17637
cgagcgggtagatttttggagttttcgtaaagggagtcgaggagttaggcgcgtcgagtttaggttcgttttgatttttagtttgggacgtttcgtatagttttttttttcgtttttcgaatttttttcgtacgtttagcggtcgtcgcggcgtatgcgtagtataatttgttagttagtcgcgggcgtttcggtcgcggttgttaggggttatcgtttcgcgggcgggcggagttggtcgtttagagttcgtttttttggaattttggttggttgatatagttgttcgtcgaagcggtattgtcgtttattgggtaatggttagtttcgtacgttagattcgtgtttcgtttagtcgcgtcgcgggtcgtttttatttaggagggatagtcggggatcggcgcgggtatttaggagttcgcggtttaggtggtgcgggcggttttagttcggttgcggagcgttgcgcgagcggcgggttggttgatttcgagggatttttagcgtagcgggtgcggcgatgattttggaggagaggtcggacggcgcgggcgtcggcgaggagagttcgcggttgtaggtgcgtagaattggcgcggcggcgggaggaggggttcggaatttcggtttttttttgttttttttcgaggcgcgtttcgggcgttttttttttacgttttattcggttcggacgtaggtagggaaattgaggttagagtttgcgtttttttttttttgagttcggtggaggtgttt

SEQ ID NO: 17638 - DNA, 756 bp, Artificial Sequence
  chemically treated genomic DNA (Homo sapiens) CpG-island No: 17638
aaacacctccaccgaactcaaaaaaaaaaaaacgcaaactctaacctcaatttccctacctacgtccgaaccgaataaaacgtaaaaaaaaaacgcccgaaacgcgcctcgaaaaaaaacaaaaaaaaaccgaaattccgaacccctcctcccgccgccgcgccaattctacgcacctacaaccgcgaactctcctcgccgacgcccgcgccgtccgacctctcctccaaaatcatcgccgcacccgctacgctaaaaatccctcgaaatcaaccaacccgccgctcgcgcaacgctccgcaaccgaactaaaaccgcccgcaccacctaaaccgcgaactcctaaatacccgcgccgatccccgactatccctcctaaataaaaacgacccgcgacgcgactaaacgaaacacgaatctaacgtacgaaactaaccattacccaataaacgacaataccgcttcgacgaacaactatatcaaccaaccaaaattccaaaaaaacgaactctaaacgaccaactccgcccgcccgcgaaacgataacccctaacaaccgcgaccgaaacgcccgcgactaactaacaaattatactacgcatacgccgcgacgaccgctaaacgtacgaaaaaaattcgaaaaacgaaaaaaaaaactatacgaaacgtcccaaactaaaaatcaaaacgaacctaaactcgacgcgcctaactcctcgactccctttacgaaaactccaaaaatctacccgctcg

SEQ ID NO: 17639 - DNA, 756 bp, Artificial Sequence
  chemically treated genomic DNA (Homo sapiens) CpG-island No: 17639
aagtatttttatcgagtttagaggaggagggacgtaggttttggttttagtttttttgtttgcgttcgggtcgaatgagacgtaggaggggggcgttcggaacgcgtttcgagggggggtaggaaaaggtcgggatttcgggttttttttttcgtcgtcgcgttagttttgcgtatttgtagtcgcgggtttttttcgtcggcgttcgcgtcgttcggttttttttttaggattatcgtcgtattcgttgcgttgggggtttttcggggttagttagttcgtcgttcgcgtagcgtttcgtagtcgggttagggtcgttcgtattatttgggtcgcgggtttttgagtgttcgcgtcggttttcgattgttttttttgagtgggggcggttcgcggcgcggttgggcggggtacgggtttggcgtgcgaagttggttattgtttaataggcggtaatgtcgtttcgacggatagttatattagttaattagagttttaggaaggcgggttttggacggttagtttcgttcgttcgcgggacggtaatttttggtaatcgcggtcggaacgttcgcggttggttggtaggttgtattgcgtatgcgtcgcggcggtcgttgagcgtgcgggagaagttcgggaaacggagaaaaaaattatacggaacgttttaagttgagagttagggcggatttggattcggcgcgtttagtttttcggttttttttgcggggattttaggagtttgttcgttcg

SEQ ID NO: 17640 - DNA, 756 bp, Artificial Sequence
  chemically treated genomic DNA (Homo sapiens) CpG-island No: 17640
cgaacgaacaaactcctaaaatccccgcaaaaaaaaccgaaaaactaaacgcgccgaatccaaatccgccctaactctcaacttaaaacgttccgtataatttttttctccgtttcccgaacttctcccgcacgctcaacgaccgccgcgacgcatacgcaatacaacctaccaaccaaccgcgaacgttccgaccgcgattaccaaaaattaccgtcccgcgaacgaacgaaactaaccgtccaaaacccgccttcctaaaactctaattaactaatataactatccgtcgaaacgacattaccgcctattaaacaataaccaacttcgcacgccaaacccgtaccccgcccaaccgcgccgcgaaccgcccccactcaaaaaaaacaatcgaaaaccgacgcgaacactcaaaaacccgcgacccaaataatacgaacgaccctaacccgactacgaaacgctacgcgaacgacgaactaactaaccccgaaaaacccccaacgcaacgaatacgacgataatcctaaaaaaaaaaccgaacgacgcgaacgccgacgaaaaaaacccgcgactacaaatacgcaaaactaacgcgacgacgaaaaaaaaaacccgaaatcccgaccttttcctaccccccctcgaaacgcgttccgaacgcccccctcctacgtctcattcgacccgaacgcaaacaaaaaaactaaaaccaaaacctacgtccctcctcctctaaactcgataaaaatactt

SEQ ID NO: 17641 - DNA, 656 bp, Artificial Sequence
  chemically treated genomic DNA (Homo sapiens) CpG-island No: 17641
agcggggttagggtttaggtgagggtttagggtcggggcgagcgcggcgcggttcggatgcgtagcgttatcgcgttagatttttcgtttagttgtcgtgggtttttttttttttcgattatagacggcgtaggtttttagttattttagagcggtttcggaagaattcgggcggaatcgcggttggttttcggttttcggcgttttcggaggcgtattgaggtttcgtagggggcggggaagtttgcgtgtgcgtagttcggttcggttcgttttttttattttagttcgtttttttttcggttttggattcggttttgtgggagggttcgtttcgggttcggtgcgattgcgtagtttttcggcgttttttcggtggttttttcgggtcgagtaaataggtggggtagtgtcggattaggaaggagcgttaagcgggtaggtaggcggggagggcgcggggagggcgcggggaggcggcggttagtttaggaggagtttgttttgggtgtcgcgggagttatcgacgggttgtagaggtcgggaggaggcgatcgcggcgcggttttagaaggttggattgaggattatagttggttttcggttttttttcggagtttggggttttcggtagtattttcgcggtttttttttta

SEQ ID NO: 17642 - DNA, 656 bp, Artificial Sequence
  chemically treated genomic DNA (Homo sapiens) CpG-island No: 17642
taaaaaaaaaaccgcgaaaatactaccgaaaaccccaaactccgaaaaaaaaccgaaaaccaactataatcctcaatccaaccttctaaaaccgcgccgcgatcgcctcctcccgacctctacaacccgtcgataactcccgcgacacccaaaacaaactcctcctaaactaaccgccgcctccccgcgccctccccgcgccctccccgcctacctacccgcttaacgctccttcctaatccgacactaccccacctatttactcgacccgaaaaaaccaccgaaaaaacgccgaaaaactacgcaatcgcaccgaacccgaaacgaaccctcccacaaaaccgaatccaaaaccgaaaaaaaaacgaactaaaataaaaaaaacgaaccgaaccgaactacgcacacgcaaacttccccgccccctacgaaacctcaatacgcctccgaaaacgccgaaaaccgaaaaccaaccgcgattccgcccgaattcttccgaaaccgctctaaaataactaaaaacctacgccgtctataatcgaaaaaaaaaaaaacccacgacaactaaacgaaaaatctaacgcgataacgctacgcatccgaaccgcgccgcgctcgccccgaccctaaaccctcacctaaaccctaaccccgct

SEQ ID NO: 17643 - DNA, 656 bp, Artificial Sequence
  chemically treated genomic DNA (Homo sapiens) CpG-island No: 17643
tgagaaggaggtcgcggggatgttgtcgaaggttttaggtttcggggagaggtcggaagttagttgtggtttttagtttagttttttagggtcgcgtcgcggtcgttttttttcggtttttgtagttcgtcggtggttttcgcggtatttagaataggttttttttggattggtcgtcgttttttcgcgtttttttcgcgtttttttcgtttgtttgttcgtttggcgtttttttttggttcgatattgttttatttgtttgttcgattcggggaagttatcgaggaagcgtcgaggagttgcgtagtcgtatcgagttcggaacggatttttttatagaatcgggtttagagtcggggagggggcgggttaggatgaagagggcgggtcgggtcgagttgcgtatacgtaggttttttcgttttttgcggggttttagtacgttttcgagaacgtcgggaatcggaagttagtcgcggtttcgttcggattttttcggggtcgttttgggatgattggaggtttgcgtcgtttatggtcggggagggggagagtttacggtagttgagcggagggtttggcgcggtgacgttgcgtattcgggtcgcgtcgcgttcgtttcgattttaaatttttatttgaattttaatttcgtt

SEQ ID NO: 17644 - DNA, 656 bp, Artificial Sequence
  chemically treated genomic DNA (Homo sapiens) CpG-island No: 17644
aacgaaattaaaattcaaataaaaatttaaaatcgaaacgaacgcgacgcgacccgaatacgcaacgtcaccgcgccaaaccctccgctcaactaccgtaaactctccccctccccgaccataaacgacgcaaacctccaatcatcccaaaacgaccccgaaaaaatccgaacgaaaccgcgactaacttccgattcccgacgttctcgaaaacgtactaaaaccccgcaaaaaacgaaaaaacctacgtatacgcaactcgacccgacccgccctcttcatcctaacccgccccctccccgactctaaacccgattctataaaaaaatccgttccgaactcgatacgactacgcaactcctcgacgcttcctcgataacttccccgaatcgaacaaacaaataaaacaatatcgaaccaaaaaaaaacgccaaacgaacaaacaaacgaaaaaaacgcgaaaaaaacgcgaaaaaacgacgaccaatccaaaaaaaacctattctaaataccgcgaaaaccaccgacgaactacaaaaaccgaaaaaaaacgaccgcgacgcgaccctaaaaaactaaactaaaaaccacaactaacttccgacctctccccgaaacctaaaaccttcgacaacatccccgcgacctccttctca

SEQ ID NO: 17645 - DNA, 646 bp, Artificial Sequence
  chemically treated genomic DNA (Homo sapiens) CpG-island No: 17645
gaagaggcgcgcgttaggggtttcggcggggattttttataagttattttcggcgtcgtttcgcggatttattagcgatattttcggtgggcgtttcgcgttttcgtcgtaaaggaacgattagcgaggtaaggaaacgtttggttggggtagcggggaagtggtttttttttacgtttttgttttaattattttttcgggcgtaattcgtcggttacgcggtaatgcggacgtttagattcgggcgcggggtgtagcggtttttttttatcgtttcgggattgcgagcgtttttgggtacggtttcgttatacgtcgttattattgcgtttattgttatttttaggggttttttcgacggttagggatgtgttgaggtaacgtcgggcgggtagtaggggcgagttcgcgtttttttggagtcgaaaggagtattgcggtcggtgatttcgggcggaaatttgttgggagcgtatcggaagtagtcgtttatagaggtttgcgtatttgttttcggtttgttttgagatattcggatgatcgtttattcggtggtttaacggttttcgataggagtttcgggttcgggtaaggaaggggttagttgggtttttagtgtgaagcgattgtgggatattttggtgaa

SEQ ID NO: 17646 - DNA, 646 bp, Artificial Sequence
  chemically treated genomic DNA (Homo sapiens) CpG-island No: 17646
ttcaccaaaatatcccacaatcgcttcacactaaaaacccaactaaccccttccttacccgaacccgaaactcctatcgaaaaccgttaaaccaccgaataaacgatcatccgaatatctcaaaacaaaccgaaaacaaatacgcaaacctctataaacgactacttccgatacgctcccaacaaatttccgcccgaaatcaccgaccgcaatactcctttcgactccaaaaaaacgcgaactcgcccctactacccgcccgacgttacctcaacacatccctaaccgtcgaaaaaacccctaaaaataacaataaacgcaataataacgacgtataacgaaaccgtacccaaaaacgctcgcaatcccgaaacgataaaaaaaaaccgctacaccccgcgcccgaatctaaacgtccgcattaccgcgtaaccgacgaattacgcccgaaaaaataattaaaacaaaaacgtaaaaaaaaaccacttccccgctaccccaaccaaacgtttccttacctcgctaatcgttcctttacgacgaaaacgcgaaacgcccaccgaaaatatcgctaataaatccgcgaaacgacgccgaaaataacttataaaaaatccccgccgaaacccctaacgcgcgcctcttc

SEQ ID NO: 17647 - DNA, 646 bp, Artificial Sequence
  chemically treated genomic DNA (Homo sapiens) CpG-island No: 17647
tttattaggatgttttatagtcgttttatattaagagtttaattggttttttttttgttcggattcggagtttttgtcggggatcgttgaattatcgagtgggcggttattcgggtgttttagagtagatcgagagtaggtgcgtagatttttgtggacggttattttcggtgcgtttttaataggttttcgttcggggttatcggtcgtagtgtttttttcggttttagggaagcgcggattcgtttttgttgttcgttcggcgttgttttagtatatttttgatcgtcggaggagtttttagaagtggtagtgggcgtaatggtggcggcgtgtggcggggtcgtgtttagaagcgttcgtagtttcggagcggtgggggagggtcgttgtatttcgcgttcgagtttgggcgttcgtattgtcgcgtggtcggcgaattgcgttcgagggggtggttaagataaaagcgtggggaggggttattttttcgttgttttagttaggcgtttttttgtttcgttgatcgtttttttacggcgggaacgcgaggcgtttatcggggatgtcgttaatgagttcgcggggcgacgtcgagagtggtttgtgaggggttttcgtcggagtttttggcgcgcgttttttt

SEQ ID NO: 17648 - DNA, 646 bp, Artificial Sequence
  chemically treated genomic DNA (Homo sapiens) CpG-island No: 17648
aaaaaaacgcgcgccaaaaactccgacgaaaacccctcacaaaccactctcgacgtcgccccgcgaactcattaacgacatccccgataaacgcctcgcgttcccgccgtaaaaaaacgatcaacgaaacaaaaaaacgcctaactaaaacaacgaaaaaataacccctccccacgcttttatcttaaccaccccctcgaacgcaattcgccgaccacgcgacaatacgaacgcccaaactcgaacgcgaaatacaacgaccctcccccaccgctccgaaactacgaacgcttctaaacacgaccccgccacacgccgccaccattacgcccactaccacttctaaaaactcctccgacgatcaaaaatatactaaaacaacgccgaacgaacaacaaaaacgaatccgcgcttccctaaaaccgaaaaaaacactacgaccgataaccccgaacgaaaacctattaaaaacgcaccgaaaataaccgtccacaaaaatctacgcacctactctcgatctactctaaaacacccgaataaccgcccactcgataattcaacgatccccgacaaaaactccgaatccgaacaaaaaaaaaaccaattaaactcttaatataaaacgactataaaacatcctaataaa

SEQ ID NO: 17649 - DNA, 925 bp, Artificial Sequence
  chemically treated genomic DNA (Homo sapiens) CpG-island No: 17649
agtgttcgtcgttattgcgtggttacgggggtgggaagtgtttatcgttagtgtgtggttacggggtgggaagtgttcgtcgttagtgcgtggttacgggggtgggaagtgtttatcgttagtgcgtggttataggggtgggaagtgtttttcgttagtgcgtggttacgggggtgggaagtgttcgtcgttagtgtgtggttacgggggtgagaaatgttcgttgtaaatgagtggttacggggtgggaagtgttcgtcgttagtgcgtggttacggggtgggaagtgttcgtcgttagtgcgtggttacgggggtgggaagtgttcgtcgttagtgcgtggttacgggggtgggaagtgttcgtcgttagtgcgtggttacgggggtgggaagtgtttatcgttagtgtgtggttacgggggtgggaagtgtttttcgttagtgcgtggttacggggtgggaaatgttcgttgtaaatgagtggttacggggtgggaaatgttcgtttttagtgcgtggttacggggtgggaagtgttcgttttaaatgagtggttacggggtgggaaatgttcgtttttagtgcgtggttacggggtgggaaatgttcgtcgttattgcgtggttacgggggtgggaaatgttcgtcgttagtgcgtggttacgggggtgggaaatgttcgtcgttagtgcgtggttacgggggtgggaaatggtcgtcgttagtgtgtggttacgggggtgggaagtgttcgtcgttagtgcgtggttacgggggtgggaaatggttttcgttagtgtgtggttacgggggtgggaagtgttcgtcgttagtgtgtggttacggggtgggaagtgtttatcgttagtgtgtggttacggggtgggaagtgtttatcgttagtgtgtggttacgggggtggg

SEQ ID NO: 17650 - DNA, 925 bp, Artificial Sequence
  chemically treated genomic DNA (Homo sapiens) CpG-island No: 17650
cccacccccgtaaccacacactaacgataaacacttcccaccccgtaaccacacactaacgataaacacttcccaccccgtaaccacacactaacgacgaacacttcccacccccgtaaccacacactaacgaaaaccatttcccacccccgtaaccacgcactaacgacgaacacttcccacccccgtaaccacacactaacgacgaccatttcccacccccgtaaccacgcactaacgacgaacatttcccacccccgtaaccacgcactaacgacgaacatttcccacccccgtaaccacgcaataacgacgaacatttcccaccccgtaaccacgcactaaaaacgaacatttcccaccccgtaaccactcatttaaaacgaacacttcccaccccgtaaccacgcactaaaaacgaacatttcccaccccgtaaccactcatttacaacgaacatttcccaccccgtaaccacgcactaacgaaaaacacttcccacccccgtaaccacacactaacgataaacacttcccacccccgtaaccacgcactaacgacgaacacttcccacccccgtaaccacgcactaacgacgaacacttcccacccccgtaaccacgcactaacgacgaacacttcccaccccgtaaccacgcactaacgacgaacacttcccaccccgtaaccactcatttacaacgaacatttctcacccccgtaaccacacactaacgacgaacacttcccacccccgtaaccacgcactaacgaaaaacacttcccacccctataaccacgcactaacgataaacacttcccacccccgtaaccacgcactaacgacgaacacttcccaccccgtaaccacacactaacgataaacacttcccacccccgtaaccacgcaataacgacgaacact

SEQ ID NO: 17651 - DNA, 925 bp, Artificial Sequence
  chemically treated genomic DNA (Homo sapiens) CpG-island No: 17651
tttattttcgtgattatatattggcggtgagtattttttatttcgtgattatatattggcggtgagtattttttatttcgtgattatatattggcggcgagtattttttattttcgtgattatatattggcggggattattttttattttcgtgattacgtattggcggcgagtattttttattttcgtgattatatattggcggcgattattttttattttcgtgattacgtattggcggcgagtattttttattttcgtgattacgtattggcggcgagtattttttattttcgtgattacgtagtggcggcgagtattttttatttcgtgattacgtattgggggcgagtattttttatttcgtgattatttatttagagcgagtattttttatttcgtgattacgtattgggggcgagtattttttatttcgtgattatttatttatagcgagtattttttatttcgtgattacgtattggcggggagtattttttattttcgtgattatatattagcggtgagtattttttattttcgtgattacgtattggcggcgagtattttttattttcgtgattacgtattggcggcgagtattttttattttcgtgattacgtattggcggcgagtattttttatttcgtgattacgtattggcggcgagtattttttatttcgtgattatttatttatagcgagtattttttattttcgtgattatatattggcggcgagtattttttattttcgtgattacgtattggcggggagtattttttatttttgtgattacgtattggcggtgagtattttttattttcgtgattacgtattggcggcgagtattttttatttcgtgattatatattggcggtgagtattttttattttcgtgattacgtagtggcggcgagtatt

SEQ ID NO: 17652 - DNA, 925 bp, Artificial Sequence
  chemically treated genomic DNA (Homo sapiens) CpG-island No: 17652
aatactcgccgccactacgtaatcacgaaaataaaaaatactcaccgccaatatataatcacgaaataaaaaatactcgccgccaatacgtaatcacgaaaataaaaaatactcaccgccaatacgtaatcacaaaaataaaaaatactccccgccaatacgtaatcacgaaaataaaaaatactcgccgccaatatataatcacgaaaataaaaaatactcgctataaataaataatcacgaaataaaaaatactcgccgccaatacgtaatcacgaaataaaaaatactcgccgccaatacgtaatcacgaaaataaaaaatactcgccgccaatacgtaatcacgaaaataaaaaatactcgccgccaatacgtaatcacgaaaataaaaaatactcaccgctaatatataatcacgaaaataaaaaatactccccgccaatacgtaatcacgaaataaaaaatactcgctataaataaataatcacgaaataaaaaatactcgcccccaatacgtaatcacgaaataaaaaatactcgctctaaataaataatcacgaaataaaaaatactcgcccccaatacgtaatcacgaaataaaaaatactcgccgccactacgtaatcacgaaaataaaaaatactcgccgccaatacgtaatcacgaaaataaaaaatactcgccgccaatacgtaatcacgaaaataaaaaataatcgccgccaatatataatcacgaaaataaaaaatactcgccgccaatacgtaatcacgaaaataaaaaataatccccgccaatatataatcacgaaaataaaaaatactcgccgccaatatataatcacgaaataaaaaatactcaccgccaatatataatcacgaaataaaaaatactcaccgccaatatataatcacgaaaataaa

SEQ ID NO: 17653 - DNA, 586 bp, Artificial Sequence
  chemically treated genomic DNA (Homo sapiens) CpG-island No: 17653
ttacggggtgggaaatgttcgtcgttagtgcgtggttacggggtgggaaatgttcgtcgttagtgcgtggttataggggtgggaaatgtttttcgttagtgcgtggttataggggtgggaaatgttcgtcgttagtgcgtggttacggggtgggaaatgttcgtcgttagtgcgtggttacggggtgggaaatgttcgtcgttaatgcgtggttacgggggtgggaaatgttcgtcgttagtgtgtggttacgggggtgggaaatgttcgtcgttagtgcgtggttacgggggtgggaaatgttcgtcgttagtgcgtggttacgggggtgggaaatggtcgtcgttagtgtgtggttacggggtgggaagtgttcgtcgttagtgcgtggttacgggggtgggaaatgttcgtcgttagtgcgtggttacgggggtgggaaatggtcgtcgttagtgtgtggttacgggggtgggaagtgttcgtcgttagtgcgtggttataggggtgggaaatggtcgtcgttagtgtgtggttacgggggtgggaagtgttcgtcgttagtgtgttgttataagtttaaggt

SEQ ID NO: 17654 - DNA, 586 bp, Artificial Sequence
  chemically treated genomic DNA (Homo sapiens) CpG-island No: 17654
accttaaacttataacaacacactaacgacgaacacttcccacccccgtaaccacacactaacgacgaccatttcccacccctataaccacgcactaacgacgaacacttcccacccccgtaaccacacactaacgacgaccatttcccacccccgtaaccacgcactaacgacgaacatttcccacccccgtaaccacgcactaacgacgaacacttcccaccccgtaaccacacactaacgacgaccatttcccacccccgtaaccacgcactaacgacgaacatttcccacccccgtaaccacgcactaacgacgaacatttcccacccccgtaaccacacactaacgacgaacatttcccacccccgtaaccacgcattaacgacgaacatttcccaccccgtaaccacgcactaacgacgaacatttcccaccccgtaaccacgcactaacgacgaacatttcccacccctataaccacgcactaacgaaaaacatttcccacccctataaccacgcactaacgacgaacatttcccaccccgtaaccacgcactaacgacgaacatttcccaccccgtaa

SEQ ID NO: 17655 - DNA, 586 bp, Artificial Sequence
  chemically treated genomic DNA (Homo sapiens) CpG-island No: 17655
attttaaatttgtgataatatattggcggcgagtattttttattttcgtgattatatattggcggcgattattttttatttttgtgattacgtattggcggcgagtattttttattttcgtgattatatattggcggcgattattttttattttcgtgattacgtattggcggcgagtattttttattttcgtgattacgtattggcggcgagtattttttatttcgtgattatatattggcggcgattattttttattttcgtgattacgtattggcggcgagtattttttattttcgtgattacgtattggcggcgagtattttttattttcgtgattatatattggcggcgagtattttttattttcgtgattacgtattggcggcgagtattttttatttcgtgattacgtattggcggcgagtattttttatttcgtgattacgtattggcggcgagtattttttatttttgtgattacgtattggcggggagtattttttatttttgtgattacgtattggcggcgagtattttttatttcgtgattacgtattggcggcgagtattttttatttcgtga

SEQ ID NO: 17656 - DNA, 586 bp, Artificial Sequence
  chemically treated genomic DNA (Homo sapiens) CpG-island No: 17656
tcacgaaataaaaaatactcgccgccaatacgtaatcacgaaataaaaaatactcgccgccaatacgtaatcacaaaaataaaaaatactccccgccaatacgtaatcacaaaaataaaaaatactcgccgccaatacgtaatcacgaaataaaaaatactcgccgccaatacgtaatcacgaaataaaaaatactcgccgccaatacgtaatcacgaaaataaaaaatactcgccgccaatatataatcacgaaaataaaaaatactcgccgccaatacgtaatcacgaaaataaaaaatactcgccgccaatacgtaatcacgaaaataaaaaataatcgccgccaatatataatcacgaaataaaaaatactcgccgccaatacgtaatcacgaaaataaaaaatactcgccgccaatacgtaatcacgaaaataaaaaataatcgccgccaatatataatcacgaaaataaaaaatactcgccgccaatacgtaatcacaaaaataaaaaataatcgccgccaatatataatcacgaaaataaaaaatactcgccgccaatatattatcacaaatttaaaat

SEQ ID NO: 17657 - DNA, 779 bp, Artificial Sequence
  chemically treated genomic DNA (Homo sapiens) CpG-island No: 17657
cgaaagagacgggaagatatcgttaatttatagggtaggttcgcgcgggaggtttttggcgcggcgacggggcggggttaggcggtttttagtatgtcgcgcgcgtttttcgcgggatttcggttttcggtatgtcgcgcgttagcgtatgcgtgatgcggtttcgcgaggtagtgttttttggcggcgggtagtgatcgtcgcgggggcggagtcggaggcggggggttgcgtttggtgacgggaggacgcgcggtcgtcgcgtattgggtcggcggcggcggcggaagacgtcgatagtacgggttgtcgcggtagtagcggcggagtagtagagaggtcggggagcggcggttggtttacgcgcgtcgcgcgggtcgggatgagggattgtggcggcgcggttcgcgcgtaatcggtcggtgagagcgcgggtaacgggcggtgggcggcgcgggttaagaagatggcggaggggtcggcgttgcggttttcgtggttttggtttagtttcggcggaggttttaggttcggtagcgtaaggaatttaggttcgcggcgattgtagcggcgggaggggttgtgattgggtcgtggaaggagggggcgtgggtgtgcggggttcggtcgggcggggggcgcggaagttcgaggggtcgaggtcgcgcggggttcgggtgcgcgtcgacgggtcgggttgggagtgtgagggtgggtgagttcgtttgtgttcggttcgaagtgggtgtgattgtattttgtttagagtgagttgtgtt

SEQ ID NO: 17658 - DNA, 779 bp, Artificial Sequence
  chemically treated genomic DNA (Homo sapiens) CpG-island No: 17658
aacacaactcactctaaacaaaatacaatcacacccacttcgaaccgaacacaaacgaactcacccaccctcacactcccaacccgacccgtcgacgcgcacccgaaccccgcgcgacctcgacccctcgaacttccgcgccccccgcccgaccgaaccccgcacacccacgccccctccttccacgacccaatcacaacccctcccgccgctacaatcgccgcgaacctaaattccttacgctaccgaacctaaaacctccgccgaaactaaaccaaaaccacgaaaaccgcaacgccgacccctccgccatcttcttaacccgcgccgcccaccgcccgttacccgcgctctcaccgaccgattacgcgcgaaccgcgccgccacaatccctcatcccgacccgcgcgacgcgcgtaaaccaaccgccgctccccgacctctctactactccgccgctactaccgcgacaacccgtactatcgacgtcttccgccgccgccgccgacccaatacgcgacgaccgcgcgtcctcccgtcaccaaacgcaaccccccgcctccgactccgcccccgcgacgatcactacccgccgccaaaaaacactacctcgcgaaaccgcatcacgcatacgctaacgcgcgacataccgaaaaccgaaatcccgcgaaaaacgcgcgcgacatactaaaaaccgcctaaccccgccccgtcgccgcgccaaaaacctcccgcgcgaacctaccctataaattaacgatatcttcccgtctctttcg

SEQ ID NO: 17659 - DNA, 779 bp, Artificial Sequence
  chemically treated genomic DNA (Homo sapiens) CpG-island No: 17659
gatataatttattttggatagggtatagttatatttatttcgggtcgggtataggcgaatttatttatttttatatttttagttcggttcgtcggcgcgtattcgggtttcgcgcggtttcggtttttcgagttttcgcgtttttcgttcggtcgggtttcgtatatttacgttttttttttttacggtttagttatagtttttttcgtcgttgtagtcgtcgcgggtttggattttttgcgttgtcgggtttggagttttcgtcgaggttgggttaggattacggggatcgtagcgtcggttttttcgttatttttttggttcgcgtcgtttatcgttcgttgttcgcgtttttatcggtcggttgcgcgcgggtcgcgtcgttatagttttttatttcggttcgcgcgacgcgcgtgagttagtcgtcgtttttcggtttttttgttgtttcgtcgttgttgtcgcggtagttcgtgttgtcggcgtttttcgtcgtcgtcgtcggtttagtgcgcggcggtcgcgcgttttttcgttattaagcgtaatttttcgttttcggtttcgttttcgcggcggttattattcgtcgttagggggtattgtttcgcgaggtcgtattacgtatgcgttggcgcgcggtatgtcgggagtcggagtttcgcggagggcgcgcgcggtatgttgggagtcgtttggtttcgtttcgtcgtcgcgttagaggtttttcgcgcggatttattttgtgagttagcggtgttttttcgtttttttcg

SEQ ID NO: 17660 - DNA, 779 bp, Artificial Sequence
  chemically treated genomic DNA (Homo sapiens) CpG-island No: 17660
cgaaaaaaacgaaaaaacaccgctaactcacaaaataaatccgcgcgaaaaacctctaacgcgacgacgaaacgaaaccaaacgactcccaacataccgcgcgcgccctccgcgaaactccgactcccgacataccgcgcgccaacgcatacgtaatacgacctcgcgaaacaataccccctaacgacgaataataaccgccgcgaaaacgaaaccgaaaacgaaaaattacgcttaataacgaaaaaacgcgcgaccgccgcgcactaaaccgacgacgacgacgaaaaacgccgacaacacgaactaccgcgacaacaacgacgaaacaacaaaaaaaccgaaaaacgacgactaactcacgcgcgtcgcgcgaaccgaaataaaaaactataacgacgcgacccgcgcgcaaccgaccgataaaaacgcgaacaacgaacgataaacgacgcgaaccaaaaaaataacgaaaaaaccgacgctacgatccccgtaatcctaacccaacctcgacgaaaactccaaacccgacaacgcaaaaaatccaaacccgcgacgactacaacgacgaaaaaaactataactaaaccgtaaaaaaaaaaaacgtaaatatacgaaacccgaccgaacgaaaaacgcgaaaactcgaaaaaccgaaaccgcgcgaaacccgaatacgcgccgacgaaccgaactaaaaatataaaaataaataaattcgcctatacccgacccgaaataaatataactataccctatccaaaataaattatatc

SEQ ID NO: 17661 - DNA, 725 bp, Artificial Sequence
  chemically treated genomic DNA (Homo sapiens) CpG-island No: 17661
ttttgcgtaatcgttcggttcggcggagcgggtttcgggggttcggtcgtacgttttcgattatagttagtatggatcggggcgtagggtttttcgtttcgataagggttcggaatttaaggcgagcggaggcgatagtgtcggttgcgggttcgttttttgtcgagtttcgcgcgtttattgcgggggttatagtttttattaggtcgggttcggagatcgcgttttttttagttttcgtttcgcggtcgcggtcgatttatttttgggtcgtcgagatagtttcgggagaaataaacgttatttcgttttagggttcgttaaggtttttttttcggaaacggtcgatgcgtcgttttgggaggtttggaggatcgcgcgtttcgatggcgttcgggtttcgacggtttttagtttttgcggcgcggcggtcgttagggttttagttaggggcgcgtttggggggtttcgggttagatcgggtattagttttaggttcgacgggcgcggaagggcgtcgacgttttcggcgtttcgtttttttcgggatcggaggtagcgaacgtttattttttgcgtttattttttgttttcgggtggtttgcgggggttggggagtacggtgcgggatcgattttcggattcgtaggaagggcggagtaggggcgttcggttagggtcggttttttatataaatttatgatattgtttagtatgattttttt

SEQ ID NO: 17662 - DNA, 725 bp, Artificial Sequence
  chemically treated genomic DNA (Homo sapiens) CpG-island No: 17662
aaaaaaatcatactaaacaatatcataaatttatataaaaaaccgaccctaaccgaacgcccctactccgcccttcctacgaatccgaaaatcgatcccgcaccgtactccccaacccccgcaaaccacccgaaaacaaaaaataaacgcaaaaaataaacgttcgctacctccgatcccgaaaaaaacgaaacgccgaaaacgtcgacgcccttccgcgcccgtcgaacctaaaactaatacccgatctaacccgaaaccccccaaacgcgcccctaactaaaaccctaacgaccgccgcgccgcaaaaactaaaaaccgtcgaaacccgaacgccatcgaaacgcgcgatcctccaaacctcccaaaacgacgcatcgaccgtttccgaaaaaaaaaccttaacgaaccctaaaacgaaataacgtttatttctcccgaaactatctcgacgacccaaaaataaatcgaccgcgaccgcgaaacgaaaactaaaaaaaacgcgatctccgaacccgacctaataaaaactataacccccgcaataaacgcgcgaaactcgacaaaaaacgaacccgcaaccgacactatcgcctccgctcgccttaaattccgaacccttatcgaaacgaaaaaccctacgccccgatccatactaactataatcgaaaacgtacgaccgaacccccgaaacccgctccgccgaaccgaacgattacgcaaaa

SEQ ID NO: 17663 - DNA, 725 bp, Artificial Sequence
  chemically treated genomic DNA (Homo sapiens) CpG-island No: 17663
aaaaaagttatattaaataatgttataaatttatataagagatcgattttggtcggacgtttttgtttcgttttttttgcgggttcgggagtcgatttcgtatcgtgttttttaattttcgtaggttattcgggggtagagagtgggcgtaaggggtgaacgttcgttgttttcgatttcgggggaaacggagcgtcgagaacgtcgacgttttttcgcgttcgtcgggtttgggattgatattcggtttggttcggaattttttaggcgcgtttttagttggggttttggcgatcgtcgcgtcgtaggggttagaagtcgtcgaaattcgagcgttatcgaggcgcgcggttttttaggttttttaaaacggcgtatcggtcgttttcggggggggggttttgacgggttttggggcggggtggcgtttgtttttttcggggttgtttcggcggtttaagggtgagtcggtcgcggtcgcggggcggggattgggaggggcgcggttttcgagttcggtttggtggaggttgtagttttcgtagtgggcgcgcggagttcggtagggagcggattcgtagtcggtattgtcgttttcgttcgttttgggtttcgaatttttatcggggcgaagggttttgcgtttcggtttatgttggttgtggtcgggggcgtgcggtcgggttttcgagattcgtttcgtcgagtcggacggttgcgtagag

SEQ ID NO: 17664 - DNA, 725 bp, Artificial Sequence
  chemically treated genomic DNA (Homo sapiens) CpG-island No: 17664
ctctacgcaaccgtccgactcgacgaaacgaatctcgaaaacccgaccgcacgcccccgaccacaaccaacataaaccgaaacgcaaaacccttcgccccgataaaaattcgaaacccaaaacgaacgaaaacgacaataccgactacgaatccgctccctaccgaactccgcgcgcccactacgaaaactacaacctccaccaaaccgaactcgaaaaccgcgcccctcccaatccccgccccgcgaccgcgaccgactcacccttaaaccgccgaaacaaccccgaaaaaaacaaacgccaccccgccccaaaacccgtcaaaaccccccccccgaaaacgaccgatacgccgttttaaaaaacctaaaaaaccgcgcgcctcgataacgctcgaatttcgacgacttctaacccctacgacgcgacgatcgccaaaaccccaactaaaaacgcgcctaaaaaattccgaaccaaaccgaatatcaatcccaaacccgacgaacgcgaaaaaacgtcgacgttctcgacgctccgtttcccccgaaatcgaaaacaacgaacgttcaccccttacgcccactctctacccccgaataacctacgaaaattaaaaaacacgatacgaaatcgactcccgaacccgcaaaaaaaacgaaacaaaaacgtccgaccaaaatcgatctcttatataaatttataacattatttaatataactttttt

SEQ ID NO: 17665 - DNA, 944 bp, Artificial Sequence
  chemically treated genomic DNA (Homo sapiens) CpG-island No: 17665
ttttttcgagtttacgtatattaggatatttttagtcgcgttttttggtgcgtttgcgcgggggttttggaggaggagaagtaggcggggtcggcggtcgttggtgattataagtttcggcgtgtatcgcgttaggttggtcgtggcgcgttcggaaggtgtcgcggttttgggtttcgtttcggaagataaggtcgttcgttgacgtcgtgttttttttttcggtcgcgttggtgaataggtaggttatttttgcggttttgcggtatgggtagtattcgtcgttattttttttcgtgaggcgcgttgagattcggatcggtttttttgagaggatgtcggtgcgggcgttcgcggagagggtagggagtggtgggcgcggcggtttcgggggcggggtttcggaaagtcgggttggcgggggtattcgggtcgttcggtcgcgttaattgtgagtcgtttttaggattcgtcgttatgggtcgtgtgattcgtggatagaggaagggcgtcgggtttgtgtttcgcgcgtacgtgaagtatcgtaaaggcgttgcgcgtttgcgcgtcgtggatttcgttgagcggtacggttatattaagggtatcgttaaggtgcggaacgttggtcggggcgggaggggaagggacgttcggtcggaacgtcgtatttacgtcgtttttgtttataggatattatttacgattcgggtcgcggcgcgtttttcgttaaggtggtttttcgggattcgtatcggtttaagaagcggacggagttgtttattgtcgtcgagggtatttatacgggttagtttgtgtattgcggtaagaagggttagtatcgcggcggggaaggaaggtcggggtggggaggggtttgggtgttgtttgaggagttaacgttttaagtcgatatgggaatttcgtaggtagaagttttaggt

SEQ ID NO: 17666 - DNA, 944 bp, Artificial Sequence
  chemically treated genomic DNA (Homo sapiens) CpG-island No: 17666
acctaaaacttctacctacgaaattcccatatcgacttaaaacgttaactcctcaaacaacacccaaacccctccccaccccgaccttccttccccgccgcgatactaacccttcttaccgcaatacacaaactaacccgtataaataccctcgacgacaataaacaactccgtccgcttcttaaaccgatacgaatcccgaaaaaccaccttaacgaaaaacgcgccgcgacccgaatcgtaaataatatcctataaacaaaaacgacgtaaatacgacgttccgaccgaacgtcccttcccctcccgccccgaccaacgttccgcaccttaacgatacccttaatataaccgtaccgctcaacgaaatccacgacgcgcaaacgcgcaacgcctttacgatacttcacgtacgcgcgaaacacaaacccgacgcccttcctctatccacgaatcacacgacccataacgacgaatcctaaaaacgactcacaattaacgcgaccgaacgacccgaatacccccgccaacccgactttccgaaaccccgcccccgaaaccgccgcgcccaccactccctaccctctccgcgaacgcccgcaccgacatcctctcaaaaaaaccgatccgaatctcaacgcgcctcacgaaaaaaaataacgacgaatactacccataccgcaaaaccgcaaaaataacctacctattcaccaacgcgaccgaaaaaaaaaacacgacgtcaacgaacgaccttatcttccgaaacgaaacccaaaaccgcgacaccttccgaacgcgccacgaccaacctaacgcgatacacgccgaaacttataatcaccaacgaccgccgaccccgcctacttctcctcctccaaaacccccgcgcaaacgcaccaaaaaacgcgactaaaaatatcctaatatacgtaaactcgaaaaaa

SEQ ID NO: 17667 - DNA, 944 bp, Artificial Sequence
  chemically treated genomic DNA (Homo sapiens) CpG-island No: 17667
atttgaagtttttgtttgcgaggtttttatatcggtttaggacgttaattttttaggtaatatttagatttttttttatttcgatttttttttttcgtcgcgatgttaattttttttgtcgtaatatataaattggttcgtgtgaatgttttcggcggtaatgaatagtttcgttcgttttttaaatcgatacggatttcggaagattattttggcgaggggcgcgtcgcggttcgggtcgtggatgatgttttgtgggtagaggcggcgtgagtgcggcgtttcggtcgggcgtttttttttttttcgtttcggttagcgtttcgtattttgacgatgtttttgatgtagtcgtgtcgtttagcgaaatttacggcgcgtaggcgcgtagcgtttttacggtgttttacgtgcgcgcggaatatagattcggcgttttttttttgtttacggattatacggtttatggcgacgggttttgggggcgatttataattagcgcggtcgggcggttcgggtattttcgttagttcggtttttcgggatttcgttttcgaggtcgtcgcgtttattattttttatttttttcgcgggcgttcgtatcggtatttttttaggagggtcggttcgggttttagcgcgttttacggaagaggatggcggcggatattgtttatgtcgtaaggtcgtaaggatgatttatttgtttattagcgcggtcgaaagaggaaatacggcgttagcgagcggttttatttttcggggcggggtttagggtcgcgatatttttcgggcgcgttacggttagtttagcgcggtgtacgtcggggtttgtagttattagcggtcgtcggtttcgtttatttttttttttttagggttttcgcgtaggcgtattaggagacgcggttgaaggtgttttggtgtgcgtgggttcggaagga

SEQ ID NO: 17668 - DNA, 944 bp, Artificial Sequence
  chemically treated genomic DNA (Homo sapiens) CpG-island No: 17668
tccttccgaacccacgcacaccaaaacaccttcaaccgcgtctcctaatacgcctacgcgaaaaccctaaaaaaaaaaaaataaacgaaaccgacgaccgctaataactacaaaccccgacgtacaccgcgctaaactaaccgtaacgcgcccgaaaaatatcgcgaccctaaaccccgccccgaaaaataaaaccgctcgctaacgccgtatttcctctttcgaccgcgctaataaacaaataaatcatccttacgaccttacgacataaacaatatccgccgccatcctcttccgtaaaacgcgctaaaacccgaaccgaccctcctaaaaaaataccgatacgaacgcccgcgaaaaaaataaaaaataataaacgcgacgacctcgaaaacgaaatcccgaaaaaccgaactaacgaaaatacccgaaccgcccgaccgcgctaattataaatcgcccccaaaacccgtcgccataaaccgtataatccgtaaacaaaaaaaaaacgccgaatctatattccgcgcgcacgtaaaacaccgtaaaaacgctacgcgcctacgcgccgtaaatttcgctaaacgacacgactacatcaaaaacatcgtcaaaatacgaaacgctaaccgaaacgaaaaaaaaaaaaacgcccgaccgaaacgccgcactcacgccgcctctacccacaaaacatcatccacgacccgaaccgcgacgcgcccctcgccaaaataatcttccgaaatccgtatcgatttaaaaaacgaacgaaactattcattaccgccgaaaacattcacacgaaccaatttatatattacgacaaaaaaaattaacatcgcgacgaaaaaaaaaaatcgaaataaaaaaaaatctaaatattacctaaaaaattaacgtcctaaaccgatataaaaacctcgcaaacaaaaacttcaaat

SEQ ID NO: 17669 - DNA, 750 bp, Artificial Sequence
  chemically treated genomic DNA (Homo sapiens) CpG-island No: 17669
gcgggaaggtttttcggtagagtacgtagttgggtgtttattatcgcgtttatattcgcgagcggttttacgtatgcggcgagtgcggtaaggtttttagtcgtagttttcggttgttgtagtattagaagttttatatcggggagaagtttttcgcgtgtatagagtgcggtaaggcgttttgtcgtaggtttatttttaacgagtacggtcgtatttatagcggggagcggttttatcggtgtttgcggtgtgggtagcgttttattcgagggttttcgtttttgaagtattatcggttgtacgcgtaggagggtgtttaggacggcggcgcggggtagggcgttttgttcggagttgcgtagaggttttaggcgggggattcgttttacgagtgttcggtgtgcgggaggtcgtttcgatataattttttgttgttgttgtatttgcgtttatatacgggcgagaagtcgttcgagtgcgcggagtgcggtaaggttttcggtcgtaagtttaattttattttgtattagaagatttatattaaggagaagtttttcgcgtgtatcgagtgcggtaaggcgtttcgtaggagttatacgttgaacgagtattatcggttttatagcggcgagaggttatatcggtgtcgcgtttgcgggagggtttgtagtcggttgtttatttttatttagtattagaaggtgtacggtcgcgagttcggggaggatatagagggtaggcgggcgt

SEQ ID NO: 17670 - DNA, 750 bp, Artificial Sequence
  chemically treated genomic DNA (Homo sapiens) CpG-island No: 17670
acgcccgcctaccctctatatcctccccgaactcgcgaccgtacaccttctaatactaaataaaaataaacaaccgactacaaaccctcccgcaaacgcgacaccgatataacctctcgccgctataaaaccgataatactcgttcaacgtataactcctacgaaacgccttaccgcactcgatacacgcgaaaaacttctccttaatataaatcttctaatacaaaataaaattaaacttacgaccgaaaaccttaccgcactccgcgcactcgaacgacttctcgcccgtatataaacgcaaatacaacaacaacaaaaaattatatcgaaacgacctcccgcacaccgaacactcgtaaaacgaatcccccgcctaaaacctctacgcaactccgaacaaaacgccctaccccgcgccgccgtcctaaacaccctcctacgcgtacaaccgataatacttcaaaaacgaaaaccctcgaataaaacgctacccacaccgcaaacaccgataaaaccgctccccgctataaatacgaccgtactcgttaaaaataaacctacgacaaaacgccttaccgcactctatacacgcgaaaaacttctccccgatataaaacttctaatactacaacaaccgaaaactacgactaaaaaccttaccgcactcgccgcatacgtaaaaccgctcgcgaatataaacgcgataataaacacccaactacgtactctaccgaaaaaccttcccgc

SEQ ID NO: 17671 - DNA, 750 bp, Artificial Sequence
  chemically treated genomic DNA (Homo sapiens) CpG-island No: 17671
gcgttcgtttgttttttgtgtttttttcgggttcgcggtcgtgtattttttggtgttggatgagggtggatagtcggttgtaggttttttcgtaggcgcggtatcggtatggtttttcgtcgttgtggagtcggtagtgttcgtttagcgtgtagtttttgcggaacgttttgtcgtattcggtgtacgcgaagggtttttttttggtgtggattttttggtgtagagtgaggttggatttgcgatcgaaggttttgtcgtatttcgcgtattcgaacggtttttcgttcgtgtgtaggcgtaggtgtagtagtagtagggagttgtgtcggaacggtttttcgtatatcgggtattcgtggggcgggtttttcgtttggggtttttgcgtagtttcgagtagggcgttttgtttcgcgtcgtcgttttgggtatttttttgcgcgtgtagtcggtggtgttttaggagcgaggattttcggatgaagcgttgtttatatcgtaggtatcggtagggtcgtttttcgttgtggatgcggtcgtgttcgttgagggtgaatttgcggtagaacgttttgtcgtattttgtgtacgcgaagggttttttttcggtgtggaatttttggtgttgtagtagtcgggagttgcggttgaaggttttgtcgtattcgtcgtatgcgtagggtcgttcgcgggtgtggacgcggtggtgggtatttagttgcgtgttttgtcggaaggttttttcgt

SEQ ID NO: 17672 - DNA, 750 bp, Artificial Sequence
  chemically treated genomic DNA (Homo sapiens) CpG-island No: 17672
acgaaaaaaccttccgacaaaacacgcaactaaatacccaccaccgcgtccacacccgcgaacgaccctacgcatacgacgaatacgacaaaaccttcaaccgcaactcccgactactacaacaccaaaaattccacaccgaaaaaaaacccttcgcgtacacaaaatacgacaaaacgttctaccgcaaattcaccctcaacgaacacgaccgcatccacaacgaaaaacgaccctaccgatacctacgatataaacaacgcttcatccgaaaatcctcgctcctaaaacaccaccgactacacgcgcaaaaaaatacccaaaacgacgacgcgaaacaaaacgccctactcgaaactacgcaaaaaccccaaacgaaaaacccgccccacgaatacccgatatacgaaaaaccgttccgacacaactccctactactactacacctacgcctacacacgaacgaaaaaccgttcgaatacgcgaaatacgacaaaaccttcgatcgcaaatccaacctcactctacaccaaaaaatccacaccaaaaaaaaacccttcgcgtacaccgaatacgacaaaacgttccgcaaaaactacacgctaaacgaacactaccgactccacaacgacgaaaaaccataccgataccgcgcctacgaaaaaacctacaaccgactatccaccctcatccaacaccaaaaaatacacgaccgcgaacccgaaaaaaacacaaaaaacaaacgaacgc

SEQ ID NO: 17673 - DNA, 784 bp, Artificial Sequence
  chemically treated genomic DNA (Homo sapiens) CpG-island No: 17673
ttcgtcggcgcgtattcgggtttcgcgcggtttcggttttttaagttttcgcgtttttcgttcggtcgggtttcgtatatttacgttttttttttttacggtttagttatagtttttttcgtcgttgtagtcgtcgcgggtttggattttttgcgttgtcgggtttggagttttcgtcgaggttgggttaggattacggggatcgtagcgtcggttttttcgttatttttttggttcgcgtcgtttatcgttcgttgttcgcgtttttatcggtcggttgcgcgcgggtcgcgtcgttatagttttttatttcggttcgcgcgacgcgcgtgagttagtcgtcgtttttcggtttttttgttgtttcgtcgttgttgtcgcggtagttcgtgttgtcggcgtttttcgtcgtcgtcgtcggtttagtgcgcggcggtcgcgcgttttttcgttattaagcgtaatttttcgttttcggtttcgttttcgcggcggttattattcgtcgttagggggtattgtttcgcgaggtcgtattacgtatgcgttggcgcgcggtatgtcgggagtcggagtttcgcggagggcgcgcgcggtatgttgggagtcgtttggtttcgtttcgtcgtcgcgttagaggtttttcgcgcggatttattttgtgagttagcggtgttttttcgtttttttcggtgtagagtagttattatttgatacgtttcggtgtggtttggtgtaattttgtttttttaaattacgttgggtttttcgagtttgagatttt

SEQ ID NO: 17674 - DNA, 784 bp, Artificial Sequence
  chemically treated genomic DNA (Homo sapiens) CpG-island No: 17674
aaaatctcaaactcgaaaaacccaacgtaatttaaaaaaacaaaattacaccaaaccacaccgaaacgtatcaaataataactactctacaccgaaaaaaacgaaaaaacaccgctaactcacaaaataaatccgcgcgaaaaacctctaacgcgacgacgaaacgaaaccaaacgactcccaacataccgcgcgcgccctccgcgaaactccgactcccgacataccgcgcgccaacgcatacgtaatacgacctcgcgaaacaataccccctaacgacgaataataaccgccgcgaaaacgaaaccgaaaacgaaaaattacgcttaataacgaaaaaacgcgcgaccgccgcgcactaaaccgacgacgacgacgaaaaacgccgacaacacgaactaccgcgacaacaacgacgaaacaacaaaaaaaccgaaaaacgacgactaactcacgcgcgtcgcgcgaaccgaaataaaaaactataacgacgcgacccgcgcgcaaccgaccgataaaaacgcgaacaacgaacgataaacgacgcgaaccaaaaaaataacgaaaaaaccgacgctacgatccccgtaatcctaacccaacctcgacgaaaactccaaacccgacaacgcaaaaaatccaaacccgcgacgactacaacgacgaaaaaaactataactaaaccgtaaaaaaaaaaaacgtaaatatacgaaacccgaccgaacgaaaaacgcgaaaacttaaaaaaccgaaaccgcgcgaaacccgaatacgcgccgacgaa

SEQ ID NO: 17675 - DNA, 784 bp, Artificial Sequence
  chemically treated genomic DNA (Homo sapiens) CpG-island No: 17675
gaaattttagattcgggaagtttaacgtggtttgagagggtaaaattatattaaattatatcgagacgtgttagatggtaattgttttgtatcgaaagagacgggaagatatcgttaatttatagggtaggttcgcgcgggaggtttttggcgcggcgacggggcggggttaggcggtttttagtatgtcgcgcgcgtttttcgcgggatttcggttttcggtatgtcgcgcgttagcgtatgcgtgatgcggtttcgcgaggtagtgttttttggcggcgggtagtgatcgtcgcgggggcggagtcggaggcggggggttgcgtttggtgacgggaggacgcgcggtcgtcgcgtattgggtcggcggcggcggcggaggacgtcgatagtacgggttgtcgcggtagtagcggcggagtagtagagaggtcggggagcggcggttggtttacgcgcgtcgcgcgggtcgggatgagggattgtggcggcgcggttcgcgcgtagtcggtcggtgagagcgcgggtaacgggcggtgggcggcgcgggttaggaagatggcggaggggtcggcgttgcggttttcgtggttttggtttagtttcggcggaggttttaggttcggtagcgtaaggaatttaggttcgcggcgattgtagcggcgggaggggttgtgattgggtcgtggagggagggggcgtgggtgtgcggggttcggtcgggcggggggcgcggaggtttgaggggtcgaggtcgcgcggggttcgggtgcgcgtcgacggg

SEQ ID NO: 17676 - DNA, 784 bp, Artificial Sequence
  chemically treated genomic DNA (Homo sapiens) CpG-island No: 17676
cccgtcgacgcgcacccgaaccccgcgcgacctcgacccctcaaacctccgcgccccccgcccgaccgaaccccgcacacccacgccccctccctccacgacccaatcacaacccctcccgccgctacaatcgccgcgaacctaaattccttacgctaccgaacctaaaacctccgccgaaactaaaccaaaaccacgaaaaccgcaacgccgacccctccgccatcttcctaacccgcgccgcccaccgcccgttacccgcgctctcaccgaccgactacgcgcgaaccgcgccgccacaatccctcatcccgacccgcgcgacgcgcgtaaaccaaccgccgctccccgacctctctactactccgccgctactaccgcgacaacccgtactatcgacgtcctccgccgccgccgccgacccaatacgcgacgaccgcgcgtcctcccgtcaccaaacgcaaccccccgcctccgactccgcccccgcgacgatcactacccgccgccaaaaaacactacctcgcgaaaccgcatcacgcatacgctaacgcgcgacataccgaaaaccgaaatcccgcgaaaaacgcgcgcgacatactaaaaaccgcctaaccccgccccgtcgccgcgccaaaaacctcccgcgcgaacctaccctataaattaacgatatcttcccgtctctttcgatacaaaacaattaccatctaacacgtctcgatataatttaatataattttaccctctcaaaccacgttaaacttcccgaatctaaaatttc

SEQ ID NO: 17677 - DNA, 624 bp, Artificial Sequence
  chemically treated genomic DNA (Homo sapiens) CpG-island No: 17677
tacgcgttaacgtttttatttcggttttttcggttttttttcgggttaggtcgggtttggtttttttattcgggtagttcggggttcggtattcggttttcgtttgggtttgcgtttatttggttcgttttgtagaattgtttttttagtttcgttatcgatatgttgtcgttcgtcgtcgagtttttcgttcggatcgcgttagcgataggttttcgggcgtcgtcgattttttgcgcgttttagtagttttcgtcggcgtcgttttcgttattcgtttgttagtttcgcgttcgtttcggcgtcgttttagtcgttcgcgcgttcgcgcggttaggatattatatggtaatcgtacgttttcggtgtcggttttcgcgcgcgttttcggttttcgcgcgcgttttcggtttcgtttgcgtacgcgcgttttttgtcggttgaagagcgtacgtgtatattgtttatcgcgggagaggtcgtttttgttagtgagttgagcggggcgagtttagaggggtcgtagtagttgtagcgttttttggagtcgtggaggtgattttaacgttttggaaaacgcgtttagtttaaatttggttagggaggttgggaagtagaaggggt

SEQ ID NO: 17678 - DNA, 624 bp, Artificial Sequence
  chemically treated genomic DNA (Homo sapiens) CpG-island No: 17678
accccttctacttcccaacctccctaaccaaatttaaactaaacgcgttttccaaaacgttaaaatcacctccacgactccaaaaaacgctacaactactacgacccctctaaactcgccccgctcaactcactaacaaaaacgacctctcccgcgataaacaatatacacgtacgctcttcaaccgacaaaaaacgcgcgtacgcaaacgaaaccgaaaacgcgcgcgaaaaccgaaaacgcgcgcgaaaaccgacaccgaaaacgtacgattaccatataatatcctaaccgcgcgaacgcgcgaacgactaaaacgacgccgaaacgaacgcgaaactaacaaacgaataacgaaaacgacgccgacgaaaactactaaaacgcgcaaaaaatcgacgacgcccgaaaacctatcgctaacgcgatccgaacgaaaaactcgacgacgaacgacaacatatcgataacgaaactaaaaaaacaattctacaaaacgaaccaaataaacgcaaacccaaacgaaaaccgaataccgaaccccgaactacccgaataaaaaaaccaaacccgacctaacccgaaaaaaaaccgaaaaaaccgaaataaaaacgttaacgcgta

SEQ ID NO: 17679 - DNA, 624 bp, Artificial Sequence
  chemically treated genomic DNA (Homo sapiens) CpG-island No: 17679
gttttttttattttttaatttttttggttaggtttaaattaagcgcgttttttaagacgttagggttatttttacgattttagggggcgttgtaattgttacggtttttttaggttcgtttcgtttaatttattgatagaggcggtttttttcgcggtagataatgtgtacgtgcgttttttagtcggtagagggcgcgcgtgcgtagacggggtcgggggcgcgcgcgggggtcgggggcgcgcgcgggggtcggtatcggaagcgtgcggttgttatgtaatattttggtcgcgcgggcgcgcgagcggttgaggcggcgtcggggcgggcgcggagttggtaagcgggtggcggaggcggcgtcgacggggattgttgaggcgcgtagagggtcggcggcgttcgggagtttgtcgttggcgcggttcgggcgggaggttcggcggcgggcggtagtatgtcggtggcggggttgaagaagtagttttataaggcgagttaggtgagcgtaggtttaggcgggagtcgagtatcgggtttcgggttgttcggatgagggagttaggttcgatttggttcgggagggggtcggggggatcgaggtggggacgttggcgcgtg

SEQ ID NO: 17680 - DNA, 624 bp, Artificial Sequence
  chemically treated genomic DNA (Homo sapiens) CpG-island No: 17680
cacgcgccaacgtccccacctcgatccccccgaccccctcccgaaccaaatcgaacctaactccctcatccgaacaacccgaaacccgatactcgactcccgcctaaacctacgctcacctaactcgccttataaaactacttcttcaaccccgccaccgacatactaccgcccgccgccgaacctcccgcccgaaccgcgccaacgacaaactcccgaacgccgccgaccctctacgcgcctcaacaatccccgtcgacgccgcctccgccacccgcttaccaactccgcgcccgccccgacgccgcctcaaccgctcgcgcgcccgcgcgaccaaaatattacataacaaccgcacgcttccgataccgacccccgcgcgcgcccccgacccccgcgcgcgcccccgaccccgtctacgcacgcgcgccctctaccgactaaaaaacgcacgtacacattatctaccgcgaaaaaaaccgcctctatcaataaattaaacgaaacgaacctaaaaaaaccgtaacaattacaacgccccctaaaatcgtaaaaataaccctaacgtcttaaaaaacgcgcttaatttaaacctaaccaaaaaaattaaaaaataaaaaaaac

SEQ ID NO: 17681 - DNA, 645 bp, Artificial Sequence
  chemically treated genomic DNA (Homo sapiens) CpG-island No: 17681
ttatcgagtgggcggttattcgggtgttttagagtagatcgagagtaggtgcgtagatttttgtggacggttattttcggtgcgtttttaataggttttcgttcggggttatcggtcgtagtgtttttttcggttttagggaagcgcggattcgtttttgttgttcgttcggcgttgttttagtatatttttgatcgtcggaggagtttttagaagtggtagtgggcgtaatggtggcggcgtgtggcggggtcgtgtttagaagcgttcgtagtttcggagcggtgggggagggtcgttgtatttcgcgttcgagtttgggcgttcgtattgtcgcgtggtcggcgaattgcgttcgagggggtggttaagataaaagcgtggggaggggttaagttttcgttgttttagttaggcgtttttttgtttcgttgatcgtttttttacggcgggaacgagaggcgtttatcggggatgtcgttaatgagttcgcggggcgacgtcgagagtggtttgtgaggggttttcgtcggagtttttggcgcgcgttttttttagtgttttttattttatttttggtcgagtgtttcgagagggtagagggcgagaaattttttgttttaaatattttttaaatgggtcgga

SEQ ID NO: 17682 - DNA, 645 bp, Artificial Sequence
  chemically treated genomic DNA (Homo sapiens) CpG-island No: 17682
tccgacccatttaaaaaatatttaaaacaaaaaatttctcgccctctaccctctcgaaacactcgaccaaaaataaaataaaaaacactaaaaaaaacgcgcgccaaaaactccgacgaaaacccctcacaaaccactctcgacgtcgccccgcgaactcattaacgacatccccgataaacgcctctcgttcccgccgtaaaaaaacgatcaacgaaacaaaaaaacgcctaactaaaacaacgaaaacttaacccctccccacgcttttatcttaaccaccccctcgaacgcaattcgccgaccacgcgacaatacgaacgcccaaactcgaacgcgaaatacaacgaccctcccccaccgctccgaaactacgaacgcttctaaacacgaccccgccacacgccgccaccattacgcccactaccacttctaaaaactcctccgacgatcaaaaatatactaaaacaacgccgaacgaacaacaaaaacgaatccgcgcttccctaaaaccgaaaaaaacactacgaccgataaccccgaacgaaaacctattaaaaacgcaccgaaaataaccgtccacaaaaatctacgcacctactctcgatctactctaaaacacccgaataaccgcccactcgataa

SEQ ID NO: 17683 - DNA, 645 bp, Artificial Sequence
  chemically treated genomic DNA (Homo sapiens) CpG-island No: 17683
ttcgatttatttaggggatgtttgaggtaaaggatttttcgttttttattttttcgaggtattcggttagaaatgaggtggaaagtattggaagaggcgcgcgttaggggtttcggcggggattttttataagttattttcggcgtcgtttcgcggatttattagcgatattttcggtgggcgtttttcgttttcgtcgtaaaggaacgattagcgaggtaaggaaacgtttggttggggtagcggggatttggtttttttttacgtttttgttttaattattttttcgggcgtaattcgtcggttacgcggtaatgcggacgtttagattcgggcgcggggtgtagcggtttttttttatcgtttcgggattgcgagcgtttttgggtacggtttcgttatacgtcgttattattgcgtttattgttatttttaggggttttttcgacggttagggatgtgttgaggtaacgtcgggcgggtagtaggggcgagttcgcgtttttttggagtcgaaaggagtattgcggtcggtgatttcgggcggaaatttgttgggagcgtatcggaagtagtcgtttatagaggtttgcgtatttgttttcggtttgttttgagatattcggatgatcgtttattcggtgg

SEQ ID NO: 17684 - DNA, 645 bp, Artificial Sequence
  chemically treated genomic DNA (Homo sapiens) CpG-island No: 17684
ccaccgaataaacgatcatccgaatatctcaaaacaaaccgaaaacaaatacgcaaacctctataaacgactacttccgatacgctcccaacaaatttccgcccgaaatcaccgaccgcaatactcctttcgactccaaaaaaacgcgaactcgcccctactacccgcccgacgttacctcaacacatccctaaccgtcgaaaaaacccctaaaaataacaataaacgcaataataacgacgtataacgaaaccgtacccaaaaacgctcgcaatcccgaaacgataaaaaaaaaccgctacaccccgcgcccgaatctaaacgtccgcattaccgcgtaaccgacgaattacgcccgaaaaaataattaaaacaaaaacgtaaaaaaaaaccaaatccccgctaccccaaccaaacgtttccttacctcgctaatcgttcctttacgacgaaaacgaaaaacgcccaccgaaaatatcgctaataaatccgcgaaacgacgccgaaaataacttataaaaaatccccgccgaaacccctaacgcgcgcctcttccaatactttccacctcatttctaaccgaatacctcgaaaaaataaaaaacgaaaaatcctttacctcaaacatcccctaaataaatcgaa

SEQ ID NO: 17685 - DNA, 1158 bp, Artificial Sequence
  chemically treated genomic DNA (Homo sapiens) CpG-island No: 17685
acggggtcgtcgggataggggttgtcgtagtgtgtagtgagtgtttcgtgaacggggtcgcggggataggggttgtcgtagtgtgtagtgggtgtttcgtgaacggggtcgtcgggataggggatgtcgtagtgtgtagtgggtgtttcgtgaacggggtcgtcgggataggggttgtcgtagtgtgtagtgggtgtttcgtgaacggggtcgtcgggataggggttgtcgtagtgtgtagtgagtgtttcgtgaacggggtcgcggggataggggttgtcgtagtgtgtagtgagtgtttcgtgaatcgggtcgtcgggataggggatgtcgtaatgtgtagtgggtgtttcgtgaacggggtcgtcgggataggggttgtcgtagtgtgtagtgagtgttttttgaacggggtcgtcgggataggggttgtcgtagtgtgtagtgagtgtttcgtgaacggggtcgcggggataggggttgtcgtagtgtgtagtgagtgattcgtgaatcgggtcgtcgggataggggatgtcgtagtgtgtagtgggtgtttcgtgaatcgggtcgtcgggataggggttgtcgtagtgtgtagtgagtgtttagtgaacggggtcgtcgggataggggttgtcgtagtgtgtagtgggtgtttcgtgaacggggtcgtcgggataggggttgtcgtagtgtgtagtgagtgtttcgtgaacggggtcgtcgggataggggttgtcgtagtgtgtagtgagtgtttcgtgaacggggtcgcggggataggggttgtcgtagtgtgtagtgggtgtttcgtgaatcgggtcgtcgggataggggttgtcgtagtgtgtagtgggtgtttcgtgaacggggtcgtcgggataggggttgtcgtagtgtgtagtgagtgtttcgtgaatcgggtcgtcgggataggggttgtcgtagtgtgtagtgagtgtttcgtgaatcgggtcgtcgggataggggttgtcgtagtgtgtagtgagtgtttcgtgaatcgggtcgtcgggacgggggatgttgcggttttgttgttcgtgtagtcgtgtcggtgtagatgtgcgggttagaggtagttttgttatataggcgagtttttattggtttttagaaggagattggggtgtgattgat

SEQ ID NO: 17686 - DNA, 1158 bp, Artificial Sequence
  chemically treated genomic DNA (Homo sapiens) CpG-island No: 17686
atcaatcacaccccaatctccttctaaaaaccaataaaaactcgcctatataacaaaactacctctaacccgcacatctacaccgacacgactacacgaacaacaaaaccgcaacatcccccgtcccgacgacccgattcacgaaacactcactacacactacgacaacccctatcccgacgacccgattcacgaaacactcactacacactacgacaacccctatcccgacgacccgattcacgaaacactcactacacactacgacaacccctatcccgacgaccccgttcacgaaacacccactacacactacgacaacccctatcccgacgacccgattcacgaaacacccactacacactacgacaacccctatccccgcgaccccgttcacgaaacactcactacacactacgacaacccctatcccgacgaccccgttcacgaaacactcactacacactacgacaacccctatcccgacgaccccgttcacgaaacacccactacacactacgacaacccctatcccgacgaccccgttcactaaacactcactacacactacgacaacccctatcccgacgacccgattcacgaaacacccactacacactacgacatcccctatcccgacgacccgattcacgaatcactcactacacactacgacaacccctatccccgcgaccccgttcacgaaacactcactacacactacgacaacccctatcccgacgaccccgttcaaaaaacactcactacacactacgacaacccctatcccgacgaccccgttcacgaaacacccactacacattacgacatcccctatcccgacgacccgattcacgaaacactcactacacactacgacaacccctatccccgcgaccccgttcacgaaacactcactacacactacgacaacccctatcccgacgaccccgttcacgaaacacccactacacactacgacaacccctatcccgacgaccccgttcacgaaacacccactacacactacgacatcccctatcccgacgaccccgttcacgaaacacccactacacactacgacaacccctatccccgcgaccccgttcacgaaacactcactacacactacgacaacccctatcccgacgaccccgt

SEQ ID NO: 17687 - DNA, 1158 bp, Artificial Sequence
  chemically treated genomic DNA (Homo sapiens) CpG-island No: 17687
attaattatattttaatttttttttgaagattagtgaagattcgtttgtgtggtaaggttgtttttaattcgtatatttgtatcgatacggttgtacgaatagtaaaatcgtagtatttttcgtttcggcggttcggtttacggagtatttattgtatattgcggtagtttttgtttcggcggttcggtttacggagtatttattgtatattgcggtagtttttgtttcggcggttcggtttacggagtatttattgtatattgcggtagtttttgtttcggcggtttcgtttacggagtatttattgtatattgcggtagtttttgtttcggcggttcggtttacggagtatttattgtatattgcggtagtttttgttttcgcggtttcgtttacggagtatttattgtatattgcggtagtttttgtttcggcggtttcgtttacggagtatttattgtatattgcggtagtttttgtttcggcggtttcgtttacggagtatttattgtatattgcggtagtttttgtttcggcggtttcgtttattgagtatttattgtatattgcggtagtttttgtttcggcggttcggtttacggagtatttattgtatattgcggtattttttgtttcggcggttcggtttacggattatttattgtatattgcggtagtttttgttttcgcggtttcgtttacggagtatttattgtatattgcggtagtttttgtttcggcggtttcgtttaaggagtatttattgtatattgcggtagtttttgtttcggcggtttcgtttacggagtatttattgtatattgcggtattttttgtttcggcggttcggtttacggagtatttattgtatattgcggtagtttttgttttcgcggtttcgtttacggagtatttattgtatattgcggtagtttttgtttcggcggtttcgtttacggagtatttattgtatattgcggtagtttttgtttcggcggtttcgtttacggagtatttattgtatattgcggtattttttgtttcggcggtttcgtttacggagtatttattgtatattgcggtagtttttgttttcgcggtttcgtttacggagtatttattgtatattgcggtagtttttgtttcggcggtttcgt

SEQ ID NO: 17688 - DNA, 1158 bp, Artificial Sequence
  chemically treated genomic DNA (Homo sapiens) CpG-island No: 17688
acgaaaccgccgaaacaaaaactaccgcaatatacaataaatactccgtaaacgaaaccgcgaaaacaaaaactaccgcaatatacaataaatactccgtaaacgaaaccgccgaaacaaaaaataccgcaatatacaataaatactccgtaaacgaaaccgccgaaacaaaaactaccgcaatatacaataaatactccgtaaacgaaaccgccgaaacaaaaactaccgcaatatacaataaatactccgtaaacgaaaccgcgaaaacaaaaactaccgcaatatacaataaatactccgtaaaccgaaccgccgaaacaaaaaataccgcaatatacaataaatactccgtaaacgaaaccgccgaaacaaaaactaccgcaatatacaataaatactccttaaacgaaaccgccgaaacaaaaactaccgcaatatacaataaatactccgtaaacgaaaccgcgaaaacaaaaactaccgcaatatacaataaataatccgtaaaccgaaccgccgaaacaaaaaataccgcaatatacaataaatactccgtaaaccgaaccgccgaaacaaaaactaccgcaatatacaataaatactcaataaacgaaaccgccgaaacaaaaactaccgcaatatacaataaatactccgtaaacgaaaccgccgaaacaaaaactaccgcaatatacaataaatactccgtaaacgaaaccgccgaaacaaaaactaccgcaatatacaataaatactccgtaaacgaaaccgcgaaaacaaaaactaccgcaatatacaataaatactccgtaaaccgaaccgccgaaacaaaaactaccgcaatatacaataaatactccgtaaacgaaaccgccgaaacaaaaactaccgcaatatacaataaatactccgtaaaccgaaccgccgaaacaaaaactaccgcaatatacaataaatactccgtaaaccgaaccgccgaaacaaaaactaccgcaatatacaataaatactccgtaaaccgaaccgccgaaacgaaaaatactacgattttactattcgtacaaccgtatcgatacaaatatacgaattaaaaacaaccttaccacacaaacgaatcttcactaatcttcaaaaaaaaattaaaatataattaat

SEQ ID NO: 17689 - DNA, 952 bp, Artificial Sequence
  chemically treated genomic DNA (Homo sapiens) CpG-island No: 17689
gttgcggcggtcgttttcggggaagggggtgggttcggggaagggtttgttatttttttttagttaaaagtaagggggaaaagagtaaacgcgcgattttagcgcgcggttatttacgtttggtgtttgttttttttagttatcggagattagagtcgttttttttgttcgagaaaggggtttagcggcggcggaagcggagggggattatcgtggagagcgcggttttagttcggttattgcggatttttgaaattaagtaagagcgtttttcgcgttatttttttttcgaagcggttcgcgagaaagcgggagcgtttttatggggtttttaggtttcgttttgcgcggggttgtttttcgatagtgtttgggggtttttaaagattttttgcggggagcgatgcgaggacgtgtaggttaacgggtttttttgtcgtttcgggcggtttcgtttaattttatttcgtacgggtcgggcgcggcgcggttgttggcgcgttcggggagcgaggcgttgggtttttggatcgtttcgagcgttcgtaattaggcgggatagagttcgttaagtttcggtgtgtgttgggcgttttggagagtgtagcgtggttttagggatagcgttttcggaattttggttttgaggagtggggtacgcgggggacgggtcgggagatagtgattgttttcggggttgtggttttggggatgtagagcgtgttgggttgggacggagtgggggcggggaattcgggggttgcgttcgggagttgtagcgtttattgtttgaattcggtttaatttttagtttgttcgaaaggttgttgggagcgcgggagcgtcgtgagttttgcgggagtagaggcgttttcggtacgttaggtatgtatttttaagtcgttttgttttttcggggattagggattttttttcgtttttattatttaga

SEQ ID NO: 17690 - DNA, 952 bp, Artificial Sequence
  chemically treated genomic DNA (Homo sapiens) CpG-island No: 17690
tctaaataataaaaacgaaaaaaaatccctaatccccgaaaaaacaaaacgacttaaaaatacatacctaacgtaccgaaaacgcctctactcccgcaaaactcacgacgctcccgcgctcccaacaacctttcgaacaaactaaaaattaaaccgaattcaaacaataaacgctacaactcccgaacgcaacccccgaattccccgcccccactccgtcccaacccaacacgctctacatccccaaaaccacaaccccgaaaacaatcactatctcccgacccgtcccccgcgtaccccactcctcaaaaccaaaattccgaaaacgctatccctaaaaccacgctacactctccaaaacgcccaacacacaccgaaacttaacgaactctatcccgcctaattacgaacgctcgaaacgatccaaaaacccaacgcctcgctccccgaacgcgccaacaaccgcgccgcgcccgacccgtacgaaataaaattaaacgaaaccgcccgaaacgacaaaaaaacccgttaacctacacgtcctcgcatcgctccccgcaaaaaatctttaaaaacccccaaacactatcgaaaaacaaccccgcgcaaaacgaaacctaaaaaccccataaaaacgctcccgctttctcgcgaaccgcttcgaaaaaaaaataacgcgaaaaacgctcttacttaatttcaaaaatccgcaataaccgaactaaaaccgcgctctccacgataatccccctccgcttccgccgccgctaaacccctttctcgaacaaaaaaaacgactctaatctccgataactaaaaaaaacaaacaccaaacgtaaataaccgcgcgctaaaatcgcgcgtttactcttttcccccttacttttaactaaaaaaaaataacaaacccttccccgaacccacccccttccccgaaaacgaccgccgcaac

SEQ ID NO: 17691 - DNA, 952 bp, Artificial Sequence
  chemically treated genomic DNA (Homo sapiens) CpG-island No: 17691
tttaggtgatgaaggcgggagagggtttttggttttcggagaggtagggcgatttgggagtgtatatttggcgtgtcgagagcgtttttgttttcgtaggatttacggcgttttcgcgtttttaatagtttttcgagtaggttgggggttgaatcgggtttaagtagtggacgttatagttttcgggcgtagttttcgggtttttcgtttttatttcgttttagtttagtacgttttatatttttaaaattatagtttcgagggtagttattgtttttcgattcgtttttcgcgtgttttattttttaaagttagaatttcggagacgttgtttttggagttacgttgtattttttaagacgtttagtatatatcgagatttgacgggttttgtttcgtttgattacgggcgttcgggacgatttagggatttagcgtttcgtttttcgggcgcgttagtagtcgcgtcgcgttcggttcgtacgaggtggggttgggcggggtcgttcggggcggtaggaggattcgttagtttgtacgttttcgtatcgtttttcgtaagaagtttttgggaatttttaggtattgtcgagaggtagtttcgcgtaggacgaagtttggagattttatagggacgttttcgttttttcgcgaatcgtttcggggagggggtggcgcgggaagcgtttttatttggttttagggattcgtagtggtcgggttgggatcgcgttttttacggtggttttttttcgttttcgtcgtcgttgagtttttttttcgagtagagggggcggttttggttttcgatggttggagaaagtaagtattaagcgtaggtagtcgcgcgttggagtcgcgcgtttattttttttttttttatttttaattagaggaggatggtaaattttttttcggatttattttttttttcgaaggcggtcgtcgtagt

SEQ ID NO: 17692 - DNA, 952 bp, Artificial Sequence
  chemically treated genomic DNA (Homo sapiens) CpG-island No: 17692
actacgacgaccgccttcgaaaaaaaaaataaatccgaaaaaaaatttaccatcctcctctaattaaaaataaaaaaaaaaaaaataaacgcgcgactccaacgcgcgactacctacgcttaatacttactttctccaaccatcgaaaaccaaaaccgccccctctactcgaaaaaaaaactcaacgacgacgaaaacgaaaaaaaaccaccgtaaaaaacgcgatcccaacccgaccactacgaatccctaaaaccaaataaaaacgcttcccgcgccaccccctccccgaaacgattcgcgaaaaaacgaaaacgtccctataaaatctccaaacttcgtcctacgcgaaactacctctcgacaatacctaaaaattcccaaaaacttcttacgaaaaacgatacgaaaacgtacaaactaacgaatcctcctaccgccccgaacgaccccgcccaaccccacctcgtacgaaccgaacgcgacgcgactactaacgcgcccgaaaaacgaaacgctaaatccctaaatcgtcccgaacgcccgtaatcaaacgaaacaaaacccgtcaaatctcgatatatactaaacgtcttaaaaaatacaacgtaactccaaaaacaacgtctccgaaattctaactttaaaaaataaaacacgcgaaaaacgaatcgaaaaacaataactaccctcgaaactataattttaaaaatataaaacgtactaaactaaaacgaaataaaaacgaaaaacccgaaaactacgcccgaaaactataacgtccactacttaaacccgattcaacccccaacctactcgaaaaactattaaaaacgcgaaaacgccgtaaatcctacgaaaacaaaaacgctctcgacacgccaaatatacactcccaaatcgccctacctctccgaaaaccaaaaaccctctcccgccttcatcacctaaa

SEQ ID NO: 17693 - DNA, 838 bp, Artificial Sequence
  chemically treated genomic DNA (Homo sapiens) CpG-island No: 17693
tcgaagaggtcgtttttattagatttcgggatttttttagggtagtttttcgttttttatttcgtaggaaggttttttttttaattatttcgcggcgtagtaagtttggtttcgtcgtatcgttcgcgttggattttgtttttttatcggtcgtttggttatcggcgtaggacgtattcgttgttcgtttggtcgttttttttggattttgtgttttaagaaagcgttattttttgtcgacggcggtacgttcggttttagtatagcgtaggcgtttaatatatagtatttagttacgaggttcggagttagagggttttgtttgtttatttatagagtttttattcgcggattaaagtcgtatttcgcgatcgtagttcggagattttcgggagcggcgcggtgcgtttcgttttcgttaggttttcggttgtcggtttcgcgtcgggtttcgtattcgggggcggtgttcgagcgtcggcgtatgcgtagatcgggggcgcgaggttttacggagttcgtagtttttcggacgggtcgttttcggtttcgcggtttcgtttttttatattataatttttacggggtagcgggcgcggttttttttatttattagttggtcgggtagggtagttatttcgcggtcgggttcgtcggttgcgggtattcgcgcgacgggcgggaagatggcggacgtggtcgtgggtaaagataagggcggggagtagcggtttatttcgttgtttttatttcgtattcgggttattatgaagagttttttcgaggtgtttagtattaattaggaggcgttggtgtttacggttaaggttacggtgag

SEQ ID NO: 17694 - DNA, 838 bp, Artificial Sequence
  chemically treated genomic DNA (Homo sapiens) CpG-island No: 17694
ctcaccgtaaccttaaccgtaaacaccaacgcctcctaattaatactaaacacctcgaaaaaactcttcataataacccgaatacgaaataaaaacaacgaaataaaccgctactccccgcccttatctttacccacgaccacgtccgccatcttcccgcccgtcgcgcgaatacccgcaaccgacgaacccgaccgcgaaataactaccctacccgaccaactaataaataaaaaaaaccgcgcccgctaccccgtaaaaattataatataaaaaaacgaaaccgcgaaaccgaaaacgacccgtccgaaaaactacgaactccgtaaaacctcgcgcccccgatctacgcatacgccgacgctcgaacaccgcccccgaatacgaaacccgacgcgaaaccgacaaccgaaaacctaacgaaaacgaaacgcaccgcgccgctcccgaaaatctccgaactacgatcgcgaaatacgactttaatccgcgaataaaaactctataaataaacaaacaaaaccctctaactccgaacctcgtaactaaatactatatattaaacgcctacgctatactaaaaccgaacgtaccgccgtcgacaaaaaataacgctttcttaaaacacaaaatccaaaaaaaacgaccaaacgaacaacgaatacgtcctacgccgataaccaaacgaccgataaaaaaacaaaatccaacgcgaacgatacgacgaaaccaaacttactacgccgcgaaataattaaaaaaaaaaccttcctacgaaataaaaaacgaaaaactaccctaaaaaaatcccgaaatctaataaaaacgacctcttcga

SEQ ID NO: 17695 - DNA, 838 bp, Artificial Sequence
  chemically treated genomic DNA (Homo sapiens) CpG-island No: 17695
tttatcgtggttttggtcgtgagtattaacgttttttggttgatgttggatatttcgggggagttttttatgatgattcggatgcgggatagaggtagcgagatgagtcgttgtttttcgtttttgtttttatttacgattacgttcgttattttttcgttcgtcgcgcgggtgttcgtagtcggcgggttcgatcgcgaagtggttgttttgttcggttagttggtgggtagggggagtcgcgttcgttgtttcgtgggagttgtagtgtggggaggcgaggtcgcgaggtcgggagcggttcgttcgggaaattacgagtttcgtgaggtttcgcgttttcgatttgcgtatgcgtcgacgttcggatatcgttttcgagtgcgaggttcggcgcggaatcggtagtcgagagtttggcgggggcggggcgtatcgcgtcgttttcgggagttttcgggttgcggtcgcggaatacgattttgattcgcgggtgagggttttgtgaatgggtaagtaaagttttttgatttcgggtttcgtggttgggtgttgtgtgttaagcgtttgcgttgtattaggatcgggcgtgtcgtcgtcggtaaaaagtgacgtttttttgaagtataaagtttaggggggacgattaagcggatagcggatgcgttttgcgtcggtagttaggcgatcggtggaagagtagagtttagcgcgggcgatgcggcggggttaggtttgttgcgtcgcggggtgattgggagaagagtttttttgcggggtggaggacgaagagttgttttgaggaggtttcggagtttggtgggaacggttttttcgg

SEQ ID NO: 17696 - DNA, 838 bp, Artificial Sequence
  chemically treated genomic DNA (Homo sapiens) CpG-island No: 17696
ccgaaaaaaccgttcccaccaaactccgaaacctcctcaaaacaactcttcgtcctccaccccgcaaaaaaactcttctcccaatcaccccgcgacgcaacaaacctaaccccgccgcatcgcccgcgctaaactctactcttccaccgatcgcctaactaccgacgcaaaacgcatccgctatccgcttaatcgtcccccctaaactttatacttcaaaaaaacgtcactttttaccgacgacgacacgcccgatcctaatacaacgcaaacgcttaacacacaacacccaaccacgaaacccgaaatcaaaaaactttacttacccattcacaaaaccctcacccgcgaatcaaaatcgtattccgcgaccgcaacccgaaaactcccgaaaacgacgcgatacgccccgcccccgccaaactctcgactaccgattccgcgccgaacctcgcactcgaaaacgatatccgaacgtcgacgcatacgcaaatcgaaaacgcgaaacctcacgaaactcgtaatttcccgaacgaaccgctcccgacctcgcgacctcgcctccccacactacaactcccacgaaacaacgaacgcgactccccctacccaccaactaaccgaacaaaacaaccacttcgcgatcgaacccgccgactacgaacacccgcgcgacgaacgaaaaaataacgaacgtaatcgtaaataaaaacaaaaacgaaaaacaacgactcatctcgctacctctatcccgcatccgaatcatcataaaaaactcccccgaaatatccaacatcaaccaaaaaacgttaatactcacgaccaaaaccacgataaa

SEQ ID NO: 17697 - DNA, 503 bp, Artificial Sequence
  chemically treated genomic DNA (Homo sapiens) CpG-island No: 17697
ttcgcgcgtcgtcggttgtttttgtcgggttcgcgcgcgtttcgttgttttcgttttacgtcggcgcgcgtttcggtgttcgcgcgtttttatattttttcgcgcgttttcgtttcgtttatttttcgtcgtttttttacgttatttagttttttcgtttcgtttatcgcgcgtttttttcgttttttgtcgttttttttcgtttcgttcgtttttttttttcgtgcgtattttcgtttcgtttattttattgttttttcgtcgtttttttcgcgtttttattcggtaaattcgtaagttttcgcgtttttttgcgcgtttttcgttttttttatttgtgcgtttacgttttttttcgcgtgcggcgtttagttttcggttttattcgtgggcgtcggcgtttagtggcgttttttttatttgggttttttgggggtttttttattcgcgattttttattttcggtttgttttttttttgttattggattgtttcgtgttttg

SEQ ID NO: 17698 - DNA, 503 bp, Artificial Sequence
  chemically treated genomic DNA (Homo sapiens) CpG-island No: 17698
caaaacacgaaacaatccaataacaaaaaaaaaacaaaccgaaaataaaaaatcgcgaataaaaaaacccccaaaaaacccaaataaaaaaaacgccactaaacgccgacgcccacgaataaaaccgaaaactaaacgccgcacgcgaaaaaaaacgtaaacgcacaaataaaaaaaacgaaaaacgcgcaaaaaaacgcgaaaacttacgaatttaccgaataaaaacgcgaaaaaaacgacgaaaaaacaataaaataaacgaaacgaaaatacgcacgaaaaaaaaaaacgaacgaaacgaaaaaaaacgacaaaaaacgaaaaaaacgcgcgataaacgaaacgaaaaaactaaataacgtaaaaaaacgacgaaaaataaacgaaacgaaaacgcgcgaaaaaatataaaaacgcgcgaacaccgaaacgcgcgccgacgtaaaacgaaaacaacgaaacgcgcgcgaacccgacaaaaacaaccgacgacgcgcgaa

SEQ ID NO: 17699 - DNA, 503 bp, Artificial Sequence
  chemically treated genomic DNA (Homo sapiens) CpG-island No: 17699
taaagtacgaagtagtttagtgataagaaaaaggtaggtcgggagtagggagtcgcgggtgaaagagtttttaaagaatttaaatgagaagagcgttattaggcgtcgacgtttacgggtagggtcggaaattgagcgtcgtacgcgagggaagacgtgagcgtataggtgggagggacgaaaggcgcgtagaggaacgcgggagtttacgggtttgtcgaatggaagcgcgagagaaacggcgggaggatagtggggtgggcggggcgaaggtgcgtacggaaggaaggggcgggcggagcgaaggaaggcgataaagggcgggagaggcgcgcggtaggcgaggcgaagaaattggataacgtgagggagcggcgaggggtgggcggggcgaagacgcgcgagaaagtgtgggggcgcgcgggtatcgaagcgcgcgtcggcgtgggacggggatagcggggcgcgcgcgagttcggtaagagtagtcggcggcgcgcggg

SEQ ID NO: 17700 - DNA, 503 bp, Artificial Sequence
  chemically treated genomic DNA (Homo sapiens) CpG-island No: 17700
cccgcgcgccgccgactactcttaccgaactcgcgcgcgccccgctatccccgtcccacgccgacgcgcgcttcgatacccgcgcgcccccacactttctcgcgcgtcttcgccccgcccacccctcgccgctccctcacgttatccaatttcttcgcctcgcctaccgcgcgcctctcccgccctttatcgccttccttcgctccgcccgccccttccttccgtacgcaccttcgccccgcccaccccactatcctcccgccgtttctctcgcgcttccattcgacaaacccgtaaactcccgcgttcctctacgcgcctttcgtccctcccacctatacgctcacgtcttccctcgcgtacgacgctcaatttccgaccctacccgtaaacgtcgacgcctaataacgctcttctcatttaaattctttaaaaactctttcacccgcgactccctactcccgacctacctttttcttatcactaaactacttcgtacttta

SEQ ID NO: 17701 - DNA, 642 bp, Artificial Sequence
  chemically treated genomic DNA (Homo sapiens) CpG-island No: 17701
ttttttttcgtttttatttttttgtttttttcgcgttttttgtaaaattcgggacggatcgggggtttaggtttggttttcgcgtacgcgtaggagtagcgtcggttcggtcgttagtcggaagcgttagtttagagtttgggaagtggtcgtagaggttgttcggtttcgttgttcgttaggtcgtgggttttcgtttcgggttcggggttatcggttgtgtaagtgtaaagcgggggggttttcggttaggtaattcggatcggttgcggggagggttgcgcggttggtcgtggagtcggcgcgtttcgcggaggggttcgttcggtttttatttgttcgggcggagttcgttatatttgttcgggttcgttgtcgggtcggggtttagcgtgtatttgttcgaggcgtttttgtttttgttggcgttttgtttatatttgtttaaggtcgtgttttatattcgttgaagattcggcggatatttgttcgggattcggtttatatttgttgttcgggtcggttttgttttttcgagttcgcggcgggggttttttttttttttgtgttttcgagttgttttcgtttggttttttttttcgggtcgttcgcggcgttggagtttttcgtttttgggtttgg

SEQ ID NO: 17702 - DNA, 642 bp, Artificial Sequence
  chemically treated genomic DNA (Homo sapiens) CpG-island No: 17702
ccaaacccaaaaacgaaaaactccaacgccgcgaacgacccgaaaaaaaaaaccaaacgaaaacaactcgaaaacacaaaaaaaaaaaaaacccccgccgcgaactcgaaaaaacaaaaccgacccgaacaacaaatataaaccgaatcccgaacaaatatccgccgaatcttcaacgaatataaaacacgaccttaaacaaatataaacaaaacgccaacaaaaacaaaaacgcctcgaacaaatacacgctaaaccccgacccgacaacgaacccgaacaaatataacgaactccgcccgaacaaataaaaaccgaacgaacccctccgcgaaacgcgccgactccacgaccaaccgcgcaaccctccccgcaaccgatccgaattacctaaccgaaaacccccccgctttacacttacacaaccgataaccccgaacccgaaacgaaaacccacgacctaacgaacaacgaaaccgaacaacctctacgaccacttcccaaactctaaactaacgcttccgactaacgaccgaaccgacgctactcctacgcgtacgcgaaaaccaaacctaaacccccgatccgtcccgaattttacaaaaaacgcgaaaaaaacaaaaaaataaaaacgaaaaaaaa

SEQ ID NO: 17703 - DNA, 642 bp, Artificial Sequence
  chemically treated genomic DNA (Homo sapiens) CpG-island No: 17703
ttaggtttaggggcggggggttttagcgtcgcggacggttcgggaggggaagttaggcggagatagttcggaggtatagaggggaaggggattttcgtcgcgagttcgggagagtagagtcggttcgggtagtaggtgtgggtcgggtttcggataggtgttcgtcgagtttttagcgggtgtgggatacggttttggatagatgtaagtagagcgttaataggagtaagggcgtttcgagtaggtgtacgttgaatttcggttcggtagcggattcggataggtgtggcgggtttcgttcggataggtgagggtcgggcgagttttttcgcgggacgcgtcgattttacggttagtcgcgtagtttttttcgtagtcggttcgaattgtttgatcgggagttttttcgttttgtatttatatagtcggtggtttcgggttcggagcgggagtttacgatttggcgggtagcggggtcgagtagtttttgcggttattttttaggttttgggttggcgttttcgattggcggtcgagtcggcgttgtttttgcgcgtgcgcggaggttaggtttgggttttcgattcgtttcgggttttgtaagagacgcgagggaagtaagggggtaggagcgagggagaa

SEQ ID NO: 17704 - DNA, 642 bp, Artificial Sequence
  chemically treated genomic DNA (Homo sapiens) CpG-island No: 17704
ttctccctcgctcctacccccttacttccctcgcgtctcttacaaaacccgaaacgaatcgaaaacccaaacctaacctccgcgcacgcgcaaaaacaacgccgactcgaccgccaatcgaaaacgccaacccaaaacctaaaaaataaccgcaaaaactactcgaccccgctacccgccaaatcgtaaactcccgctccgaacccgaaaccaccgactatataaatacaaaacgaaaaaactcccgatcaaacaattcgaaccgactacgaaaaaaactacgcgactaaccgtaaaatcgacgcgtcccgcgaaaaaactcgcccgaccctcacctatccgaacgaaacccgccacacctatccgaatccgctaccgaaccgaaattcaacgtacacctactcgaaacgcccttactcctattaacgctctacttacatctatccaaaaccgtatcccacacccgctaaaaactcgacgaacacctatccgaaacccgacccacacctactacccgaaccgactctactctcccgaactcgcgacgaaaatccccttcccctctatacctccgaactatctccgcctaacttcccctcccgaaccgtccgcgacgctaaaaccccccgcccctaaacctaa

SEQ ID NO: 17705 - DNA, 591 bp, Artificial Sequence
  chemically treated genomic DNA (Homo sapiens) CpG-island No: 17705
gatcgtcgggtgggagcggtaggcgtaagtcgggcggcggggcgcgcgggttaggcggggtcgggcggcggtagggattgcggaggtgcggcgtgagttggggcgggcggcgttatcggaggcggaggggcggagtcgcgtttatagttgttattcggtcgtcgggtttaggtagaagttattcgttcgcggtcgggtacgtatcgcgcgtagattttttgcgaataatgtttcggtcgggcggttggcggttcggagatcgacggaggggtcgggggagcgtagtttagaggtgagttcgcgacgcgttttttaaattcggtttttttttgtttggcgagcgtggtcgtagaggggagttttggaggggcgttgcgatcgtcgagcgggttattttcggggtgataggcgatcgttcgggaagtgggtagtgtcggggtcgcgtgagtttcgggtggtgttcgaggtgtagggaggcgttcggtcgggaggatcgaggagttggagggtgtttttgatttattcgagaatcgcgttttttaaaacggggaaatttttttacgagttttaggagggaggatcgattgttag

SEQ ID NO: 17706 - DNA, 591 bp, Artificial Sequence
  chemically treated genomic DNA (Homo sapiens) CpG-island No: 17706
ctaacaatcgatcctccctcctaaaactcgtaaaaaaatttccccgttttaaaaaacgcgattctcgaataaatcaaaaacaccctccaactcctcgatcctcccgaccgaacgcctccctacacctcgaacaccacccgaaactcacgcgaccccgacactacccacttcccgaacgatcgcctatcaccccgaaaataacccgctcgacgatcgcaacgcccctccaaaactcccctctacgaccacgctcgccaaacaaaaaaaaaccgaatttaaaaaacgcgtcgcgaactcacctctaaactacgctcccccgacccctccgtcgatctccgaaccgccaaccgcccgaccgaaacattattcgcaaaaaatctacgcgcgatacgtacccgaccgcgaacgaataacttctacctaaacccgacgaccgaataacaactataaacgcgactccgcccctccgcctccgataacgccgcccgccccaactcacgccgcacctccgcaatccctaccgccgcccgaccccgcctaacccgcgcgccccgccgcccgacttacgcctaccgctcccacccgacgatc

SEQ ID NO: 17707 - DNA, 591 bp, Artificial Sequence
  chemically treated genomic DNA (Homo sapiens) CpG-island No: 17707
ttaatagtcggtttttttttttggaattcgtaggaaagttttttcgttttaaagagcgcgattttcgaatgaattaaaaatattttttagtttttcggttttttcggtcgggcgtttttttgtatttcgggtattattcggggtttacgcggtttcggtattgtttatttttcgagcggtcgtttgttatttcgggggtagttcgttcggcgatcgtagcgtttttttaaagtttttttttgcgattacgttcgttagataaaaagaggtcgaatttggagagcgcgtcgcgggtttatttttgggttgcgttttttcggttttttcgtcggttttcgagtcgttagtcgttcggtcggagtattgttcgtagaaggtttgcgcgcggtgcgtgttcggtcgcgggcgggtggtttttgtttgggttcggcggtcgggtggtagttgtgagcgcggtttcgttttttcgttttcggtgacgtcgttcgttttagtttacgtcgtattttcgtagtttttgtcgtcgttcggtttcgtttggttcgcgcgtttcgtcgttcggtttgcgtttgtcgtttttattcggcggtt

SEQ ID NO: 17708 - DNA, 591 bp, Artificial Sequence
  chemically treated genomic DNA (Homo sapiens) CpG-island No: 17708
aaccgccgaataaaaacgacaaacgcaaaccgaacgacgaaacgcgcgaaccaaacgaaaccgaacgacgacaaaaactacgaaaatacgacgtaaactaaaacgaacgacgtcaccgaaaacgaaaaaacgaaaccgcgctcacaactaccacccgaccgccgaacccaaacaaaaaccacccgcccgcgaccgaacacgcaccgcgcgcaaaccttctacgaacaatactccgaccgaacgactaacgactcgaaaaccgacgaaaaaaccgaaaaaacgcaacccaaaaataaacccgcgacgcgctctccaaattcgacctctttttatctaacgaacgtaatcgcaaaaaaaaactttaaaaaaacgctacgatcgccgaacgaactacccccgaaataacaaacgaccgctcgaaaaataaacaataccgaaaccgcgtaaaccccgaataatacccgaaatacaaaaaaacgcccgaccgaaaaaaccgaaaaactaaaaaatatttttaattcattcgaaaatcgcgctctttaaaacgaaaaaactttcctacgaattccaaaaaaaaaaaccgactattaa

SEQ ID NO: 17709 - DNA, 633 bp, Artificial Sequence
  chemically treated genomic DNA (Homo sapiens) CpG-island No: 17709
tttcgagaaagcgtgtgcgtacgcgtttttagtttgttcgtttttggcgtttttagggtaagaaaaatcgaagattcgagtcggcgtttgcgtatttagttttcgttattgttgtggtttcgtgtttcgtttttcggtttttttattttttaggttaggttgagcggcggaggtggtcgtgtcgttggaagcggatagattcgagttagaggtgggggcgggggtttatcgttcgcggtcgggtcggcgttttttttttatttttttcgcgattttcgtttggtttttacggttaacggtagcgtagtcgaatacggtttacgggtagggcgtcgaagaggagtaggcgcgcgttcggggacgagtagggcgtagtgagggaggggcgcgtttattgtttcggtcggtcgatcgatatcgatttcgtttattgcggcgcggggatttttggtgagtaattagtttcgtttgcggaggaagggaggggatagggtggggtgaaggttcggaaacgtcgacggggcgtatttgcgcgcgtattcgcgatttttgatttcgtggttttagttttgattttttacgatttgattatattttttttaaattttaatttttgttggttttggttttagg

SEQ ID NO: 17710 - DNA, 633 bp, Artificial Sequence
  chemically treated genomic DNA (Homo sapiens) CpG-island No: 17710
cctaaaaccaaaaccaacaaaaattaaaatttaaaaaaaatataatcaaatcgtaaaaaatcaaaactaaaaccacgaaatcaaaaatcgcgaatacgcgcgcaaatacgccccgtcgacgtttccgaaccttcaccccaccctatcccctcccttcctccgcaaacgaaactaattactcaccaaaaatccccgcgccgcaataaacgaaatcgatatcgatcgaccgaccgaaacaataaacgcgcccctccctcactacgccctactcgtccccgaacgcgcgcctactcctcttcgacgccctacccgtaaaccgtattcgactacgctaccgttaaccgtaaaaaccaaacgaaaatcgcgaaaaaaataaaaaaaaaacgccgacccgaccgcgaacgataaacccccgcccccacctctaactcgaatctatccgcttccaacgacacgaccacctccgccgctcaacctaacctaaaaaataaaaaaaccgaaaaacgaaacacgaaaccacaacaataacgaaaactaaatacgcaaacgccgactcgaatcttcgatttttcttaccctaaaaacgccaaaaacgaacaaactaaaaacgcgtacgcacacgctttctcgaaa

SEQ ID NO: 17711 - DNA, 633 bp, Artificial Sequence
  chemically treated genomic DNA (Homo sapiens) CpG-island No: 17711
tttgaggttaaggttagtaggggttgaggtttaaaaaagatgtagttaggtcgtaaggggttagggttgaggttacggggttagaggtcgcgggtgcgcgcgtaggtacgtttcgtcggcgttttcgggtttttattttattttgtttttttttttttttcgtaggcggggttggttatttattaagggttttcgcgtcgtagtaggcggggtcggtgtcggtcggtcggtcggggtagtggacgcgttttttttttattgcgttttgttcgttttcgggcgcgcgtttgttttttttcggcgttttgttcgtgggtcgtgttcggttgcgttatcgttagtcgtgggggttagacgggggtcgcggggagggtaggaggggagcgtcggttcggtcgcgggcgatggattttcgtttttatttttaattcgggtttgttcgtttttagcggtacggttattttcgtcgtttagtttagtttagagggtggggggatcggggggcggggtacgagattatagtagtggcggagattaagtgcgtaagcgtcggttcgggttttcgattttttttgttttgggagcgttaggagcgaataagttgggagcgcgtgcgtatacgttttttcgagg

SEQ ID NO: 17712 - DNA, 633 bp, Artificial Sequence
  chemically treated genomic DNA (Homo sapiens) CpG-island No: 17712
cctcgaaaaaacgtatacgcacgcgctcccaacttattcgctcctaacgctcccaaaacaaaaaaaatcgaaaacccgaaccgacgcttacgcacttaatctccgccactactataatctcgtaccccgccccccgatccccccaccctctaaactaaactaaacgacgaaaataaccgtaccgctaaaaacgaacaaacccgaattaaaaataaaaacgaaaatccatcgcccgcgaccgaaccgacgctcccctcctaccctccccgcgacccccgtctaacccccacgactaacgataacgcaaccgaacacgacccacgaacaaaacgccgaaaaaaaacaaacgcgcgcccgaaaacgaacaaaacgcaataaaaaaaaaacgcgtccactaccccgaccgaccgaccgacaccgaccccgcctactacgacgcgaaaacccttaataaataaccaaccccgcctacgaaaaaaaaaaaaaaacaaaataaaataaaaacccgaaaacgccgacgaaacgtacctacgcgcgcacccgcgacctctaaccccgtaacctcaaccctaaccccttacgacctaactacatcttttttaaacctcaacccctactaaccttaacctcaaa

SEQ ID NO: 17713 - DNA, 553 bp, Artificial Sequence
  chemically treated genomic DNA (Homo sapiens) CpG-island No: 17713
attcggcgagagcgaggtcgatgtcgaagtagagaaggtagttggtttggtagtagaggaggttgttgatgacgcggtggtattatcgttgcgggtcgtatggattcggagtcgttagacgcgtcgattttagaataaagtcgtttagggcgcgtagcggtggtagtcgtattttcgatattttgtcggttaatgtggttggattagttaggagggggtcggattataataatcgttacgtttttcgttatcgcggggtatatcgggaaatggagtttgggttgggtagtttttttttaattttttaggtggattgcgtaggggcggcgatgtacgtgatcggaaaagtaattaatacgtcgtttaggaaagtagtaaaggttgtcgggaaattaagtttttgttacgaagcgagatgtttttaatttttaaaattgttatttattttcgcgcggggcgtcgtaggggttgtttcgggcggtgttagcggtttaagtataaagtagttagatagataagaaaggagggattgttataaggattcgagttggat

SEQ ID NO: 17714 - DNA, 553 bp, Artificial Sequence
  chemically treated genomic DNA (Homo sapiens) CpG-island No: 17714
atccaactcgaatccttataacaatccctcctttcttatctatctaactactttatacttaaaccgctaacaccgcccgaaacaacccctacgacgccccgcgcgaaaataaataacaattttaaaaattaaaaacatctcgcttcgtaacaaaaacttaatttcccgacaacctttactactttcctaaacgacgtattaattacttttccgatcacgtacatcgccgcccctacgcaatccacctaaaaaattaaaaaaaaactacccaacccaaactccatttcccgatataccccgcgataacgaaaaacgtaacgattattataatccgaccccctcctaactaatccaaccacattaaccgacaaaatatcgaaaatacgactaccaccgctacgcgccctaaacgactttattctaaaatcgacgcgtctaacgactccgaatccatacgacccgcaacgataataccaccgcgtcatcaacaacctcctctactaccaaaccaactaccttctctacttcgacatcgacctcgctctcgccgaat

SEQ ID NO: 17715 - DNA, 553 bp, Artificial Sequence
  chemically treated genomic DNA (Homo sapiens) CpG-island No: 17715
atttaattcggatttttgtgatagtttttttttttttatttgtttggttattttgtgtttgagtcgttggtatcgttcggagtagtttttgcggcgtttcgcgcgggggtggatggtagttttaagggttgggagtatttcgtttcgtggtaaaggtttgatttttcggtagtttttgttgtttttttgagcggcgtgttagttgttttttcggttacgtgtatcgtcgtttttgcgtaatttatttaggaggttaggaaaaagttgtttagtttagattttatttttcggtgtgtttcgcggtggcgaggggcgtaacggttgttgtagttcggtttttttttggttggtttagttatattaatcggtaggatgtcggaggtgcggttgttatcgttacgcgttttggacgattttgttttggggtcggcgcgtttggcggtttcggatttatgcgattcgtagcgatggtgttatcgcgttattaataattttttttattattaaattaattattttttttgtttcggtatcggtttcgttttcgtcgggt

SEQ ID NO: 17716 - DNA, 553 bp, Artificial Sequence
  chemically treated genomic DNA (Homo sapiens) CpG-island No: 17716
acccgacgaaaacgaaaccgataccgaaacaaaaaaaataattaatttaataataaaaaaaattattaataacgcgataacaccatcgctacgaatcgcataaatccgaaaccgccaaacgcgccgaccccaaaacaaaatcgtccaaaacgcgtaacgataacaaccgcacctccgacatcctaccgattaatataactaaaccaaccaaaaaaaaaccgaactacaacaaccgttacgcccctcgccaccgcgaaacacaccgaaaaataaaatctaaactaaacaactttttcctaacctcctaaataaattacgcaaaaacgacgatacacgtaaccgaaaaaacaactaacacgccgctcaaaaaaacaacaaaaactaccgaaaaatcaaacctttaccacgaaacgaaatactcccaacccttaaaactaccatccacccccgcgcgaaacgccgcaaaaactactccgaacgataccaacgactcaaacacaaaataaccaaacaaataaaaaaaaaaaaactatcacaaaaatccgaattaaat

SEQ ID NO: 17717 - DNA, 674 bp, Artificial Sequence
  chemically treated genomic DNA (Homo sapiens) CpG-island No: 17717
ttgtgttcgttttatttttgtagattaaatttaaagttatatttttcggagtgagaaacgggatagtaaatgaacgtaggaattacggtgcgtaggtatagaatttcgttgggtttgttacgaaggttgaggtggaagcgtttagcgtattaggcgttacggttcggtgtgtgattttattaatttttattagcgcgtattttgttttgtttttttacgggcgaataattttatacgaggtagtggtgtgggagttagtattcggaatcgtaaaagtacgattttttcggagtttaggtattgaatggtatttattgcgtatgttttagagcggcgacgaatgggagttcggagcgtaggggcggaggcgcgttcgggtagttatcgagaagcgttaattaattatcgattaattagattattatcgttaatcgttatcgattaattagagtttatcgcgtttcggttttaagttagttgtttgtttcgcggcgggagggttgggttaagattaagttttcgggggagagggtaacgcggtgggcgggagagaggtcgagggtcgttcgggtttgggagtgttaataggacgggatgggtacgagtatgtcgggtttcgcgcgggggaggggttttttttttattttatataaaaaggtgtgttcgggttggtt

SEQ ID NO: 17718 - DNA, 674 bp, Artificial Sequence
  chemically treated genomic DNA (Homo sapiens) CpG-island No: 17718
aaccaacccgaacacacctttttatataaaataaaaaaaaaacccctcccccgcgcgaaacccgacatactcgtacccatcccgtcctattaacactcccaaacccgaacgaccctcgacctctctcccgcccaccgcgttaccctctcccccgaaaacttaatcttaacccaaccctcccgccgcgaaacaaacaactaacttaaaaccgaaacgcgataaactctaattaatcgataacgattaacgataataatctaattaatcgataattaattaacgcttctcgataactacccgaacgcgcctccgcccctacgctccgaactcccattcgtcgccgctctaaaacatacgcaataaataccattcaatacctaaactccgaaaaaatcgtacttttacgattccgaatactaactcccacaccactacctcgtataaaattattcgcccgtaaaaaaacaaaacaaaatacgcgctaataaaaattaataaaatcacacaccgaaccgtaacgcctaatacgctaaacgcttccacctcaaccttcgtaacaaacccaacgaaattctatacctacgcaccgtaattcctacgttcatttactatcccgtttctcactccgaaaaatataactttaaatttaatctacaaaaataaaacgaacacaa

SEQ ID NO: 17719 - DNA, 674 bp, Artificial Sequence
  chemically treated genomic DNA (Homo sapiens) CpG-island No: 17719
agttaattcgggtatatttttttgtgtggggtaaggaaagagtttttttttcgcgcggggttcggtatgttcgtgtttatttcgttttgttggtatttttagattcgagcggttttcggtttttttttcgtttatcgcgttgttttttttttcgaaggtttagttttgatttaattttttcgtcgcggaataagtaattggtttaaggtcggggcgcggtgggttttgattggtcgatgacgattgacggtgatgatttgattggtcgatggttgattggcgtttttcggtagttgttcgggcgcgttttcgtttttgcgtttcgggtttttattcgtcgtcgttttggggtatgcgtagtgggtgttatttagtgtttgggtttcgggaaagtcgtgtttttacggtttcgggtattggtttttatattattgtttcgtgtggggttgttcgttcgtgaaggggtaggatagggtgcgcgttggtggaggttagtgaggttatatatcgggtcgtggcgtttggtgcgttgggcgtttttattttaattttcgtagtaaatttagcggggttttgtgtttgcgtatcgtggtttttgcgtttatttattgtttcgttttttatttcggaaagtgtggttttgagtttgatttgtaggagtaggacgggtatag

SEQ ID NO: 17720 - DNA, 674 bp, Artificial Sequence
  chemically treated genomic DNA (Homo sapiens) CpG-island No: 17720
ctatacccgtcctactcctacaaatcaaactcaaaaccacactttccgaaataaaaaacgaaacaataaataaacgcaaaaaccacgatacgcaaacacaaaaccccgctaaatttactacgaaaattaaaataaaaacgcccaacgcaccaaacgccacgacccgatatataacctcactaacctccaccaacgcgcaccctatcctaccccttcacgaacgaacaaccccacacgaaacaataatataaaaaccaatacccgaaaccgtaaaaacacgactttcccgaaacccaaacactaaataacacccactacgcataccccaaaacgacgacgaataaaaacccgaaacgcaaaaacgaaaacgcgcccgaacaactaccgaaaaacgccaatcaaccatcgaccaatcaaatcatcaccgtcaatcgtcatcgaccaatcaaaacccaccgcgccccgaccttaaaccaattacttattccgcgacgaaaaaattaaatcaaaactaaaccttcgaaaaaaaaaacaacgcgataaacgaaaaaaaaaccgaaaaccgctcgaatctaaaaataccaacaaaacgaaataaacacgaacataccgaaccccgcgcgaaaaaaaaactctttccttaccccacacaaaaaaatatacccgaattaact

SEQ ID NO: 17721 - DNA, 645 bp, Artificial Sequence
  chemically treated genomic DNA (Homo sapiens) CpG-island No: 17721
ttttcgtgttttttttttattttgcggggttggttggagcggtcgtttcggtgttgtttagtagttatagggagtcgtacggggagcgggaaagcggtcgcggttttaggcggggcggtcgggatggagcggggtcgcgagtttgtggggaaggggttgtggcggcgtttcgagcggttgtaggtatacggggtcggcggttgtgcgtagaggcgtttttgcgtttttcgttttttcgtttttcgtttttttttttttttttgtttttttgttcgttttttcggttatagagcgacgaatgacgagattaggtgtattttattgtcgtttttagtttcggggatttcgggttttcgtttttgaaggtcgtaggttttagtgcgtcggtttcgggttgcgggttcgggagcgcgggcgtagttaaggtgtagttgcgcggcgtgcggcgtcgggggaatacgtggttgttttaggaagtcgttttagggaacggttgggattcgtgggtgattttgggtttttaaattttcggtttttcgggtttcgggcgggtttcgtttttattgcggaaagggataaagttgttttcgattcggttattagcgtgttataggtattaattagatacgggtttttgtaaattta

SEQ ID NO: 17722 - DNA, 645 bp, Artificial Sequence
  chemically treated genomic DNA (Homo sapiens) CpG-island No: 17722
taaatttacaaaaacccgtatctaattaatacctataacacgctaataaccgaatcgaaaacaactttatccctttccgcaataaaaacgaaacccgcccgaaacccgaaaaaccgaaaatttaaaaacccaaaatcacccacgaatcccaaccgttccctaaaacgacttcctaaaacaaccacgtattcccccgacgccgcacgccgcgcaactacaccttaactacgcccgcgctcccgaacccgcaacccgaaaccgacgcactaaaacctacgaccttcaaaaacgaaaacccgaaatccccgaaactaaaaacgacaataaaatacacctaatctcgtcattcgtcgctctataaccgaaaaaacgaacaaaaaaacaaaaaaaaaaaaaaaaacgaaaaacgaaaaaacgaaaaacgcaaaaacgcctctacgcacaaccgccgaccccgtatacctacaaccgctcgaaacgccgccacaaccccttccccacaaactcgcgaccccgctccatcccgaccgccccgcctaaaaccgcgaccgctttcccgctccccgtacgactccctataactactaaacaacaccgaaacgaccgctccaaccaaccccgcaaaataaaaaaaaaacacgaaaa

SEQ ID NO: 17723 - DNA, 645 bp, Artificial Sequence
  chemically treated genomic DNA (Homo sapiens) CpG-island No: 17723
taagtttatagaaattcgtatttaattaatgtttgtaatacgttagtaatcgaatcggggatagttttgttttttttcgtagtgagaacggggttcgttcggagttcggggaatcgaaggtttaggagtttaaggttatttacgaattttagtcgttttttggggcgattttttggagtagttacgtgttttttcggcgtcgtacgtcgcgtagttgtattttggttgcgttcgcgttttcggattcgtagttcggagtcggcgtattagggtttgcggtttttaagggcgaggattcgaagttttcggggttgagagcgatagtggggtatatttggtttcgttattcgtcgttttgtgatcgaggaggcgggtaagaaggtagagagaagggaagggacgagaggcgaagggacgagaggcgtagggacgtttttgcgtatagtcgtcgatttcgtgtatttgtagtcgttcgaggcgtcgttatagttttttttttataggttcgcggtttcgttttatttcggtcgtttcgtttggggtcgcgatcgttttttcgtttttcgtgcggttttttatggttgttggatagtatcggagcggtcgttttagttagtttcgtaggatgaagggaggatacgaggg

SEQ ID NO: 17724 - DNA, 645 bp, Artificial Sequence
  chemically treated genomic DNA (Homo sapiens) CpG-island No: 17724
ccctcgtatcctcccttcatcctacgaaactaactaaaacgaccgctccgatactatccaacaaccataaaaaaccgcacgaaaaacgaaaaaacgatcgcgaccccaaacgaaacgaccgaaataaaacgaaaccgcgaacctataaaaaaaaaactataacgacgcctcgaacgactacaaatacacgaaatcgacgactatacgcaaaaacgtccctacgcctctcgtcccttcgcctctcgtcccttcccttctctctaccttcttacccgcctcctcgatcacaaaacgacgaataacgaaaccaaatataccccactatcgctctcaaccccgaaaacttcgaatcctcgcccttaaaaaccgcaaaccctaatacgccgactccgaactacgaatccgaaaacgcgaacgcaaccaaaatacaactacgcgacgtacgacgccgaaaaaacacgtaactactccaaaaaatcgccccaaaaaacgactaaaattcgtaaataaccttaaactcctaaaccttcgattccccgaactccgaacgaaccccgttctcactacgaaaaaaaacaaaactatccccgattcgattactaacgtattacaaacattaattaaatacgaatttctataaactta

SEQ ID NO: 17725 - DNA, 536 bp, Artificial Sequence
  chemically treated genomic DNA (Homo sapiens) CpG-island No: 17725
cgcgcggcgttttttgcgtttgcgtttcggtacgaggtggggcggcgggcgttagtatagtagagtgtgcgtcggggtggggggtaacggttagtcgttattttgagacgggcggcggcgggatggtaatagttttcggggtttcggatttgtttggtttcggagcgttttcgttcggtgtgggagtttaggcggcggcggtcgttgaggaggaggagcgagaggtggtgcgggttcgagttaaggtgaggttggcggtgagtcggtttagtcgtcgaggtattttaggggagggggaggcggtggttgttataggatggagggcgggatttgagatttcggatataatttgagcggcgaagtttgagggttaagtgatgatggcgaggggtagggagggtttgagagtttgagagcgttagcgacgtattttggggcgtgggattgaaaatagagggacgaggcgggggtttatgggatgaatgggtggagtttatagataaaggggaggggttatggggttggaggaggggtcg

SEQ ID NO: 17726 - DNA, 536 bp, Artificial Sequence
  chemically treated genomic DNA (Homo sapiens) CpG-island No: 17726
cgacccctcctccaaccccataacccctcccctttatctataaactccacccattcatcccataaacccccgcctcgtccctctattttcaatcccacgccccaaaatacgtcgctaacgctctcaaactctcaaaccctccctacccctcgccatcatcacttaaccctcaaacttcgccgctcaaattatatccgaaatctcaaatcccgccctccatcctataacaaccaccgcctccccctcccctaaaatacctcgacgactaaaccgactcaccgccaacctcaccttaactcgaacccgcaccacctctcgctcctcctcctcaacgaccgccgccgcctaaactcccacaccgaacgaaaacgctccgaaaccaaacaaatccgaaaccccgaaaactattaccatcccgccgccgcccgtctcaaaataacgactaaccgttaccccccaccccgacgcacactctactatactaacgcccgccgccccacctcgtaccgaaacgcaaacgcaaaaaacgccgcgcg

SEQ ID NO: 17727 - DNA, 536 bp, Artificial Sequence
  chemically treated genomic DNA (Homo sapiens) CpG-island No: 17727
cggttttttttttagttttatagttttttttttttgtttataagttttatttatttattttatagattttcgtttcgtttttttatttttagttttacgttttaaggtacgtcgttaacgtttttaggtttttaggttttttttatttttcgttattattatttggtttttaagtttcgtcgtttaggttatgttcgaaattttaggtttcgttttttattttatgatagttatcgttttttttttttttgggatgtttcggcggttgggtcgatttatcgttagttttattttgattcggattcgtattatttttcgttttttttttttagcggtcgtcgtcgtttgagtttttatatcgggcgggggcgtttcggagttagataagttcgaggtttcggaggttgttgttatttcgtcgtcgttcgttttagggtgacggttgatcgttgttttttatttcggcgtatattttattgtattgacgttcgtcgttttatttcgtgtcggggcgtaggcgtagagggcgtcgcgcg

SEQ ID NO: 17728 - DNA, 536 bp, Artificial Sequence
  chemically treated genomic DNA (Homo sapiens) CpG-island No: 17728
cgcgcgacgccctctacgcctacgccccgacacgaaataaaacgacgaacgtcaatacaataaaatatacgccgaaataaaaaacaacgatcaaccgtcaccctaaaacgaacgacgacgaaataacaacaacctccgaaacctcgaacttatctaactccgaaacgcccccgcccgatataaaaactcaaacgacgacgaccgctaaaaaaaaaaaacgaaaaataatacgaatccgaatcaaaataaaactaacgataaatcgacccaaccgccgaaacatcccaaaaaaaaaaaaaacgataactatcataaaataaaaaacgaaacctaaaatttcgaacataacctaaacgacgaaacttaaaaaccaaataataataacgaaaaataaaaaaaacctaaaaacctaaaaacgttaacgacgtaccttaaaacgtaaaactaaaaataaaaaaacgaaacgaaaatctataaaataaataaataaaacttataaacaaaaaaaaaaaactataaaactaaaaaaaaaaccg

SEQ ID NO: 17729 - DNA, 692 bp, Artificial Sequence
  chemically treated genomic DNA (Homo sapiens) CpG-island No: 17729
ttcggaaatattttatttcgcggagaatattgtttttttcgttttgttgtttttttttttttttattatttcgtttttgttggttttagttaattagtacgtacgtcgggacgcgtaaggggaacgtttcgggacgttttcgttacgtattttttattaatcgtttttcggcgtagtttcgtttttgttttttgtgttttttcgagttcgttgttcgttcgggttttttacgttttaatttttaggtaagttgtatatgttttgcgaaacggcggtttttcgttatatacgcgtcgcgtcggtcgtgatcggggaatagcgagtggggagagtaatggttattgatacgtaggtttggttttttttgggacgggcgggtttcgtgtttggaggtgaaatatttcggttggtgggaggtcggcgcgttgtatttgagtgtgaggtttatcgggagggattggtggcgtcggtggtggtagtgattacgcgatagtcgatatttattttttttattttacgtggtcgtcgttattttgttttgtcggcgttaagggaacgtagggatgttttgggtttgcgtagtggtataaaatgacgggcgtggcggttatgaatgtgagagtatgcgtaatgtggttttttaatggtggttgcgttgagttagttttttagattattattttattggtcgt

SEQ ID NO: 17730 - DNA, 692 bp, Artificial Sequence
  chemically treated genomic DNA (Homo sapiens) CpG-island No: 17730
acgaccaataaaataataatctaaaaaactaactcaacgcaaccaccattaaaaaaccacattacgcatactctcacattcataaccgccacgcccgtcattttataccactacgcaaacccaaaacatccctacgttcccttaacgccgacaaaacaaaataacgacgaccacgtaaaataaaaaaaataaatatcgactatcgcgtaatcactaccaccaccgacgccaccaatccctcccgataaacctcacactcaaatacaacgcgccgacctcccaccaaccgaaatatttcacctccaaacacgaaacccgcccgtcccaaaaaaaaccaaacctacgtatcaataaccattactctccccactcgctattccccgatcacgaccgacgcgacgcgtatataacgaaaaaccgccgtttcgcaaaacatatacaacttacctaaaaattaaaacgtaaaaaacccgaacgaacaacgaactcgaaaaaacacaaaaaacaaaaacgaaactacgccgaaaaacgattaataaaaaatacgtaacgaaaacgtcccgaaacgttccccttacgcgtcccgacgtacgtactaattaactaaaaccaacaaaaacgaaataataaaaaaaaaaaaaaacaacaaaacgaaaaaaacaatattctccgcgaaataaaatatttccgaa

SEQ ID NO: 17731 - DNA, 692 bp, Artificial Sequence
  chemically treated genomic DNA (Homo sapiens) CpG-island No: 17731
gcggttaataaggtggtaatttgaggagttggtttagcgtagttattattagggggttatattgcgtatgtttttatatttatagtcgttacgttcgttattttgtgttattgcgtaagtttagaatatttttgcgtttttttaacgtcggtagaataagatggcggcggttacgtgggataaggaaagtaagtgtcggttgtcgcgtggttattgttattatcgacgttattagtttttttcggtaggttttatatttagatatagcgcgtcggttttttattaatcgaaatgttttatttttaagtacgggattcgttcgttttagagaaagttaagtttacgtgttagtggttattattttttttattcgttatttttcggttacggtcggcgcggcgcgtgtgtggcgaggagtcgtcgtttcgtaggatatatgtaatttatttggaaattaaaacgtaaaaaattcggacgaatagcgagttcggaggagtataaaaaatagggacggggttgcgtcggaagacgattgataaagagtacgtagcgagaacgtttcggaacgttttttttgcgcgtttcggcgtgcgtgttgattggttgaggttagtaggggcggagtggtggggagaggaagggatagtaaagcgaagggagtagtgtttttcgcgaaatggggtgttttcgga

SEQ ID NO: 17732 - DNA, 692 bp, Artificial Sequence
  chemically treated genomic DNA (Homo sapiens) CpG-island No: 17732
tccgaaaacaccccatttcgcgaaaaacactactcccttcgctttactatcccttcctctccccaccactccgcccctactaacctcaaccaatcaacacgcacgccgaaacgcgcaaaaaaaacgttccgaaacgttctcgctacgtactctttatcaatcgtcttccgacgcaaccccgtccctattttttatactcctccgaactcgctattcgtccgaattttttacgttttaatttccaaataaattacatatatcctacgaaacgacgactcctcgccacacacgcgccgcgccgaccgtaaccgaaaaataacgaataaaaaaaataataaccactaacacgtaaacttaactttctctaaaacgaacgaatcccgtacttaaaaataaaacatttcgattaataaaaaaccgacgcgctatatctaaatataaaacctaccgaaaaaaactaataacgtcgataataacaataaccacgcgacaaccgacacttactttccttatcccacgtaaccgccgccatcttattctaccgacgttaaaaaaacgcaaaaatattctaaacttacgcaataacacaaaataacgaacgtaacgactataaatataaaaacatacgcaatataaccccctaataataactacgctaaaccaactcctcaaattaccaccttattaaccgc

SEQ ID NO: 17733 - DNA, 723 bp, Artificial Sequence
  chemically treated genomic DNA (Homo sapiens) CpG-island No: 17733
atcgtcgttgtcgttttcgttgtcgtcgtcgtttagacgtattttgggaaagcgcggcgagtattcgttttcgggatcgagtcgggcggtagggaggggttcggttacggtttttcggttggttcgcgcgggtgttgcgagtcgggagtcgcggttaataggttgcgcgttttcggttacgttcgcgcgagcgtttttttcgcgaggtcggttaggttcgaatgtcgttagtcgtggggaaagatggcggaaaatttaaaaggtgaagtagtggaggtagaggcgcgggttcgttggtcgggtcgggtgggttggaggggtggcgttgtcggttcggggtttcggcgttcgaggtttcggcgtcgggagtcggaagttcggcgcggaaaggatgaggttcggggagcgcgggtttggtgcgcggggttgggcggggtttaggggagggggcgcgcgtttcggaacgtagcgggtttggggttaagtggggacgtaggaggggggcgcgcgttgtagatcgcggtcggatcggcgcgcgtacgcgcgggggtttgtcgaggaggtcgcgttcgcgcgcgggaaaatcggtttttggtgatcgttatttattcggtgtttacgcgagacgtcggaaggggagggaagataagggggatagattttttttttagagtgcggggattgagaatttttttgggggaaagtatcgtttttcggcgtgat

SEQ ID NO: 17734 - DNA, 723 bp, Artificial Sequence
  chemically treated genomic DNA (Homo sapiens) CpG-island No: 17734
atcacgccgaaaaacgatactttcccccaaaaaaattctcaatccccgcactctaaaaaaaaaatctatcccccttatcttccctccccttccgacgtctcgcgtaaacaccgaataaataacgatcaccaaaaaccgattttcccgcgcgcgaacgcgacctcctcgacaaacccccgcgcgtacgcgcgccgatccgaccgcgatctacaacgcgcgcccccctcctacgtccccacttaaccccaaacccgctacgttccgaaacgcgcgccccctcccctaaaccccgcccaaccccgcgcaccaaacccgcgctccccgaacctcatcctttccgcgccgaacttccgactcccgacgccgaaacctcgaacgccgaaaccccgaaccgacaacgccacccctccaacccacccgacccgaccaacgaacccgcgcctctacctccactacttcaccttttaaattttccgccatctttccccacgactaacgacattcgaacctaaccgacctcgcgaaaaaaacgctcgcgcgaacgtaaccgaaaacgcgcaacctattaaccgcgactcccgactcgcaacacccgcgcgaaccaaccgaaaaaccgtaaccgaacccctccctaccgcccgactcgatcccgaaaacgaatactcgccgcgctttcccaaaatacgtctaaacgacgacgacaacgaaaacgacaacgacgat

SEQ ID NO: 17735 - DNA, 723 bp, Artificial Sequence
  chemically treated genomic DNA (Homo sapiens) CpG-island No: 17735
attacgtcgagaggcgatatttttttttagaagagtttttagttttcgtattttgaagggggggtttgttttttttatttttttttttttttcggcgtttcgcgtggatatcgaatgggtaacggttattaggggtcgattttttcgcgcgcgggcgcggttttttcgataagttttcgcgcgtgcgcgcgtcggttcggtcgcgatttgtagcgcgcgttttttttttgcgtttttatttagttttaggttcgttgcgtttcgaggcgcgcgtttttttttttgagtttcgtttagtttcgcgtattaggttcgcgtttttcgagttttatttttttcgcgtcgagttttcggttttcggcgtcggggtttcggacgtcggggtttcgagtcggtaacgttatttttttagtttattcggttcggttagcgggttcgcgtttttgtttttattgttttattttttaaatttttcgttatttttttttacggttaacgatattcgggtttagtcggtttcgcgagaagagcgttcgcgcgggcgtggtcgggaacgcgtagtttattggtcgcggttttcgattcgtagtattcgcgcggattaatcggagagtcgtgatcgaatttttttttgtcgttcggttcggtttcggaggcgggtgttcgtcgcgtttttttagagtgcgtttgggcggcggcggtagcgggagcgatagcggcggt

SEQ ID NO: 17736 - DNA, 723 bp, Artificial Sequence
  chemically treated genomic DNA (Homo sapiens) CpG-island No: 17736
accgccgctatcgctcccgctaccgccgccgcccaaacgcactctaaaaaaacgcgacgaacacccgcctccgaaaccgaaccgaacgacaaaaaaaaattcgatcacgactctccgattaatccgcgcgaatactacgaatcgaaaaccgcgaccaataaactacgcgttcccgaccacgcccgcgcgaacgctcttctcgcgaaaccgactaaacccgaatatcgttaaccgtaaaaaaaaataacgaaaaatttaaaaaataaaacaataaaaacaaaaacgcgaacccgctaaccgaaccgaataaactaaaaaaataacgttaccgactcgaaaccccgacgtccgaaaccccgacgccgaaaaccgaaaactcgacgcgaaaaaaataaaactcgaaaaacgcgaacctaatacgcgaaactaaacgaaactcaaaaaaaaaaacgcgcgcctcgaaacgcaacgaacctaaaactaaataaaaacgcaaaaaaaaaacgcgcgctacaaatcgcgaccgaaccgacgcgcgcacgcgcgaaaacttatcgaaaaaaccgcgcccgcgcgcgaaaaaatcgacccctaataaccgttacccattcgatatccacgcgaaacgccgaaaaaaaaaaaaaaataaaaaaaacaaacccccccttcaaaatacgaaaactaaaaactcttctaaaaaaaaatatcgcctctcgacgtaat

SEQ ID NO: 17737 - DNA, 961 bp, Artificial Sequence
  chemically treated genomic DNA (Homo sapiens) CpG-island No: 17737
cgttttcggtttagttataattagttcgttcgcgttacgttattacggcgcgtcgcgcgggaagtcgcggggaaaaggtaagatgtttttttttaattttttcgtttttttgtttgttttttagatatcgtcgattcgaagggtttttaagtgattggatagggacggaggggcggcggttatggtattcgggacgatagcgacgatagtcgaggtaagaaaaagtttgtatcgtagttttgtcgggaatcgtcggcgtttgttttttacgtaggcgtagtatagttggcgtagtacgtcgacgtatcgtttcgtcgtttgtgagttcgcggtgtggtttagtttagttggcgtagtacgtcgacgtatcgtttcgtcgtttgtgagttcgcgagaggtgtggttcgcgcgaggggcgcggttttgaggtacggttttttttggaggcgggatttgggcgggtagtcgagagacgaggtttaatggaaaagaaaagtttgagcgttcgcgtttttataggtcgttagaaatttggtggagcgagttaagggcggagtttgagaaaggggttgcgtttaatgagtggagcggtgagtatagcgcgtcgacggcggaggcgggaagggggcggaggtcgatcgaaggcggttagggattggttgaagagggttagcgaaacgttagcggtcgggtttgggtagggggtggagttggttgaaggaacggggtagttttttgaggagcggggttggttgaaacgttaggggcgggatttggcggagtggaaggtatcggttcggttcgataaggggtggagttaagtgaatcgttaagggtggagtcgaaatcggggtcggggtcggggtcggttgagtgaaagggtgggtgattatttcgggagataggtcgaaagggtaggttcgtgaaggaatggggtttgggttgggtttagagggtttgg

SEQ ID NO: 17738 - DNA, 961 bp, Artificial Sequence
  chemically treated genomic DNA (Homo sapiens) CpG-island No: 17738
ccaaaccctctaaacccaacccaaaccccattccttcacgaacctaccctttcgacctatctcccgaaataatcacccaccctttcactcaaccgaccccgaccccgaccccgatttcgactccacccttaacgattcacttaactccaccccttatcgaaccgaaccgataccttccactccgccaaatcccgcccctaacgtttcaaccaaccccgctcctcaaaaaactaccccgttccttcaaccaactccaccccctacccaaacccgaccgctaacgtttcgctaaccctcttcaaccaatccctaaccgccttcgatcgacctccgcccccttcccgcctccgccgtcgacgcgctatactcaccgctccactcattaaacgcaacccctttctcaaactccgcccttaactcgctccaccaaatttctaacgacctataaaaacgcgaacgctcaaacttttcttttccattaaacctcgtctctcgactacccgcccaaatcccgcctccaaaaaaaaccgtacctcaaaaccgcgcccctcgcgcgaaccacacctctcgcgaactcacaaacgacgaaacgatacgtcgacgtactacgccaactaaactaaaccacaccgcgaactcacaaacgacgaaacgatacgtcgacgtactacgccaactatactacgcctacgtaaaaaacaaacgccgacgattcccgacaaaactacgatacaaactttttcttacctcgactatcgtcgctatcgtcccgaataccataaccgccgcccctccgtccctatccaatcacttaaaaacccttcgaatcgacgatatctaaaaaacaaacaaaaaaacgaaaaaattaaaaaaaaacatcttaccttttccccgcgacttcccgcgcgacgcgccgtaataacgtaacgcgaacgaactaattataactaaaccgaaaacg

SEQ ID NO: 17739 - DNA, 961 bp, Artificial Sequence
  chemically treated genomic DNA (Homo sapiens) CpG-island No: 17739
ttagattttttaagtttagtttagattttatttttttacgaatttgttttttcggtttatttttcgggataattatttatttttttatttagtcggtttcggtttcgatttcggtttcgattttatttttaacgatttatttaattttattttttatcgggtcggatcggtattttttatttcgttagatttcgtttttagcgttttaattagtttcgttttttaggggattgtttcgtttttttaattagttttattttttgtttagattcgatcgttaacgtttcgttaattttttttagttagtttttagtcgttttcggtcggttttcgtttttttttcgttttcgtcgtcgacgcgttgtatttatcgttttatttattggacgtagttttttttttaaatttcgtttttggttcgttttattaagtttttggcgatttgtggggacgcgagcgtttaggttttttttttttattgggtttcgtttttcgattgttcgtttagatttcgtttttagaggggatcgtgttttaaggtcgcgtttttcgcgcgagttatatttttcgcgagtttataagcggcggggcggtgcgtcggcgtgttacgttagttgggttgagttatatcgcgagtttataggcgacggggcggtgcgtcggcgtgttacgttagttgtgttgcgtttacgtaaaaggtaggcgtcggcggttttcgatagggttgcggtgtaagtttttttttgtttcggttatcgtcgttgtcgtttcggatgttatagtcgtcgttttttcgtttttgtttagttatttaggagtttttcgggtcggcggtgtttggagagtaagtaaggaagcgagggaattaggaaggggtattttatttttttttcgcgatttttcgcgcgacgcgtcgtgatgacgtagcgcgggcgggttggttgtggttgggtcgagagcg

SEQ ID NO: 17740 - DNA, 961 bp, Artificial Sequence
  chemically treated genomic DNA (Homo sapiens) CpG-island No: 17740
cgctctcgacccaaccacaaccaacccgcccgcgctacgtcatcacgacgcgtcgcgcgaaaaatcgcgaaaaaaaaataaaataccccttcctaattccctcgcttccttacttactctccaaacaccgccgacccgaaaaactcctaaataactaaacaaaaacgaaaaaacgacgactataacatccgaaacgacaacgacgataaccgaaacaaaaaaaaacttacaccgcaaccctatcgaaaaccgccgacgcctaccttttacgtaaacgcaacacaactaacgtaacacgccgacgcaccgccccgtcgcctataaactcgcgatataactcaacccaactaacgtaacacgccgacgcaccgccccgccgcttataaactcgcgaaaaatataactcgcgcgaaaaacgcgaccttaaaacacgatcccctctaaaaacgaaatctaaacgaacaatcgaaaaacgaaacccaataaaaaaaaaaaacctaaacgctcgcgtccccacaaatcgccaaaaacttaataaaacgaaccaaaaacgaaatttaaaaaaaaaactacgtccaataaataaaacgataaatacaacgcgtcgacgacgaaaacgaaaaaaaaacgaaaaccgaccgaaaacgactaaaaactaactaaaaaaaattaacgaaacgttaacgatcgaatctaaacaaaaaataaaactaattaaaaaaacgaaacaatcccctaaaaaacgaaactaattaaaacgctaaaaacgaaatctaacgaaataaaaaataccgatccgacccgataaaaaataaaattaaataaatcgttaaaaataaaatcgaaaccgaaatcgaaaccgaaaccgactaaataaaaaaataaataattatcccgaaaaataaaccgaaaaaacaaattcgtaaaaaaataaaatctaaactaaacttaaaaaatctaa

SEQ ID NO: 17741 - DNA, 891 bp, Artificial Sequence
  chemically treated genomic DNA (Homo sapiens) CpG-island No: 17741
gagggcggttgcgtatgtttatttttttaatcgtcgtcggggtgtttcggggagtagcgtcgtttttcgttaggtttgttagagcgttttagcgcgttcgtttttttacggatataggtgagcgaggcgtcggtgtttttggttttgttaggtttgggggtattttcgcgtcggttttgggggatcgttttttaagcgttaagttttttttcgggcgagcggttttttattcgggtcggtcgggaggggtgtcggcgtttggttggaagcggggtcgttttattcggagtcgggatgggttttgataggatgttcgggcgacgttgtttatatcgagttcgaagtggagttttggtttcggggattttttcgtatttcgagttttgtattttattcggtttcgttcgggaaagtacgatttggcgaggtcgttttaattttaggtttcggttttttagcgcgttagttttggtgagttgggcgaagttttttaatttggttttagcggttttgagcgcgcggttacggggattcgtcgggggtttcgcgttatttgagaggatcgagtttttaattttcggcgtttttcgcgggttgaggtttcgggttagtgttttcggtacgtgtttttgcgtttcgggtttttttcgggagcggagttttggggattagggtcgcggtttttttgcgcgtcgcggggattgggcgagtgtggtttcgtttcgttaggtatttggggtggaagttgcgtttcgttattcggttaggtttcgggttttttttttttatcgtcggcgtttttagattttagtcgtttagatttcgatttaagaggtagtttcgatttcgtttttgttttttgatttatttttaaagatggtcgggtatttt

SEQ ID NO: 17742 - DNA, 891 bp, Artificial Sequence
  chemically treated genomic DNA (Homo sapiens) CpG-island No: 17742
aaaatacccgaccatctttaaaaataaatcaaaaaacaaaaacgaaatcgaaactacctcttaaatcgaaatctaaacgactaaaatctaaaaacgccgacgataaaaaaaaaaaacccgaaacctaaccgaataacgaaacgcaacttccaccccaaatacctaacgaaacgaaaccacactcgcccaatccccgcgacgcgcaaaaaaaccgcgaccctaatccccaaaactccgctcccgaaaaaaacccgaaacgcaaaaacacgtaccgaaaacactaacccgaaacctcaacccgcgaaaaacgccgaaaattaaaaactcgatcctctcaaataacgcgaaacccccgacgaatccccgtaaccgcgcgctcaaaaccgctaaaaccaaattaaaaaacttcgcccaactcaccaaaactaacgcgctaaaaaaccgaaacctaaaattaaaacgacctcgccaaatcgtactttcccgaacgaaaccgaataaaatacaaaactcgaaatacgaaaaaatccccgaaaccaaaactccacttcgaactcgatataaacaacgtcgcccgaacatcctatcaaaacccatcccgactccgaataaaacgaccccgcttccaaccaaacgccgacacccctcccgaccgacccgaataaaaaaccgctcgcccgaaaaaaaacttaacgcttaaaaaacgatcccccaaaaccgacgcgaaaatacccccaaacctaacaaaaccaaaaacaccgacgcctcgctcacctatatccgtaaaaaaacgaacgcgctaaaacgctctaacaaacctaacgaaaaacgacgctactccccgaaacaccccgacgacgattaaaaaaataaacatacgcaaccgccctc

SEQ ID NO: 17743 - DNA, 891 bp, Artificial Sequence
  chemically treated genomic DNA (Homo sapiens) CpG-island No: 17743
ggggtgttcggttatttttagggatgggttagaaggtagaggcggggtcgaggttgttttttaagtcggggtttgagcggttggagtttgggggcgtcgacggtgaggaaggaaagttcggggtttggtcgagtggcggagcgtagtttttattttaggtgtttggcgggacggggttatattcgtttagttttcgcgacgcgtagggaggtcgcggttttggtttttaaggtttcgttttcgggaggagttcgaggcgtagaggtacgtgtcgagggtattggttcggggttttagttcgcgggaggcgtcggagattgggggttcggtttttttaagtggcgcggagttttcggcgggttttcgtggtcgcgcgtttagagtcgttgggattaggttggggggtttcgtttagtttattaaggttggcgcgttaaggggtcgggatttggggttagggcggtttcgttaggtcgtgttttttcggacgaggtcgggtgaggtgtaaagttcggagtgcggaagggttttcgaaattaggattttatttcgggttcggtgtgagtagcgtcgttcgggtattttgttaagatttatttcgatttcgggtgaggcggtttcgtttttagttaagcgtcgatatttttttcggtcggttcgagtgaggggtcgttcgttcgggagaaggtttggcgtttgggggacgattttttaaagtcggcgcggggatatttttaggtttggtagggttaggggtatcggcgtttcgtttatttgtgttcgtggggaggcgggcgcgttgggacgttttgataggtttggcggggggcgacgttgtttttcggggtatttcggcggcggttgggggagtggatatgcgtagtcgttttt

SEQ ID NO: 17744 - DNA, 891 bp, Artificial Sequence
  chemically treated genomic DNA (Homo sapiens) CpG-island No: 17744
aaaaacgactacgcatatccactcccccaaccgccgccgaaataccccgaaaaacaacgtcgccccccgccaaacctatcaaaacgtcccaacgcgcccgcctccccacgaacacaaataaacgaaacgccgatacccctaaccctaccaaacctaaaaatatccccgcgccgactttaaaaaatcgtcccccaaacgccaaaccttctcccgaacgaacgacccctcactcgaaccgaccgaaaaaaatatcgacgcttaactaaaaacgaaaccgcctcacccgaaatcgaaataaatcttaacaaaatacccgaacgacgctactcacaccgaacccgaaataaaatcctaatttcgaaaacccttccgcactccgaactttacacctcacccgacctcgtccgaaaaaacacgacctaacgaaaccgccctaaccccaaatcccgaccccttaacgcgccaaccttaataaactaaacgaaaccccccaacctaatcccaacgactctaaacgcgcgaccacgaaaacccgccgaaaactccgcgccacttaaaaaaaccgaacccccaatctccgacgcctcccgcgaactaaaaccccgaaccaataccctcgacacgtacctctacgcctcgaactcctcccgaaaacgaaaccttaaaaaccaaaaccgcgacctccctacgcgtcgcgaaaactaaacgaatataaccccgtcccgccaaacacctaaaataaaaactacgctccgccactcgaccaaaccccgaactttccttcctcaccgtcgacgcccccaaactccaaccgctcaaaccccgacttaaaaaacaacctcgaccccgcctctaccttctaacccatccctaaaaataaccgaacacccc

SEQ ID NO: 17745 - DNA, 652 bp, Artificial Sequence
  chemically treated genomic DNA (Homo sapiens) CpG-island No: 17745
acgtaggcgttcgatttttttttattttttgtcgggtattttaatagttcggggtttacgtcgggtgtttcgtcgtttgtttttttagtattcgggttcgcggggtcgtcgtcgtagatcgggggtcggggtcggagcgtcgcggcggggacgggcgcggggataagttgggttgcgagggcggtagggttaaggcgggcgcggagtagagcgcgagcgagttgcgttgtaggcgcgtcggggtcgtcgtttaggtttagagtcggattagagttgcggggggcgttttagacgcgtagtagttgcgttaggacgcgcgtttgttgatttttagttttttgcgtttcggttcgcgttcgtttttgacgttcggtttttagtagatgcgttagcgttcgcgttagtttttgtatcgttttcgtcgttttatttcggggtattgatcgtcggaagcggcgaggagcgttagttttagttaagggcggagacgttgcgtttaggtcgcggggtttttgcgggaaaatgaggtgggggaaaagagtttgttagcgttcgtcgagatagggatttttagttcgggaagtttcgtaggttttaaatattttagatgttattaaaagtatcgtgattatttaaatatattcggatattt

SEQ ID NO: 17746 - DNA, 652 bp, Artificial Sequence
  chemically treated genomic DNA (Homo sapiens) CpG-island No: 17746
aaatatccgaatatatttaaataatcacgatacttttaataacatctaaaatatttaaaacctacgaaacttcccgaactaaaaatccctatctcgacgaacgctaacaaactcttttcccccacctcattttcccgcaaaaaccccgcgacctaaacgcaacgtctccgcccttaactaaaactaacgctcctcgccgcttccgacgatcaataccccgaaataaaacgacgaaaacgatacaaaaactaacgcgaacgctaacgcatctactaaaaaccgaacgtcaaaaacgaacgcgaaccgaaacgcaaaaaactaaaaatcaacaaacgcgcgtcctaacgcaactactacgcgtctaaaacgccccccgcaactctaatccgactctaaacctaaacgacgaccccgacgcgcctacaacgcaactcgctcgcgctctactccgcgcccgccttaaccctaccgccctcgcaacccaacttatccccgcgcccgtccccgccgcgacgctccgaccccgacccccgatctacgacgacgaccccgcgaacccgaatactaaaaaaacaaacgacgaaacacccgacgtaaaccccgaactattaaaatacccgacaaaaaataaaaaaaaatcgaacgcctacgt

SEQ ID NO: 17747 - DNA, 652 bp, Artificial Sequence
  chemically treated genomic DNA (Homo sapiens) CpG-island No: 17747
gggtgttcgggtatatttggatggttacggtgtttttggtggtatttgggatgtttgaggtttacgaagtttttcgggttgggggtttttgtttcgacggacgttgataaattttttttttttattttattttttcgtaggagtttcgcggtttaagcgtagcgttttcgtttttggttgagattggcgtttttcgtcgttttcggcggttagtgtttcgaggtgaggcggcgggggcggtgtaggagttggcgcgggcgttggcgtatttgttggaggtcgaacgttaggagcgggcgcgggtcgaggcgtaggaggttgaggattagtaggcgcgcgttttggcgtagttgttgcgcgtttggggcgtttttcgtaattttgattcggttttgggtttggacgacgatttcgacgcgtttgtagcgtagttcgttcgcgttttgtttcgcgttcgttttgattttgtcgttttcgtagtttagtttgttttcgcgttcgttttcgtcgcggcgtttcgatttcggttttcggtttacgacgacggtttcgcgggttcggatgttgaggaggtaggcgacgagatattcgacgtggatttcgagttgttgaggtgttcggtagggggtggggaggggtcgggcgtttgcgt

SEQ ID NO: 17748 - DNA, 652 bp, Artificial Sequence
  chemically treated genomic DNA (Homo sapiens) CpG-island No: 17748
acgcaaacgcccgacccctccccaccccctaccgaacacctcaacaactcgaaatccacgtcgaatatctcgtcgcctacctcctcaacatccgaacccgcgaaaccgtcgtcgtaaaccgaaaaccgaaatcgaaacgccgcgacgaaaacgaacgcgaaaacaaactaaactacgaaaacgacaaaatcaaaacgaacgcgaaacaaaacgcgaacgaactacgctacaaacgcgtcgaaatcgtcgtccaaacccaaaaccgaatcaaaattacgaaaaacgccccaaacgcgcaacaactacgccaaaacgcgcgcctactaatcctcaacctcctacgcctcgacccgcgcccgctcctaacgttcgacctccaacaaatacgccaacgcccgcgccaactcctacaccgcccccgccgcctcacctcgaaacactaaccgccgaaaacgacgaaaaacgccaatctcaaccaaaaacgaaaacgctacgcttaaaccgcgaaactcctacgaaaaaataaaataaaaaaaaaaaatttatcaacgtccgtcgaaacaaaaacccccaacccgaaaaacttcgtaaacctcaaacatcccaaataccaccaaaaacaccgtaaccatccaaatatacccgaacaccc

SEQ ID NO: 17749 - DNA, 739 bp, Artificial Sequence
  chemically treated genomic DNA (Homo sapiens) CpG-island No: 17749
attacggtatttttttaggatatttggaagcgtttaaattaaagaatatatatttttaaggatacgatatttttatatcgttttttttatattatacgtatatatattgatgcgcgcgcgtttttttttaaagcgttttagtgtcgtggatagcgttataggtatcgggtacggagaggtgggtagggtacggttatcggcggcgtttcggataacgttattcgtataggtagagattaagttaggttttaggtgtgtcggcgtggtttgggcgcggatcggcggtcggagttcgggttattttcgtcgattttttcgtacgtttcgggagtcggttcgggcgggggtgaggcggcgtagttttaattttaattttcgtcggtggtatttttttttaatttttatttttcgtcggattggggtcgtatttttatcggtcgcgcgtagagcgcggggggcggtcgaaataggtcgagtagtagtagtattaaaaggtcgacgttttcggttcgcggtttttagagtagcggcgatttcgttatgttgttttagcgagtcgggtttcggacgggcggattggttggtaagtgcgtagtgtcggggcgagttggcgaggttgcggcgttttgcggttgcgtacgttcggaattaggtttttttttttcgtttttattttatttattcgatcgacgtaggcgtagtttggggagttggtagttttattagatttttcgtcgtt

SEQ ID NO: 17750 - DNA, 739 bp, Artificial Sequence
  chemically treated genomic DNA (Homo sapiens) CpG-island No: 17750
aacgacgaaaaatctaataaaactaccaactccccaaactacgcctacgtcgatcgaataaataaaataaaaacgaaaaaaaaaaacctaattccgaacgtacgcaaccgcaaaacgccgcaacctcgccaactcgccccgacactacgcacttaccaaccaatccgcccgtccgaaacccgactcgctaaaacaacataacgaaatcgccgctactctaaaaaccgcgaaccgaaaacgtcgaccttttaatactactactactcgacctatttcgaccgccccccgcgctctacgcgcgaccgataaaaatacgaccccaatccgacgaaaaataaaaattaaaaaaaaataccaccgacgaaaattaaaattaaaactacgccgcctcacccccgcccgaaccgactcccgaaacgtacgaaaaaatcgacgaaaataacccgaactccgaccgccgatccgcgcccaaaccacgccgacacacctaaaacctaacttaatctctacctatacgaataacgttatccgaaacgccgccgataaccgtaccctacccacctctccgtacccgatacctataacgctatccacgacactaaaacgctttaaaaaaaaacgcgcgcgcatcaatatatatacgtataatataaaaaaaacgatataaaaatatcgtatccttaaaaatatatattctttaatttaaacgcttccaaatatcctaaaaaaataccgtaat

SEQ ID NO: 17751 - DNA, 739 bp, Artificial Sequence
  chemically treated genomic DNA (Homo sapiens) CpG-island No: 17751
ggcgacgggaggtttggtggggttgttagttttttaggttgcgtttgcgtcggtcgggtgggtggggtgggggcggggagggggggtttggtttcgggcgtgcgtagtcgtagagcgtcgtagtttcgttagttcgtttcggtattgcgtatttgttagttagttcgttcgttcggagttcggttcgttggggtagtatggcggggtcgtcgttgttttgggggtcgcgggtcgggggcgtcggttttttggtgttgttgttgttcggtttgtttcggtcgtttttcgcgttttgcgcgcggtcggtaaaggtgcgattttagttcggcgaggggtgggggttgggggaggatgttatcggcgagggttggggttggggttgcgtcgttttattttcgttcgagtcggttttcgggacgtgcggagagatcgacgagggtggttcgggtttcggtcgtcggttcgcgtttaggttacgtcggtatatttgagatttgatttggtttttgtttgtgcgggtggcgttgttcggggcgtcgtcggtaatcgtgttttgtttattttttcgtgttcggtgtttgtgacgttgtttacggtattaaggcgttttaagaaagggcgcgcgcgtattagtgtgtgtgcgtgtgatgtgaggagagcggtgtggaggtgtcgtgtttttgaaagtgtgtgttttttggtttgagcgtttttaagtgttttagaaaggtgtcgtggt

SEQ ID NO: 17752 - DNA, 739 bp, Artificial Sequence
  chemically treated genomic DNA (Homo sapiens) CpG-island No: 17752
accacgacacctttctaaaacacttaaaaacgctcaaaccaaaaaacacacactttcaaaaacacgacacctccacaccgctctcctcacatcacacgcacacacactaatacgcgcgcgccctttcttaaaacgccttaataccgtaaacaacgtcacaaacaccgaacacgaaaaaataaacaaaacacgattaccgacgacgccccgaacaacgccacccgcacaaacaaaaaccaaatcaaatctcaaatataccgacgtaacctaaacgcgaaccgacgaccgaaacccgaaccaccctcgtcgatctctccgcacgtcccgaaaaccgactcgaacgaaaataaaacgacgcaaccccaaccccaaccctcgccgataacatcctcccccaacccccacccctcgccgaactaaaatcgcacctttaccgaccgcgcgcaaaacgcgaaaaacgaccgaaacaaaccgaacaacaacaacaccaaaaaaccgacgcccccgacccgcgacccccaaaacaacgacgaccccgccatactaccccaacgaaccgaactccgaacgaacgaactaactaacaaatacgcaataccgaaacgaactaacgaaactacgacgctctacgactacgcacgcccgaaaccaaaccccccctccccgcccccaccccacccacccgaccgacgcaaacgcaacctaaaaaactaacaaccccaccaaacctcccgtcgcc

SEQ ID NO: 17753 - DNA, 506 bp, Artificial Sequence
  chemically treated genomic DNA (Homo sapiens) CpG-island No: 17753
ttttacgcgaggtttttagtttcggttttttagttcgttttttcgtttttaaacgtggtgttgttttcgttttattttaggtgatttcggttttttagtttcgttttagttagcggtcggaggaggtttcgaacgtcgtcgtaagcggttaagttattcgggtcgagggtacgtagaaggatcgtttttaggtttcgcgggtgggttcggtcgttcgtagtttggagattgcgtagttggattcgcgcgcgggagaggggcggggtttggcggtgggaggaggtgggtttagaggttgtcgagggcgggagtttgcgggtttcggggagcgtggagaggcgtagtttcggaggagtcgggtggttgtaggaaggaggtggggttcgtcgcgggtttaggggacggtgttgagcgaaacgattagggcgggttcgaggggtagggtcggagattaagggagcgtggagtttttaggattttcggaagggaagggtttttaggagtta

SEQ ID NO: 17754 - DNA, 506 bp, Artificial Sequence
  chemically treated genomic DNA (Homo sapiens) CpG-island No: 17754
taactcctaaaaacccttcccttccgaaaatcctaaaaactccacgctcccttaatctccgaccctacccctcgaacccgccctaatcgtttcgctcaacaccgtcccctaaacccgcgacgaaccccacctccttcctacaaccacccgactcctccgaaactacgcctctccacgctccccgaaacccgcaaactcccgccctcgacaacctctaaacccacctcctcccaccgccaaaccccgcccctctcccgcgcgcgaatccaactacgcaatctccaaactacgaacgaccgaacccacccgcgaaacctaaaaacgatccttctacgtaccctcgacccgaataacttaaccgcttacgacgacgttcgaaacctcctccgaccgctaactaaaacgaaactaaaaaaccgaaatcacctaaaataaaacgaaaacaacaccacgtttaaaaacgaaaaaacgaactaaaaaaccgaaactaaaaacctcgcgtaaaa

SEQ ID NO: 17755 - DNA, 506 bp, Artificial Sequence
  chemically treated genomic DNA (Homo sapiens) CpG-island No: 17755
tagtttttggaggtttttttttttcgagagttttggaggttttacgtttttttggttttcggttttgtttttcggattcgttttggtcgtttcgtttaatatcgttttttgagttcgcggcgggttttattttttttttataattattcggttttttcgaggttgcgtttttttacgtttttcgagattcgtaggttttcgttttcggtagtttttggatttatttttttttatcgttaggtttcgtttttttttcgcgcgcgggtttagttgcgtagtttttaggttgcgggcggtcggatttattcgcggggtttaggagcggtttttttgcgtgttttcggttcgggtggtttgatcgtttgcggcgacgttcggggtttttttcggtcgttggttggggcggggttggggggtcggagttatttggagtggggcgggagtagtattacgtttagaagcgagggagcgggttgggaaatcgaggttaggggtttcgcgtgaga

SEQ ID NO: 17756 - DNA, 506 bp, Artificial Sequence
  chemically treated genomic DNA (Homo sapiens) CpG-island No: 17756
tctcacgcgaaacccctaacctcgatttcccaacccgctccctcgcttctaaacgtaatactactcccgccccactccaaataactccgaccccccaaccccgccccaaccaacgaccgaaaaaaaccccgaacgtcgccgcaaacgatcaaaccacccgaaccgaaaacacgcaaaaaaaccgctcctaaaccccgcgaataaatccgaccgcccgcaacctaaaaactacgcaactaaacccgcgcgcgaaaaaaaaacgaaacctaacgataaaaaaaaataaatccaaaaactaccgaaaacgaaaacctacgaatctcgaaaaacgtaaaaaaacgcaacctcgaaaaaaccgaataattataaaaaaaaaataaaacccgccgcgaactcaaaaaacgatattaaacgaaacgaccaaaacgaatccgaaaaacaaaaccgaaaaccaaaaaaacgtaaaacctccaaaactctcgaaaaaaaaaaacctccaaaaacta

SEQ ID NO: 17757 - DNA, 901 bp, Artificial Sequence
  chemically treated genomic DNA (Homo sapiens) CpG-island No: 17757
tttttttttcgacggtgagttcgtttaattatgtttcgtttttttttaattcggtataattgggaaaaattaagagcgatcgcgggaagtatttatcgttttcgtcggtttttaataggtttattcgtgtttcgttttttattgataaaggcgatttgggaaaaattattggcggtaattttggggattttcggttaatatcgtattatttttagtcgggatggatcgtttagcgtgttttttttcgttaatagggttaggagattacgaagttaggagaaatatggcgtggttcggttttcgtcgtattttttttggttgtggttttttataacggagttcgaatgataggaatcgagtgggggtagcgggagatacgttaagagtttttcgagtttggtatatggttttgtgcggtcgatgtttttttcgttcgatttttacggttggttttggcgtcgtagtaatatttcggatgtttgtgtttattgtcgtattagggttttcgagcgtatttttttatggcgttggcgtttggtcgcgtagttaggttacgtttttagcgtagacgtatatcggcgtcggagtttttcgtttattatcgggtagcgattgggtcgttatatcgtatgttacgttaaggacgtatttttattggttaatcgagtttttgttatttgtttattgttttttgagcgtagtttagttatttttaggttcggggagtgaaggtttcgttgagagaaggttttattcggtgttttgggaagagagtcgtgtgggtttaggtatcgtagcggcgatacgagagagacgggcggtgtgatagttttttattatttgtacgagtgtattggtaacgttggggtgggtgtatttttttggagttggaggaagtgtt

SEQ ID NO: 17758 - DNA, 901 bp, Artificial Sequence
  chemically treated genomic DNA (Homo sapiens) CpG-island No: 17758
aacacttcctccaactccaaaaaaatacacccaccccaacgttaccaatacactcgtacaaataataaaaaactatcacaccgcccgtctctctcgtatcgccgctacgatacctaaacccacacgactctcttcccaaaacaccgaataaaaccttctctcaacgaaaccttcactccccgaacctaaaaataactaaactacgctcaaaaaacaataaacaaataacaaaaactcgattaaccaataaaaatacgtccttaacgtaacatacgatataacgacccaatcgctacccgataataaacgaaaaactccgacgccgatatacgtctacgctaaaaacgtaacctaactacgcgaccaaacgccaacgccataaaaaaatacgctcgaaaaccctaatacgacaataaacacaaacatccgaaatattactacgacgccaaaaccaaccgtaaaaatcgaacgaaaaaaacatcgaccgcacaaaaccatataccaaactcgaaaaactcttaacgtatctcccgctacccccactcgattcctatcattcgaactccgttataaaaaaccacaaccaaaaaaaatacgacgaaaaccgaaccacgccatatttctcctaacttcgtaatctcctaaccctattaacgaaaaaaaacacgctaaacgatccatcccgactaaaaataatacgatattaaccgaaaatccccaaaattaccgccaataatttttcccaaatcgcctttatcaataaaaaacgaaacacgaataaacctattaaaaaccgacgaaaacgataaatacttcccgcgatcgctcttaatttttcccaattataccgaattaaaaaaaaacgaaacataattaaacgaactcaccgtcgaaaaaaaaa

SEQ ID NO: 17759 - DNA, 901 bp, Artificial Sequence
  chemically treated genomic DNA (Homo sapiens) CpG-island No: 17759
agtattttttttagttttaaaagagtgtatttattttaacgttattaatatattcgtgtaggtagtggaaggttgttatatcgttcgtttttttcgtgtcgtcgttacgatatttgggtttatacgattttttttttaaaatatcgaatgagatttttttttaacgaggtttttatttttcgagtttgaaagtaattggattacgtttaggaggtaatgaataaatggtagaaattcgattggttaatgagagtgcgtttttggcgtgatatgcggtatagcgatttaatcgttgttcggtaataggcggaaagtttcgacgtcggtgtgcgtttacgttgggggcgtggtttgattgcgcggttagacgttagcgttatggaggagtacgttcgggagttttggtacggtaatgggtataggtattcggaatattgttgcgacgttaaggttagtcgtgggggtcgggcgggggaggtatcggtcgtatagagttatgtattagattcgggggatttttaacgtatttttcgttatttttattcggtttttgttattcgggtttcgttatgaggggttataattagagaaggtgcggcgaaggtcgaattacgttatgttttttttgatttcgtaattttttagttttgttaacgaaaaaagatacgttggacgatttatttcggttaggggtggtacggtgttgatcggaaatttttagagttgtcgttagtggttttttttaggtcgtttttgttagtggggggcggggtacggatgaatttgttgagggtcggcggggacggtggatgtttttcgcggtcgtttttggttttttttagttgtgtcggattgaaaaggggcggggtatggttggacgggtttatcgtcggagaagggg

SEQ ID NO: 17760 - DNA, 901 bp, Artificial Sequence
  chemically treated genomic DNA (Homo sapiens) CpG-island No: 17760
ccccttctccgacgataaacccgtccaaccataccccgccccttttcaatccgacacaactaaaaaaaaccaaaaacgaccgcgaaaaacatccaccgtccccgccgaccctcaacaaattcatccgtaccccgccccccactaacaaaaacgacctaaaaaaaaccactaacgacaactctaaaaatttccgatcaacaccgtaccacccctaaccgaaataaatcgtccaacgtatcttttttcgttaacaaaactaaaaaattacgaaatcaaaaaaaacataacgtaattcgaccttcgccgcaccttctctaattataacccctcataacgaaacccgaataacaaaaaccgaataaaaataacgaaaaatacgttaaaaatcccccgaatctaatacataactctatacgaccgatacctcccccgcccgacccccacgactaaccttaacgtcgcaacaatattccgaatacctatacccattaccgtaccaaaactcccgaacgtactcctccataacgctaacgtctaaccgcgcaatcaaaccacgcccccaacgtaaacgcacaccgacgtcgaaactttccgcctattaccgaacaacgattaaatcgctataccgcatatcacgccaaaaacgcactctcattaaccaatcgaatttctaccatttattcattacctcctaaacgtaatccaattactttcaaactcgaaaaataaaaacctcgttaaaaaaaaatctcattcgatattttaaaaaaaaaatcgtataaacccaaatatcgtaacgacgacacgaaaaaaacgaacgatataacaaccttccactacctacacgaatatattaataacgttaaaataaatacactcttttaaaactaaaaaaaatact

SEQ ID NO: 17761 - DNA, 824 bp, Artificial Sequence
  chemically treated genomic DNA (Homo sapiens) CpG-island No: 17761
atacgtcggtttatacgggatgtttttttttattttagtgaggaatattttcgatttttagcgatttcgattttcgttttttatgcgattgttcgggtagattgttttattcgtattggcggttttcggttttaatgtattcgcggaaatcgtttttggttcgggcgtcgcggtggaattattagttttaatcgttgttatgttggtatttgttcggttcgttttttcggtaatagaaaaattattttcgcgttcgttattttcgttgtcgggttatttgagtgaaggtggagcgagagtcgggatcgttagggtggtggtttttttttttcgtttttaaaagtttaatgtatgaatagtttcgggatttttaaatttcgtcggatcgggaggtcggggatacggttcgatcggtttatttattatttttatagagttttatcggtttatttttgttattagattcgttttattttgtcgttcgttcgttttattgatcgcgttttttagattatttttcgattttgttttttagatttattggtttagttattttttttatttcggttttttattggtagtttttttataaggcgtcgtttttttcgtattagaaattattaggtgttttatggttggattgaaatttcgttttttcgttttttagcgaggtttcgttttttggagagtatacgggaatttggggacgaagaaattttgatttggcggggtcggggtgagggcgtattggtattaggtgcgagttaggaatgttaagttagtagataaaagtagagtaggtgaggataaataagtgaaaatgt

SEQ ID NO: 17762 - DNA, 824 bp, Artificial Sequence
  chemically treated genomic DNA (Homo sapiens) CpG-island No: 17762
acattttcacttatttatcctcacctactctacttttatctactaacttaacattcctaactcgcacctaataccaatacgccctcaccccgaccccgccaaatcaaaatttcttcgtccccaaattcccgtatactctccaaaaaacgaaacctcgctaaaaaacgaaaaaacgaaatttcaatccaaccataaaacacctaataatttctaatacgaaaaaaacgacgccttataaaaaaactaccaataaaaaaccgaaataaaaaaaataactaaaccaataaatctaaaaaacaaaatcgaaaaataatctaaaaaacgcgatcaataaaacgaacgaacgacaaaataaaacgaatctaataacaaaaataaaccgataaaactctataaaaataataaataaaccgatcgaaccgtatccccgacctcccgatccgacgaaatttaaaaatcccgaaactattcatacattaaacttttaaaaacgaaaaaaaaaaaccaccaccctaacgatcccgactctcgctccaccttcactcaaataacccgacaacgaaaataacgaacgcgaaaataatttttctattaccgaaaaaacgaaccgaacaaataccaacataacaacgattaaaactaataattccaccgcgacgcccgaaccaaaaacgatttccgcgaatacattaaaaccgaaaaccgccaatacgaataaaacaatctacccgaacaatcgcataaaaaacgaaaatcgaaatcgctaaaaatcgaaaatattcctcactaaaataaaaaaaaacatcccgtataaaccgacgtat

SEQ ID NO: 17763 - DNA, 824 bp, Artificial Sequence
  chemically treated genomic DNA (Homo sapiens) CpG-island No: 17763
gtatttttatttgtttatttttatttgttttgtttttatttgttagtttaatatttttgattcgtatttgatgttagtacgtttttatttcgatttcgttaggttaaagttttttcgtttttagattttcgtgtgttttttagggggcgaggtttcgttggaagacgggaaagcggaattttagtttaattatgaagtatttggtagtttttgatacggaaagggcggcgttttatggagaagttgttaataaagagtcgagatgaaaggggtggttgaattaatgagtttaggagataagatcgggggatgatttggaaagcgcgattagtgaagcggacgaacggtaggataaggcgggtttagtgataggaatgggtcgatgaagttttgtagggatggtgggtaggtcgatcgggtcgtgttttcggtttttcgattcgacggaatttggaaatttcggggttatttatatattgagtttttaggagcggaggagaaaagttattattttgacgatttcggttttcgttttatttttatttaggtggttcggtagcggaagtgacgaacgcggaagtggtttttttgttgtcgaggggacgggtcgggtagatgttaatatggtagcggttggggttggtggttttatcgcggcgttcgggttaggggcggttttcgcgggtgtattggagtcggggatcgttagtgcgggtgagatagtttgttcgagtagtcgtatgggaggcggaggtcgggatcgttgggagtcgggaatgttttttattaaagtgagagggagtatttcgtgtggatcgacgtgt

SEQ ID NO: 17764 - DNA, 824 bp, Artificial Sequence
  chemically treated genomic DNA (Homo sapiens) CpG-island No: 17764
acacgtcgatccacacgaaatactccctctcactttaataaaaaacattcccgactcccaacgatcccgacctccgcctcccatacgactactcgaacaaactatctcacccgcactaacgatccccgactccaatacacccgcgaaaaccgcccctaacccgaacgccgcgataaaaccaccaaccccaaccgctaccatattaacatctacccgacccgtcccctcgacaacaaaaaaaccacttccgcgttcgtcacttccgctaccgaaccacctaaataaaaataaaacgaaaaccgaaatcgtcaaaataataacttttctcctccgctcctaaaaactcaatatataaataaccccgaaatttccaaattccgtcgaatcgaaaaaccgaaaacacgacccgatcgacctacccaccatccctacaaaacttcatcgacccattcctatcactaaacccgccttatcctaccgttcgtccgcttcactaatcgcgctttccaaatcatcccccgatcttatctcctaaactcattaattcaaccacccctttcatctcgactctttattaacaacttctccataaaacgccgccctttccgtatcaaaaactaccaaatacttcataattaaactaaaattccgctttcccgtcttccaacgaaacctcgccccctaaaaaacacacgaaaatctaaaaacgaaaaaactttaacctaacgaaatcgaaataaaaacgtactaacatcaaatacgaatcaaaaatattaaactaacaaataaaaacaaaacaaataaaaataaacaaataaaaatac

SEQ ID NO: 17765 - DNA, 854 bp, Artificial Sequence
  chemically treated genomic DNA (Homo sapiens) CpG-island No: 17765
ttatattcgtttttattgttgtagtttgcgtcgatttttttacgttcgggattgttttcgttaatcgcgttaatttcgggagtttgacgtcgtcgtttgttgtgtttaggttcggagtagtagtcgtttacgtttacggtattatttatatttattattacgttcgcggtatttatattcgtcgtcgttgcgtttagcgcgtcgtcgggatcgtcgtcgggattatttgggttttcgtaaggaggtggagaagtttgttgtggtcggggattcgttattgtattaggcggtacggttagcgtttagcgatgaagagcgttcggcggttttggtagcgggttttgaggcggtggcgaagttcgcggacgggtttttacgacgtcggagttacggtcgcgatcgtcgtcgtttacgttcgtgtcgtcgtcgtttacgtttatattttcgtcgcgtcgcggcgtcgggggtatcggttcgggcggcggcggttcgttggcggggtcggcgtcgggaggcggcggtttttttttggggagtatagttatggttgtattgtcgagtattttttaataaattcggcgcggggtacgtcgggagagaattcggatgagggggttagtgtagtgcgcgaggtacgacgggaacggcgagattcggataaagggatcgcggtatcggttcgagaattttcggcggcggaggcggcggcggcggcggcggcggcggtggcggcgcgcgggttacgtcgagaggagaattcggatgtaaagtttaagatgaaggtagtgcggcgagtttgttttagttttttttttaagtttagtaagtttattgttacgtttgtttcggttttt

SEQ ID NO: 17766 - DNA, 854 bp, Artificial Sequence
  chemically treated genomic DNA (Homo sapiens) CpG-island No: 17766
aaaaaccgaaacaaacgtaacaataaacttactaaacttaaaaaaaaaactaaaacaaactcgccgcactaccttcatcttaaactttacatccgaattctcctctcgacgtaacccgcgcgccgccaccgccgccgccgccgccgccgccgcctccgccgccgaaaattctcgaaccgataccgcgatccctttatccgaatctcgccgttcccgtcgtacctcgcgcactacactaaccccctcatccgaattctctcccgacgtaccccgcgccgaatttattaaaaaatactcgacaatacaaccataactatactccccaaaaaaaaaccgccgcctcccgacgccgaccccgccaacgaaccgccgccgcccgaaccgatacccccgacgccgcgacgcgacgaaaatataaacgtaaacgacgacgacacgaacgtaaacgacgacgatcgcgaccgtaactccgacgtcgtaaaaacccgtccgcgaacttcgccaccgcctcaaaacccgctaccaaaaccgccgaacgctcttcatcgctaaacgctaaccgtaccgcctaatacaataacgaatccccgaccacaacaaacttctccacctccttacgaaaacccaaataatcccgacgacgatcccgacgacgcgctaaacgcaacgacgacgaatataaataccgcgaacgtaataataaatataaataataccgtaaacgtaaacgactactactccgaacctaaacacaacaaacgacgacgtcaaactcccgaaattaacgcgattaacgaaaacaatcccgaacgtaaaaaaatcgacgcaaactacaacaataaaaacgaatataa

SEQ ID NO: 17767 - DNA, 854 bp, Artificial Sequence
  chemically treated genomic DNA (Homo sapiens) CpG-island No: 17767
gaaggtcggaataagcgtagtaataaatttgttggatttggagagaaggttaagataaattcgtcgtattgtttttattttggattttatattcgggtttttttttcggcgtgattcgcgcgtcgttatcgtcgtcgtcgtcgtcgtcgtcgttttcgtcgtcgagggttttcgaatcggtgtcgcgatttttttattcgggtttcgtcgttttcgtcgtgtttcgcgtattatattagtttttttattcgggttttttttcggcgtgtttcgcgtcgggtttgttggggggtattcggtagtgtagttatgattatattttttaaaaagaagtcgtcgtttttcgacgtcgatttcgttaacgagtcgtcgtcgttcgggtcgatgttttcggcgtcgcggcgcggcggaggtgtgggcgtgggcggcggcggtacgggcgtgggcggcggcgatcgcgatcgtgatttcggcgtcgtgggggttcgttcgcgagtttcgttatcgttttaaggttcgttattaggatcgtcgggcgttttttatcgttgggcgttggtcgtgtcgtttggtgtagtggcgggttttcggttataataggtttttttatttttttgcgggggtttaggtggtttcggcggcggtttcggcgacgcgttgggcgtagcggcggcgggtgtgggtgtcgcgggcgtggtggtgggtgtgggtggtgtcgtaggcgtgggcggttgttgtttcgggtttgggtatagtaagcggcgacgttaagttttcggggttggcgcggttggcgggggtagtttcgagcgtgaggaggtcggcgtaggttataatagtgaggacgagtatga

SEQ ID NO: 17768 - DNA, 854 bp, Artificial Sequence
  chemically treated genomic DNA (Homo sapiens) CpG-island No: 17768
tcatactcgtcctcactattataacctacgccgacctcctcacgctcgaaactacccccgccaaccgcgccaaccccgaaaacttaacgtcgccgcttactatacccaaacccgaaacaacaaccgcccacgcctacgacaccacccacacccaccaccacgcccgcgacacccacacccgccgccgctacgcccaacgcgtcgccgaaaccgccgccgaaaccacctaaacccccgcaaaaaaataaaaaaacctattataaccgaaaacccgccactacaccaaacgacacgaccaacgcccaacgataaaaaacgcccgacgatcctaataacgaaccttaaaacgataacgaaactcgcgaacgaacccccacgacgccgaaatcacgatcgcgatcgccgccgcccacgcccgtaccgccgccgcccacgcccacacctccgccgcgccgcgacgccgaaaacatcgacccgaacgacgacgactcgttaacgaaatcgacgtcgaaaaacgacgacttctttttaaaaaatataatcataactacactaccgaataccccccaacaaacccgacgcgaaacacgccgaaaaaaaacccgaataaaaaaactaatataatacgcgaaacacgacgaaaacgacgaaacccgaataaaaaaatcgcgacaccgattcgaaaaccctcgacgacgaaaacgacgacgacgacgacgacgacgataacgacgcgcgaatcacgccgaaaaaaaaacccgaatataaaatccaaaataaaaacaatacgacgaatttatcttaaccttctctccaaatccaacaaatttattactacgcttattccgaccttc

SEQ ID NO: 17769 - DNA, 652 bp, Artificial Sequence
  chemically treated genomic DNA (Homo sapiens) CpG-island No: 17769
ggtaatttgcgcgtcgcgtcgttgtagttacgtagtgcgtggatttagtcgttttggtcgtgttcgttgtatgtcgggaaacgtagttcgcgagtttcggatacgtcgataatagatgacggggtttacgttgtacgtttatattaggtttcggttcgtcggaatttgggcgatttacgatgtcgagtttgttacgttgcgatagtttataggtttgttttttcgggtattcgggtggattacgaatataaattgaagttttaggatttgtcgttcgtttgcgttttcgtcgaggtataggttgttcgcggattattttgtttcgaaaattaaggtgggttttggggcgcggaggataggaatgcgggcggaggttattgaggtacgtttgtattgtttcgtttgcggggaaaggagggaggttcgttttgggcgtcgtagttgtgtatggttcgggcggttggtatcgggtgggttttagatttaaggtttgtttgtagaaggggattagtagacggggtggattcgaggtggggatatgggacgtagcggtcggagtcgtttggaggggtattcggtggtttcgatggagttattatttttgaggtattgatgaggagggacggggagtgtggttagaaggttgttttgg

SEQ ID NO: 17770 - DNA, 652 bp, Artificial Sequence
  chemically treated genomic DNA (Homo sapiens) CpG-island No: 17770
ccaaaacaaccttctaaccacactccccgtccctcctcatcaatacctcaaaaataataactccatcgaaaccaccgaatacccctccaaacgactccgaccgctacgtcccatatccccacctcgaatccaccccgtctactaatccccttctacaaacaaaccttaaatctaaaacccacccgataccaaccgcccgaaccatacacaactacgacgcccaaaacgaacctccctcctttccccgcaaacgaaacaatacaaacgtacctcaataacctccgcccgcattcctatcctccgcgccccaaaacccaccttaattttcgaaacaaaataatccgcgaacaacctatacctcgacgaaaacgcaaacgaacgacaaatcctaaaacttcaatttatattcgtaatccacccgaatacccgaaaaaacaaacctataaactatcgcaacgtaacaaactcgacatcgtaaatcgcccaaattccgacgaaccgaaacctaatataaacgtacaacgtaaaccccgtcatctattatcgacgtatccgaaactcgcgaactacgtttcccgacatacaacgaacacgaccaaaacgactaaatccacgcactacgtaactacaacgacgcgacgcgcaaattacc

SEQ ID NO: 17771 - DNA, 652 bp, Artificial Sequence
  chemically treated genomic DNA (Homo sapiens) CpG-island No: 17771
ttaaaatagttttttgattatatttttcgtttttttttattaatattttaaagatgatagttttatcgggattatcgggtatttttttaggcggtttcgatcgttgcgttttatgtttttatttcgaatttatttcgtttattggtttttttttgtagataaattttgggtttagaatttattcggtgttagtcgttcgaattatatatagttacggcgtttagggcggatttttttttttttttcgtaggcgggatagtgtaggcgtgttttaatagttttcgttcgtatttttgtttttcgcgttttagggtttattttagttttcggagtagggtggttcgcgagtagtttgtgtttcggcgagagcgtaaacgggcgataagttttagggttttagtttgtgttcgtagtttattcgaatgttcgggggggtaagtttatgggttgtcgtagcgtggtaaattcggtatcgtggatcgtttaggtttcggcgggtcgggatttgatgtgaacgtataacgtgagtttcgttatttattgtcgacgtattcggggttcgcgaattgcgtttttcggtatgtaacgggtacggttaaagcggttgaatttacgtattgcgtggttgtagcgacgcgacgcgtaagttgtt

SEQ ID NO: 17772 - DNA, 652 bp, Artificial Sequence
  chemically treated genomic DNA (Homo sapiens) CpG-island No: 17772
aacaacttacgcgtcgcgtcgctacaaccacgcaatacgtaaattcaaccgctttaaccgtacccgttacataccgaaaaacgcaattcgcgaaccccgaatacgtcgacaataaataacgaaactcacgttatacgttcacatcaaatcccgacccgccgaaacctaaacgatccacgataccgaatttaccacgctacgacaacccataaacttacccccccgaacattcgaataaactacgaacacaaactaaaaccctaaaacttatcgcccgtttacgctctcgccgaaacacaaactactcgcgaaccaccctactccgaaaactaaaataaaccctaaaacgcgaaaaacaaaaatacgaacgaaaactattaaaacacgcctacactatcccgcctacgaaaaaaaaaaaaaaatccgccctaaacgccgtaactatatataattcgaacgactaacaccgaataaattctaaacccaaaatttatctacaaaaaaaaaccaataaacgaaataaattcgaaataaaaacataaaacgcaacgatcgaaaccgcctaaaaaaatacccgataatcccgataaaactatcatctttaaaatattaataaaaaaaaacgaaaaatataatcaaaaaactattttaa

SEQ ID NO: 17773 - DNA, 666 bp, Artificial Sequence
  chemically treated genomic DNA (Homo sapiens) CpG-island No: 17773
ttggcgcgttttagtttttattttaaatttaatttaggtgaaaatggcgttacgcgcgggggcggggttagaggtataaagagagtgtttattggttgggagcggtacgggtcgtttttttcgttttattattggttcgtttcgtaaggtaagagaatttattaggggatgagttcgaattagggatgtgatagagcgcgagatttagtttaaagagagttcggagttagcgtgggaggtcgttgtcgtcgcgcgttttggtgagtgttttttattcggtttttgtttttttttttagtttttttcggttacgcggttagttttcggcgtgttagcgcgagattttttgttattcgttttttttatcgtttttttgcgtttgcgcgagatttttagttatcgtacggttgtttagaggatagaagattcgtttttttattgggtagcgggattggagggttttggttcggattgatcggttttgtgtttcgttttagcgttgtacgttagatatcggttttttaatattcgttttttttttgtaggttgacggcgttgtacgttttcgcggggaggttttggttttttaaacgttggtatcgagggttgtagttttgattcgtttttttttttttgttttttagttgtagtttttaggattacgtg

SEQ ID NO: 17774 - DNA, 666 bp, Artificial Sequence
  chemically treated genomic DNA (Homo sapiens) CpG-island No: 17774
cacgtaatcctaaaaactacaactaaaaaacaaaaaaaaaaaaacgaatcaaaactacaaccctcgataccaacgtttaaaaaaccaaaacctccccgcgaaaacgtacaacgccgtcaacctacaaaaaaaaaacgaatattaaaaaaccgatatctaacgtacaacgctaaaacgaaacacaaaaccgatcaatccgaaccaaaaccctccaatcccgctacccaataaaaaaacgaatcttctatcctctaaacaaccgtacgataactaaaaatctcgcgcaaacgcaaaaaaacgataaaaaaaacgaataacaaaaaatctcgcgctaacacgccgaaaactaaccgcgtaaccgaaaaaaactaaaaaaaaaaacaaaaaccgaataaaaaacactcaccaaaacgcgcgacgacaacgacctcccacgctaactccgaactctctttaaactaaatctcgcgctctatcacatccctaattcgaactcatcccctaataaattctcttaccttacgaaacgaaccaataataaaacgaaaaaaacgacccgtaccgctcccaaccaataaacactctctttatacctctaaccccgcccccgcgcgtaacgccattttcacctaaattaaatttaaaataaaaactaaaacgcgccaa

SEQ ID NO: 17775 - DNA, 666 bp, Artificial Sequence
  chemically treated genomic DNA (Homo sapiens) CpG-island No: 17775
tacgtagttttgaaaattgtaattgggggatagaggaaagaaaacgaattagaattataattttcggtgttagcgtttggaaagttagagttttttcgcgagagcgtgtaacgtcgttaatttgtagggaagagacggatattgaaaggtcggtgtttggcgtgtagcgttagaacggaatataaagtcggttaattcgaattagaattttttagtttcgttgtttaatgagaagacggattttttgttttttggataatcgtgcggtagttgggggtttcgcgtaggcgtaaaagggcggtggggggggcgggtggtaaagggtttcgcgttggtacgtcgagggttggtcgcgtagtcggggagagttgggggagggagtaggggtcgggtggagggtatttattaaggcgcgcgacggtagcggttttttacgttggtttcgggttttttttaggttgggtttcgcgttttgttatatttttagttcgggtttattttttagtgggtttttttgttttacggagcgagttaatggtgaagcgaagaaggcggttcgtgtcgtttttaattaatagatattttttttgtatttttagtttcgttttcgcgcgtggcgttatttttatttgagttaggtttggggtggagattgggacgcgttaa

SEQ ID NO: 17776 - DNA, 666 bp, Artificial Sequence
  chemically treated genomic DNA (Homo sapiens) CpG-island No: 17776
ttaacgcgtcccaatctccaccccaaacctaactcaaataaaaataacgccacgcgcgaaaacgaaactaaaaatacaaaaaaaatatctattaattaaaaacgacacgaaccgccttcttcgcttcaccattaactcgctccgtaaaacaaaaaaacccactaaaaaataaacccgaactaaaaatataacaaaacgcgaaacccaacctaaaaaaaacccgaaaccaacgtaaaaaaccgctaccgtcgcgcgccttaataaataccctccacccgacccctactccctcccccaactctccccgactacgcgaccaaccctcgacgtaccaacgcgaaaccctttaccacccgccccccccaccgcccttttacgcctacgcgaaacccccaactaccgcacgattatccaaaaaacaaaaaatccgtcttctcattaaacaacgaaactaaaaaattctaattcgaattaaccgactttatattccgttctaacgctacacgccaaacaccgacctttcaatatccgtctcttccctacaaattaacgacgttacacgctctcgcgaaaaaactctaactttccaaacgctaacaccgaaaattataattctaattcgttttctttcctctatcccccaattacaattttcaaaactacgta

SEQ ID NO: 17777 - DNA, 555 bp, Artificial Sequence
  chemically treated genomic DNA (Homo sapiens) CpG-island No: 17777
cgtacgtatttaggtttatatgaggcgagtgggcggtcggggttgtagttggcgttggttattgaggattttttgcgcgatagtgcgatcggttgtattttttgcgataggtgtcggtcggttggcgcgtaacgtttgttagcgtatagtttggtttttgttgcgttcggcgtcgaaaaacgggaagtcgtaaagttttttttcgtggtttatgtgcggcggcggtcgggtaaaaatttaacgatatagaattgttagtttagtagtcggttatatttcgttcggttattagtaggtagcgttcgtttatgcgcgtttttggaagaattagtagtttttatcgcgagttttgattggttttgcgtgagtggtagttttttgtgacgttataagggtgcgtttttcgtgacgttataagggcgggttttcgtcgatattatagaggtgggtcgttggcgacgttagaggcgcgggtgttcggttatattattggggcgttatggtgtttggagttgggtagtttttttattagagtggggattggtaagagtgatt

SEQ ID NO: 17778 - DNA, 555 bp, Artificial Sequence
  chemically treated genomic DNA (Homo sapiens) CpG-island No: 17778
aatcactcttaccaatccccactctaataaaaaaactacccaactccaaacaccataacgccccaataatataaccgaacacccgcgcctctaacgtcgccaacgacccacctctataatatcgacgaaaacccgcccttataacgtcacgaaaaacgcacccttataacgtcacaaaaaactaccactcacgcaaaaccaatcaaaactcgcgataaaaactactaattcttccaaaaacgcgcataaacgaacgctacctactaataaccgaacgaaatataaccgactactaaactaacaattctatatcgttaaatttttacccgaccgccgccgcacataaaccacgaaaaaaaactttacgacttcccgtttttcgacgccgaacgcaacaaaaaccaaactatacgctaacaaacgttacgcgccaaccgaccgacacctatcgcaaaaaatacaaccgatcgcactatcgcgcaaaaaatcctcaataaccaacgccaactacaaccccgaccgcccactcgcctcatataaacctaaatacgtacg

SEQ ID NO: 17779 - DNA, 555 bp, Artificial Sequence
  chemically treated genomic DNA (Homo sapiens) CpG-island No: 17779
ggttatttttattagtttttattttgatgagaaaattgtttagttttaggtattatggcgttttagtgatgtagtcgaatattcgcgtttttaacgtcgttaacggtttatttttatggtgtcggcgaagattcgtttttgtgacgttacggaaggcgtatttttgtgacgttataggggattattatttacgtagagttaattagaattcgcggtgggggttgttggtttttttaggagcgcgtatgagcggacgttgtttattggtggtcgggcgggatgtaatcggttgttgagttggtagttttgtgtcgttaggtttttgttcggtcgtcgtcgtatataagttacgaggaggagttttacgatttttcgtttttcggcgtcgggcgtagtaagggttagattatgcgttagtaggcgttgcgcgttaatcggtcggtatttgtcgtagaaggtgtaatcgatcgtattgtcgcgtagaagatttttaatggttaacgttagttgtagtttcggtcgtttattcgttttatatgagtttgggtacgtgcg

SEQ ID NO: 17780 - DNA, 555 bp, Artificial Sequence
  chemically treated genomic DNA (Homo sapiens) CpG-island No: 17780
cgcacgtacccaaactcatataaaacgaataaacgaccgaaactacaactaacgttaaccattaaaaatcttctacgcgacaatacgatcgattacaccttctacgacaaataccgaccgattaacgcgcaacgcctactaacgcataatctaacccttactacgcccgacgccgaaaaacgaaaaatcgtaaaactcctcctcgtaacttatatacgacgacgaccgaacaaaaacctaacgacacaaaactaccaactcaacaaccgattacatcccgcccgaccaccaataaacaacgtccgctcatacgcgctcctaaaaaaaccaacaacccccaccgcgaattctaattaactctacgtaaataataatcccctataacgtcacaaaaatacgccttccgtaacgtcacaaaaacgaatcttcgccgacaccataaaaataaaccgttaacgacgttaaaaacgcgaatattcgactacatcactaaaacgccataatacctaaaactaaacaattttctcatcaaaataaaaactaataaaaataacc

SEQ ID NO: 17781 - DNA, 501 bp, Artificial Sequence
  chemically treated genomic DNA (Homo sapiens) CpG-island No: 17781
tagttcgcgtgtttttgtagttcgtcgggcgtttaggttacgtttttgggcgatattggtttttcgattggatagtttaatggaggtgtggtcggaagaggcgagttttattggtagaggcgggatcgacggtgtgtgcggaatatggcggagcgcggtaggaagcggtcgtgcggttcggtaagtgcgggcggcgggatttcgtgtagggtagtatggtggaggcgtgagaattagtggcgtgggggttttcgtcggggtcgggtcgcgttttttgttgtttgtttttcgttgattttaggtcggaagttttcgaaggtgtcgcgtgagttttagtaggatgggaatagcgttcgtgtttttttcggaattttttgcggttttttggttttcgttggattacggaggcgggattttgttcgttttcggatgttgaattcggagttttttcgtggtttttggagtttttttttgatttttagggcgattgtgggtagtgtt

SEQ ID NO: 17782 - DNA, 501 bp, Artificial Sequence
  chemically treated genomic DNA (Homo sapiens) CpG-island No: 17782
aacactacccacaatcgccctaaaaatcaaaaaaaaactccaaaaaccacgaaaaaactccgaattcaacatccgaaaacgaacaaaatcccgcctccgtaatccaacgaaaaccaaaaaaccgcaaaaaattccgaaaaaaacacgaacgctattcccatcctactaaaactcacgcgacaccttcgaaaacttccgacctaaaatcaacgaaaaacaaacaacaaaaaacgcgacccgaccccgacgaaaacccccacgccactaattctcacgcctccaccatactaccctacacgaaatcccgccgcccgcacttaccgaaccgcacgaccgcttcctaccgcgctccgccatattccgcacacaccgtcgatcccgcctctaccaataaaactcgcctcttccgaccacacctccattaaactatccaatcgaaaaaccaatatcgcccaaaaacgtaacctaaacgcccgacgaactacaaaaacacgcgaacta

SEQ ID NO: 17783 - DNA, 501 bp, Artificial Sequence
  chemically treated genomic DNA (Homo sapiens) CpG-island No: 17783
agtattgtttatagtcgttttggaagttagaaaagggttttagaagttacgaaagggtttcggatttagtattcggaggcgagtagggtttcgttttcgtaatttagcgggggttagggagtcgtagggagtttcggagaggatacgggcgttgtttttattttgttgaggtttacgcggtattttcgggggttttcggtttgggattagcgggaagtaggtagtaggaggcgcggttcggtttcggcgaaggtttttacgttattggtttttacgtttttattatgttgttttgtacggggtttcgtcgttcgtatttatcgggtcgtacggtcgttttttgtcgcgtttcgttatgtttcgtatatatcgtcggtttcgtttttgttaatgagattcgtttttttcggttatatttttattaagttgtttaatcggagagttaatatcgtttaggggcgtggtttgggcgttcgacgggttgtaggggtacgcgggttg

SEQ ID NO: 17784 - DNA, 501 bp, Artificial Sequence
  chemically treated genomic DNA (Homo sapiens) CpG-island No: 17784
caacccgcgtacccctacaacccgtcgaacgcccaaaccacgcccctaaacgatattaactctccgattaaacaacttaataaaaatataaccgaaaaaaacgaatctcattaacaaaaacgaaaccgacgatatatacgaaacataacgaaacgcgacaaaaaacgaccgtacgacccgataaatacgaacgacgaaaccccgtacaaaacaacataataaaaacgtaaaaaccaataacgtaaaaaccttcgccgaaaccgaaccgcgcctcctactacctacttcccgctaatcccaaaccgaaaacccccgaaaataccgcgtaaacctcaacaaaataaaaacaacgcccgtatcctctccgaaactccctacgactccctaacccccgctaaattacgaaaacgaaaccctactcgcctccgaatactaaatccgaaaccctttcgtaacttctaaaacccttttctaacttccaaaacgactataaacaatact

SEQ ID NO: 17785 - DNA, 729 bp, Artificial Sequence
  chemically treated genomic DNA (Homo sapiens) CpG-island No: 17785
  unsure (150)
gaataaatcgaggtttcgcgaggttaggcgtcggttttttatttcgcgatcggttcggggcgcgggcgttatttggggcgcgacgttgtttaggtagaacgtgtcgtttatggttttttggttttagcggtggttggcggcggcggttangtgatcgcggtcgaagttattgtcgcggtagtcggcgttggtggtacggtggtacgcgtgtatcgagtcgttttcgcggaagtcgtattcgcgtcggtcgtcgtcgtcgcggagacgttcgggtcgtagttgttttattatttagagcgcgtcgcgggtgcgcgggtcgtagtatagtacgtacgattcgcggtttttgagttgcgttagtttcggtagttcgtatttggttagttcgttcgggtcgcggggtttttcgggtatagggggtaattcggttgtcgtcgttacgggtagtacgggtagtcggtttagtagtttcggcgtcgttcgcgcgttttttcgtcgtcgtcgttagttttcgacgatcgtatttagtttcgcgtttaacgttagggttaggtcggttcgtagcgttcgtatggtcggggagcgatttagcggcgggcgattcgcgaggtttttaaaggagtcgcgtcgcgggatttaacgagggtatagggttgttggggtcgcggacgatagcgtgattttttttttatttataaatattgttaagggtttgggtttcggaattta

SEQ ID NO: 17786 - DNA, 729 bp, Artificial Sequence
  chemically treated genomic DNA (Homo sapiens) CpG-island No: 17786
  unsure (580)
taaattccgaaacccaaacccttaacaatatttataaataaaaaaaaaatcacgctatcgtccgcgaccccaacaaccctataccctcgttaaatcccgcgacgcgactcctttaaaaacctcgcgaatcgcccgccgctaaatcgctccccgaccatacgaacgctacgaaccgacctaaccctaacgttaaacgcgaaactaaatacgatcgtcgaaaactaacgacgacgacgaaaaaacgcgcgaacgacgccgaaactactaaaccgactacccgtactacccgtaacgacgacaaccgaattaccccctatacccgaaaaaccccgcgacccgaacgaactaaccaaatacgaactaccgaaactaacgcaactcaaaaaccgcgaatcgtacgtactatactacgacccgcgcacccgcgacgcgctctaaataataaaacaactacgacccgaacgtctccgcgacgacgacgaccgacgcgaatacgacttccgcgaaaacgactcgatacacgcgtaccaccgtaccaccaacgccgactaccgcgacaataacttcgaccgcgatcacntaaccgccgccgccaaccaccgctaaaaccaaaaaaccataaacgacacgttctacctaaacaacgtcgcgccccaaataacgcccgcgccccgaaccgatcgcgaaataaaaaaccgacgcctaacctcgcgaaacctcgatttattc

SEQ ID NO: 17787 - DNA, 729 bp, Artificial Sequence
  chemically treated genomic DNA (Homo sapiens) CpG-island No: 17787
  unsure (580)
tgggtttcgaggtttaagtttttggtagtgtttgtgagtggaagggaggttacgttatcgttcgcggttttagtagttttgtgttttcgttggatttcgcgacgcggtttttttaagagtttcgcgggtcgttcgtcgttaggtcgtttttcggttatgcgggcgttgcgggtcggtttgattttggcgttgggcgcggggttgggtgcggtcgtcgagggttggcggcggcggcgggaggacgcgcgggcggcgtcgggattgttgggtcggttgttcgtgttgttcgtggcggcggtagtcgagttgttttttgtgttcgggggatttcgcggttcgggcgagttggttaagtacgggttgtcggggttggcgtagtttaagagtcgcgagtcgtacgtgttgtgttacgattcgcgtattcgcggcgcgttttgggtggtggagtagttgcgattcgagcgttttcgcggcgacggcgatcggcgcgagtgcgattttcgcgaggacgattcggtgtacgcgtattatcgtgttattaacgtcgattatcgcggtagtggtttcgatcgcggttatntggtcgtcgtcgttaattatcgttggagttagaaggttatggacgatacgttttatttgagtaacgtcgcgttttaggtagcgttcgcgtttcgggtcggtcgcggaatgaggggtcggcgtttggtttcgcggggtttcggtttgttt

SEQ ID NO: 17788 - DNA, 729 bp, Artificial Sequence
  chemically treated genomic DNA (Homo sapiens) CpG-island No: 17788
  unsure (150)
aaacaaaccgaaaccccgcgaaaccaaacgccgacccctcattccgcgaccgacccgaaacgcgaacgctacctaaaacgcgacgttactcaaataaaacgtatcgtccataaccttctaactccaacgataattaacgacgacgaccanataaccgcgatcgaaaccactaccgcgataatcgacgttaataacacgataatacgcgtacaccgaatcgtcctcgcgaaaatcgcactcgcgccgatcgccgtcgccgcgaaaacgctcgaatcgcaactactccaccacccaaaacgcgccgcgaatacgcgaatcgtaacacaacacgtacgactcgcgactcttaaactacgccaaccccgacaacccgtacttaaccaactcgcccgaaccgcgaaatcccccgaacacaaaaaacaactcgactaccgccgccacgaacaacacgaacaaccgacccaacaatcccgacgccgcccgcgcgtcctcccgccgccgccgccaaccctcgacgaccgcacccaaccccgcgcccaacgccaaaatcaaaccgacccgcaacgcccgcataaccgaaaaacgacctaacgacgaacgacccgcgaaactcttaaaaaaaccgcgtcgcgaaatccaacgaaaacacaaaactactaaaaccgcgaacgataacgtaacctcccttccactcacaaacactaccaaaaacttaaacctcgaaaccca

SEQ ID NO: 17789 - DNA, 666 bp, Artificial Sequence
  chemically treated genomic DNA (Homo sapiens) CpG-island No: 17789
tatcgcgtttttcgagtttcggcgatggagtagcgtcgggtagaggcggttatttcgtattttgcggtttttaaaacgtatattcgcgttcgtatacggggttttcgagggttttatcgttttttcggttaggagtaagttcgttttatttttcgttgtagtgaggagtttcgcgtatagtattagtagttcgagaagtaggagtagcgattggaattttttttacgtagttatgtttgtagatattttatacgtacgcgatatcgatggttttttcgaggaaggtagggttatgagcggagttaaataattattcgagggtaaggcgagtcggagagagagttcggttttaaaattcgtcgcgtattcgacgttttttgaaggtttgggcgttcggttcgttttttttttatagtatcgggtttcgagttattgtagggttgagttgtttcgagcgcggagattcgggttggcggggtcggggtcggggacgagcgtcggtcgagtcgggtaggaaggtattaaggcggcgaggttgcgggagggggagaagcggggagaggagcgcgcgtagttaggagagatttggagaggaggtagttggagagagagttagcgaatgggaaatacggggaagggggcgcgggggggaggagagatttagtt

SEQ ID NO: 17790 - DNA, 666 bp, Artificial Sequence
  chemically treated genomic DNA (Homo sapiens) CpG-island No: 17790
aactaaatctctcctcccccccgcgcccccttccccgtatttcccattcgctaactctctctccaactacctcctctccaaatctctcctaactacgcgcgctcctctccccgcttctccccctcccgcaacctcgccgccttaataccttcctacccgactcgaccgacgctcgtccccgaccccgaccccgccaacccgaatctccgcgctcgaaacaactcaaccctacaataactcgaaacccgatactataaaaaaaaaacgaaccgaacgcccaaaccttcaaaaaacgtcgaatacgcgacgaattttaaaaccgaactctctctccgactcgccttaccctcgaataattatttaactccgctcataaccctaccttcctcgaaaaaaccatcgatatcgcgtacgtataaaatatctacaaacataactacgtaaaaaaaattccaatcgctactcctacttctcgaactactaatactatacgcgaaactcctcactacaacgaaaaataaaacgaacttactcctaaccgaaaaaacgataaaaccctcgaaaaccccgtatacgaacgcgaatatacgttttaaaaaccgcaaaatacgaaataaccgcctctacccgacgctactccatcgccgaaactcgaaaaacgcgata

SEQ ID NO: 17791 - DNA, 666 bp, Artificial Sequence
  chemically treated genomic DNA (Homo sapiens) CpG-island No: 17791
gattggattttttttttttttcgcgttttttttttcgtattttttattcgttggttttttttttagttgttttttttttaggttttttttggttgcgcgcgttttttttttcgtttttttttttttcgtagtttcgtcgttttggtgtttttttgttcggttcggtcggcgttcgttttcggtttcggtttcgttagttcgggttttcgcgttcggagtagtttagttttgtagtggttcgggattcgatgttatgagagggaagcgagtcgggcgtttagatttttaggaggcgtcggatgcgcggcgggttttgggatcgggtttttttttcggttcgttttgttttcgggtgattatttggtttcgtttatagttttgtttttttcggaggagttatcggtgtcgcgtgcgtgtggagtatttgtagatatgattgcgtggaggagattttagtcgttgtttttgtttttcgggttgttggtgttgtgcgcgaggttttttattgtagcgaagggtaagacggatttgtttttggtcggggaggcggtagagttttcggaggtttcgtgtgcggacgcgagtgtgcgttttggggatcgtagggtacggagtggtcgtttttgttcggcgttgttttatcgtcgaagttcggggaacgcgatg

SEQ ID NO: 17792 - DNA, 666 bp, Artificial Sequence
  chemically treated genomic DNA (Homo sapiens) CpG-island No: 17792
catcgcgttccccgaacttcgacgataaaacaacgccgaacaaaaacgaccactccgtaccctacgatccccaaaacgcacactcgcgtccgcacacgaaacctccgaaaactctaccgcctccccgaccaaaaacaaatccgtcttacccttcgctacaataaaaaacctcgcgcacaacaccaacaacccgaaaaacaaaaacaacgactaaaatctcctccacgcaatcatatctacaaatactccacacgcacgcgacaccgataactcctccgaaaaaaacaaaactataaacgaaaccaaataatcacccgaaaacaaaacgaaccgaaaaaaaaacccgatcccaaaacccgccgcgcatccgacgcctcctaaaaatctaaacgcccgactcgcttccctctcataacatcgaatcccgaaccactacaaaactaaactactccgaacgcgaaaacccgaactaacgaaaccgaaaccgaaaacgaacgccgaccgaaccgaacaaaaaaacaccaaaacgacgaaactacgaaaaaaaaaaaaacgaaaaaaaaaacgcgcgcaaccaaaaaaaacctaaaaaaaaaacaactaaaaaaaaaaccaacgaataaaaaatacgaaaaaaaaaacgcgaaaaaaaaaaaaaatccaatc

SEQ ID NO: 17793 - DNA, 528 bp, Artificial Sequence
  chemically treated genomic DNA (Homo sapiens) CpG-island No: 17793
ttttcggcggtcgtattatgcgcggggttcggtggtgtgttgggcgaggggatacgtgcgtatttagaagcgcgtaagggggtgggggttgggtaggttattgcgtttcgcgggttgggcgagtttcgtagagggagttagtcgtgattttgagggtagtgattggttcgtcgcgtttttgtattaggtattcgttcggttttttcgtgattgttttcgggtatttttggtttttttcgatttttttttttcgcgggtttttaagtttcgtaagtttgcgacgagttggttttttagggagatagcgagcgtttattttcgttttgcggttgggtgtgtgtggtgagaggaagagacgggaggaggaggcgaggtcgattcgttaacgaggaaaacggggtgagaggggagtcgggttttttaatagtcgttagggcgtttggtacgtcgtaggtgttaacgtagtgtttattgataaggttttaaggtggaaggtgatggtaggggttcggacgttttttttttttt

SEQ ID NO: 17794 - DNA, 528 bp, Artificial Sequence
  chemically treated genomic DNA (Homo sapiens) CpG-island No: 17794
aaaaaaaaaaaaacgtccgaacccctaccatcaccttccaccttaaaaccttatcaataaacactacgttaacacctacgacgtaccaaacgccctaacgactattaaaaaacccgactcccctctcaccccgttttcctcgttaacgaatcgacctcgcctcctcctcccgtctcttcctctcaccacacacacccaaccgcaaaacgaaaataaacgctcgctatctccctaaaaaaccaactcgtcgcaaacttacgaaacttaaaaacccgcgaaaaaaaaaaatcgaaaaaaaccaaaaatacccgaaaacaatcacgaaaaaaccgaacgaatacctaatacaaaaacgcgacgaaccaatcactaccctcaaaatcacgactaactccctctacgaaactcgcccaacccgcgaaacgcaataacctacccaacccccacccccttacgcgcttctaaatacgcacgtatcccctcgcccaacacaccaccgaaccccgcgcataatacgaccgccgaaaa

SEQ ID NO: 17795 - DNA, 528 bp, Artificial Sequence
  chemically treated genomic DNA (Homo sapiens) CpG-island No: 17795
gggaagaagggggcgttcgggtttttgttattattttttattttggggttttgttaatgaatattgcgttagtatttacgacgtgttaggcgttttggcgattattggaaaattcggttttttttttatttcgtttttttcgttggcgagtcggtttcgtttttttttttcgttttttttttttattatatatatttagtcgtagagcgggggtgggcgttcgttgtttttttggagaattagttcgtcgtaaatttgcggggtttggggattcgcgagggggagaagtcgggagaggttaggggtgttcggaaataattacgagaaagtcgggcgaatgtttgatgtagggacgcggcgagttagttattgtttttagggttacggttgattttttttgcgggattcgtttagttcgcgagacgtagtgatttgtttaatttttatttttttgcgcgtttttgggtgcgtacgtgttttttcgtttaatatattatcgagtttcgcgtatggtacggtcgtcgagga

SEQ ID NO: 17796 - DNA, 528 bp, Artificial Sequence
  chemically treated genomic DNA (Homo sapiens) CpG-island No: 17796
tcctcgacgaccgtaccatacgcgaaactcgataatatattaaacgaaaaaacacgtacgcacccaaaaacgcgcaaaaaaataaaaattaaacaaatcactacgtctcgcgaactaaacgaatcccgcaaaaaaaatcaaccgtaaccctaaaaacaataactaactcgccgcgtccctacatcaaacattcgcccgactttctcgtaattatttccgaacacccctaacctctcccgacttctccccctcgcgaatccccaaaccccgcaaatttacgacgaactaattctccaaaaaaacaacgaacgcccacccccgctctacgactaaatatatataataaaaaaaaaaaacgaaaaaaaaaaacgaaaccgactcgccaacgaaaaaaacgaaataaaaaaaaaaccgaattttccaataatcgccaaaacgcctaacacgtcgtaaatactaacgcaatattcattaacaaaaccccaaaataaaaaataataacaaaaacccgaacgcccccttcttccc

SEQ ID NO: 17797 - DNA, 592 bp, Artificial Sequence
  chemically treated genomic DNA (Homo sapiens) CpG-island No: 17797
ttcgcgggtttagggtataaaaagcgtatacgtatatattaaacgttatgcgtacgcgtataataaacgttatacgttacgtacgcgcgtgttgtttttttttcgtagttagttttttttttttcgggttagtgcgtattgtttatttcgtgttataggatttcgttgagcgttaggcgtagggattggacgtatacggattttcgggagtttcggaattcgcgtttttacgttagattttatttttttttgatagagacgttttcgttttatcgtcgtcgtaggcgttaggggtttttttttatcgtcgaggtttagtcgtcgttcgttcgtttttagggtagcgcggggattttttggttttcgtttagtgtttcggggtttattcgtcgtttttcgtcgttttcggaggcgagggattgttttttataagggattggagtttagggaaggattcgtttggagcgggaggcggggatgtatatgcgtagagggagaggtcgagcgttcgagttaggttggtggatgcgatgcggggtttggaagcggcgttagacggtgtttgttagttttggtcgtaatttttagttgt

SEQ ID NO: 17798 - DNA, 592 bp, Artificial Sequence
  chemically treated genomic DNA (Homo sapiens) CpG-island No: 17798
acaactaaaaattacgaccaaaactaacaaacaccgtctaacgccgcttccaaaccccgcatcgcatccaccaacctaactcgaacgctcgacctctccctctacgcatatacatccccgcctcccgctccaaacgaatccttccctaaactccaatcccttataaaaaacaatccctcgcctccgaaaacgacgaaaaacgacgaataaaccccgaaacactaaacgaaaaccaaaaaatccccgcgctaccctaaaaacgaacgaacgacgactaaacctcgacgataaaaaaaaacccctaacgcctacgacgacgataaaacgaaaacgtctctatcaaaaaaaaataaaatctaacgtaaaaacgcgaattccgaaactcccgaaaatccgtatacgtccaatccctacgcctaacgctcaacgaaatcctataacacgaaataaacaatacgcactaacccgaaaaaaaaaaaactaactacgaaaaaaaaacaacacgcgcgtacgtaacgtataacgtttattatacgcgtacgcataacgtttaatatatacgtatacgctttttataccctaaacccgcgaa

SEQ ID NO: 17799 - DNA, 592 bp, Artificial Sequence
  chemically treated genomic DNA (Homo sapiens) CpG-island No: 17799
ataattgagggttgcggttagagttgataggtatcgtttagcgtcgtttttaagtttcgtatcgtatttattagtttaattcgggcgttcggtttttttttttgcgtatgtgtattttcgtttttcgttttaggcgagtttttttttggattttagttttttgtgggaaataatttttcgttttcggaggcggcgaggagcggcgggtgagtttcggagtattgggcgagggttagggggttttcgcgttgttttgaaggcgggcgggcggcggttagatttcggcggtggggagggatttttggcgtttgcggcgacggtgggacgagggcgtttttgttagaaggggatgaggtttggcgtgggaacgcgagtttcggggttttcgggggttcgtatgcgtttagtttttgcgtttggcgtttagcgaagttttgtagtacggggtaggtaatgcgtattggttcgaaggggagggaattggttgcggggaggggatagtacgcgcgtgcgtagcgtgtgacgtttgttgtgcgcgtgcgtatggcgtttgatgtgtgcgtgtgcgttttttgtgttttgagttcgcggg

SEQ ID NO: 17800 - DNA, 592 bp, Artificial Sequence
  chemically treated genomic DNA (Homo sapiens) CpG-island No: 17800
cccgcgaactcaaaacacaaaaaacgcacacgcacacatcaaacgccatacgcacgcgcacaacaaacgtcacacgctacgcacgcgcgtactatcccctccccgcaaccaattccctccccttcgaaccaatacgcattacctaccccgtactacaaaacttcgctaaacgccaaacgcaaaaactaaacgcatacgaacccccgaaaaccccgaaactcgcgttcccacgccaaacctcatccccttctaacaaaaacgccctcgtcccaccgtcgccgcaaacgccaaaaatccctccccaccgccgaaatctaaccgccgcccgcccgccttcaaaacaacgcgaaaaccccctaaccctcgcccaatactccgaaactcacccgccgctcctcgccgcctccgaaaacgaaaaattatttcccacaaaaaactaaaatccaaaaaaaaactcgcctaaaacgaaaaacgaaaatacacatacgcaaaaaaaaaaaccgaacgcccgaattaaactaataaatacgatacgaaacttaaaaacgacgctaaacgatacctatcaactctaaccgcaaccctcaattat

SEQ ID NO: 17801 - DNA, 1587 bp, Artificial Sequence
  chemically treated genomic DNA (Homo sapiens) CpG-island No: 17801
  unsure (497)
cgtcgttttttttttagttttttttagtattatatacgcgcgcgcgcgtatatatatatatatatatatatatatatatatacgtatacgtattttatttttagtttgttttattttaatttttcggtcgtgttagtgcgattataggagagatacggaggttcggagtggggttggggtgcgggtagtcgttggggtcgcgcgaggaggaggcggaatcgagttaggtcgtatgaaattttcgggatagatatttttcgcgtcggacgtttttgttatggcggtcggtattgaggagggttacggtcgggtcgggtcgggcgtgttgcgggaagaggaaggttcgggaggtgggatgggaaggggaggtcgagggacgggggtcgtcgcgtcgtcgttgttgttagagaggagtttgcggttggtagttcggtttgggtagtacggttttcggcgttcggttcggaattcgtacgttttttcgcggcgattagagnatagttttttcggttttcgttttcgtgttggtcgtcgtcgtcgtttttttcgtcgtcgtcgcgtataaagtttttttatttcgattttcggggcgtcgtcgtcgttaaatttttagttttttattggtcgcgggtcgcggcgtttgtcgggaaatgtagtttttggttcgggacgttggggtttcggaggaagcggcgagtcggcggggcggagggggcgggagcgcgaattaggaacgttcgcggtagttagcgtttggacgattagggagatcgggcgagagggtcgaggaacgagggacggggagggattgtacgtgggagagtgatatataaaatatttcgggaagtcggaggaggcgtggaaaggtggggttcgggaggtaaaattgggatcggcgcgtttagtgaggttgattaaagaataacgcgtaattagcgttatacggcgttttttagggtgattcggttttttagtttttaagggttagaagcgattttcgtacggttttcggtgggttatcgcgcgagggcggggtagtttaggcgatttttcggtcgtttttcgttttacggttgttagggaagggtttcggtttcggtagggtttgtatttggaaagtcgggggcgatgtaagatcgttttggcgtcgttttttttttagtttcggatgagttgttcgatggtttttttttttcggttgtaagtataggagattcggtcggcggcgtcggttcgtcgagggagcgttttgattttttcggtaggcgtcggtttcgcgcgtttttttttgttttgttgcggttcggaggtttgtgggtaatcgggaggacgacgttagcgttcgtcgtattttcgggtgttttttagtcgcgggggatcgcgacggtttcgtgatcgttacgtgtcggaggtcgcggttgttcgcggttagattttcgtatcgagggacgtgagggatatttgttttagagggtttaagataagaacgagaggaagaatcgggaggtaatttttcgttattttttagtttttcgtattttaggaaacgtatggaaaataatggaaggttaagtgtgtgtatagtga

SEQ ID NO: 17802 - DNA, 1587 bp, Artificial Sequence
  chemically treated genomic DNA (Homo sapiens) CpG-island No: 17802
  unsure (1091)
tcactatacacacacttaaccttccattattttccatacgtttcctaaaatacgaaaaactaaaaaataacgaaaaattacctcccgattcttcctctcgttcttatcttaaaccctctaaaacaaatatccctcacgtccctcgatacgaaaatctaaccgcgaacaaccgcgacctccgacacgtaacgatcacgaaaccgtcgcgatcccccgcgactaaaaaacacccgaaaatacgacgaacgctaacgtcgtcctcccgattacccacaaacctccgaaccgcaacaaaacaaaaaaaaacgcgcgaaaccgacgcctaccgaaaaaatcaaaacgctccctcgacgaaccgacgccgccgaccgaatctcctatacttacaaccgaaaaaaaaaaaccatcgaacaactcatccgaaactaaaaaaaaaacgacgccaaaacgatcttacatcgcccccgactttccaaatacaaaccctaccgaaaccgaaacccttccctaacaaccgtaaaacgaaaaacgaccgaaaaatcgcctaaactaccccgccctcgcgcgataacccaccgaaaaccgtacgaaaatcgcttctaacccttaaaaactaaaaaaccgaatcaccctaaaaaacgccgtataacgctaattacgcgttattctttaatcaacctcactaaacgcgccgatcccaattttacctcccgaaccccacctttccacgcctcctccgacttcccgaaatattttatatatcactctcccacgtacaatccctccccgtccctcgttcctcgaccctctcgcccgatctccctaatcgtccaaacgctaactaccgcgaacgttcctaattcgcgctcccgccccctccgccccgccgactcgccgcttcctccgaaaccccaacgtcccgaaccaaaaactacatttcccgacaaacgccgcgacccgcgaccaataaaaaactaaaaatttaacgacgacgacgccccgaaaatcgaaataaaaaaactttatacgcgacgacgacgaaaaaaacgacgacgacgaccaacacgaaaacgaaaaccgaaaaaactatnctctaatcgccgcgaaaaaacgtacgaattccgaaccgaacgccgaaaaccgtactacccaaaccgaactaccaaccgcaaactcctctctaacaacaacgacgacgcgacgacccccgtccctcgacctccccttcccatcccacctcccgaaccttcctcttcccgcaacacgcccgacccgacccgaccgtaaccctcctcaataccgaccgccataacaaaaacgtccgacgcgaaaaatatctatcccgaaaatttcatacgacctaactcgattccgcctcctcctcgcgcgaccccaacgactacccgcaccccaaccccactccgaacctccgtatctctcctataatcgcactaacacgaccgaaaaattaaaataaaacaaactaaaaataaaatacgtatacgtatatatatatatatatatatatatatatatatacgcgcgcgcgcgtatataatactaaaaaaaactaaaaaaaaaacgacg

SEQ ID NO: 17803 - DNA, 1587 bp, Artificial Sequence
  chemically treated genomic DNA (Homo sapiens) CpG-island No: 17803
  unsure (1091)
ttattgtgtatatatttaattttttattgttttttatacgttttttaggatgcggggggttagaggatgacggagagttgtttttcggttttttttttcgtttttattttgggttttttaggataaatgttttttacgtttttcgatgcgaaggtttggtcgcgagtagtcgcggttttcggtacgtgacggttacggagtcgtcgcggtttttcgcggttggggggtattcggggatgcggcgggcgttgacgtcgttttttcggttatttataagttttcgggtcgtagtaaaataggaagaggcgcgcggggtcggcgtttgtcggggaggttaaggcgttttttcggcgagtcggcgtcgtcggtcgggttttttatgtttgtaatcgggggagggggattatcggatagtttattcggggttgagagggagacgacgttaaggcggttttgtatcgttttcggttttttaaatgtagattttatcggaatcggagtttttttttgatagtcgtaggacgggagacggtcgaggggtcgtttggattgtttcgttttcgcgcggtgatttatcggggatcgtgcgagggtcgtttttaatttttaagagttagagagtcgagttattttgaggagcgtcgtatggcgttggttgcgcgttgttttttaattagttttattgaacgcgtcgattttagttttatttttcgggttttatttttttacgtttttttcggtttttcggggtgttttgtgtgttatttttttacgtatagttttttttcgtttttcgtttttcggttttttcgttcggtttttttagtcgtttagacgttagttgtcgcgggcgtttttggttcgcgttttcgtttttttcgtttcgtcgattcgtcgtttttttcggagttttagcgtttcgaattagagattgtatttttcggtaggcgtcgcggttcgcggttaatgaggggttgaggatttggcggcggcggcgtttcgagagtcggggtgggggggttttgtgcgcggcggcggcgggagaggcggcggcggcggttagtacggaggcggaggtcgagggggttgtnttttagtcgtcgcggagaggcgtgcgaatttcgagtcgagcgtcgaggatcgtgttatttaggtcgggttgttagtcgtaggtttttttttggtagtagcggcggcgcggcgattttcgtttttcggttttttttttttattttatttttcgagttttttttttttcgtagtacgttcggttcggttcggtcgtggttttttttagtgtcggtcgttatggtagaggcgttcggcgcggggaatatttatttcggggattttatgcggtttagttcggtttcgtttttttttcgcgcggttttagcggttgttcgtattttagttttatttcgggttttcgtgttttttttgtgatcgtattgatacggtcggggggttagaatggaataaattgaaggtaaagtgcgtgtgcgtgtgtgtatgtgtgtgtgtgtgtgtgtgtgtgtgcgcgcgcgcgcgtgtgtagtgttaggaagggttgaggagggaacgacg

SEQ ID NO: 17804 - DNA, 1587 bp, Artificial Sequence
  chemically treated genomic DNA (Homo sapiens) CpG-island No: 17804
  unsure (497)
cgtcgttccctcctcaacccttcctaacactacacacgcgcgcgcgcgcacacacacacacacacacacacacatacacacacgcacacgcactttaccttcaatttattccattctaaccccccgaccgtatcaatacgatcacaaaaaaaacacgaaaacccgaaataaaactaaaatacgaacaaccgctaaaaccgcgcgaaaaaaaaacgaaaccgaactaaaccgcataaaatccccgaaataaatattccccgcgccgaacgcctctaccataacgaccgacactaaaaaaaaccacgaccgaaccgaaccgaacgtactacgaaaaaaaaaaaactcgaaaaataaaataaaaaaaaaaaaccgaaaaacgaaaatcgccgcgccgccgctactaccaaaaaaaaacctacgactaacaacccgacctaaataacacgatcctcgacgctcgactcgaaattcgcacgcctctccgcgacgactaaaanacaaccccctcgacctccgcctccgtactaaccgccgccgccgcctctcccgccgccgccgcgcacaaaacccccccaccccgactctcgaaacgccgccgccgccaaatcctcaacccctcattaaccgcgaaccgcgacgcctaccgaaaaatacaatctctaattcgaaacgctaaaactccgaaaaaaacgacgaatcgacgaaacgaaaaaaacgaaaacgcgaaccaaaaacgcccgcgacaactaacgtctaaacgactaaaaaaaccgaacgaaaaaaccgaaaaacgaaaaacgaaaaaaaactatacgtaaaaaaataacacacaaaacaccccgaaaaaccgaaaaaaacgtaaaaaaataaaacccgaaaaataaaactaaaatcgacgcgttcaataaaactaattaaaaaacaacgcgcaaccaacgccatacgacgctcctcaaaataactcgactctctaactcttaaaaattaaaaacgaccctcgcacgatccccgataaatcaccgcgcgaaaacgaaacaatccaaacgacccctcgaccgtctcccgtcctacgactatcaaaaaaaaactccgattccgataaaatctacatttaaaaaaccgaaaacgatacaaaaccgccttaacgtcgtctccctctcaaccccgaataaactatccgataatccccctcccccgattacaaacataaaaaacccgaccgacgacgccgactcgccgaaaaaacgccttaacctccccgacaaacgccgaccccgcgcgcctcttcctattttactacgacccgaaaacttataaataaccgaaaaaacgacgtcaacgcccgccgcatccccgaataccccccaaccgcgaaaaaccgcgacgactccgtaaccgtcacgtaccgaaaaccgcgactactcgcgaccaaaccttcgcatcgaaaaacgtaaaaaacatttatcctaaaaaacccaaaataaaaacgaaaaaaaaaaccgaaaaacaactctccgtcatcctctaaccccccgcatcctaaaaaacgtataaaaaacaataaaaaattaaatatatacacaataa

SEQ ID NO: 17805 - DNA, 650 bp, Artificial Sequence
  chemically treated genomic DNA (Homo sapiens) CpG-island No: 17805
ggtcgcgatttggtgggtcgcgttgtttttttttttttcggatttcgttcggttcgtattttgttttttttattagagtatgatttaggtttttgatagtttttagtttttatcgcgttttttttatttacgattttattttcgttagttttttagtatagcgcgaattttgaagttcggttttttttttttttttttcgtatagcgcgtttcgttttttttttcgttttaggttttgttttttttttttcggttttatttttaataatttcgattatttacgagggtcgtcgttttcgtgtttgttttattttcgtattagaaaattaaagtatattttttagatttcgtcgtatgtaggtcgcgtatatattaggcgcgtcgaagtcgtcgggcgaggaagtcgagggcgcgttttgttttcgtgtggtgatgggtaaagtcgagggagttcgggagtagcgggcgtggggcggcgttaatgcgagtgcgagtggtgttcgtcgttcgggagcgttcgggttcgagcggattaatcgtcgttttaggtgtcgttttttgttcgcgaaatattatttatcgttagtgtgggtttataggtttcgagtttttgttgaaaatgttagttttgtggttaaggtttttattta

SEQ ID NO: 17806 - DNA, 650 bp, Artificial Sequence
  chemically treated genomic DNA (Homo sapiens) CpG-island No: 17806
taaataaaaaccttaaccacaaaactaacattttcaacaaaaactcgaaacctataaacccacactaacgataaataatatttcgcgaacaaaaaacgacacctaaaacgacgattaatccgctcgaacccgaacgctcccgaacgacgaacaccactcgcactcgcattaacgccgccccacgcccgctactcccgaactccctcgactttacccatcaccacacgaaaacaaaacgcgccctcgacttcctcgcccgacgacttcgacgcgcctaatatatacgcgacctacatacgacgaaatctaaaaaatatactttaattttctaatacgaaaataaaacaaacacgaaaacgacgaccctcgtaaataatcgaaattattaaaaataaaaccgaaaaaaaaaaaacaaaacctaaaacgaaaaaaaaaacgaaacgcgctatacgaaaaaaaaaaaaaaaaaaccgaacttcaaaattcgcgctatactaaaaaactaacgaaaataaaatcgtaaataaaaaaaacgcgataaaaactaaaaactatcaaaaacctaaatcatactctaataaaaaaaacaaaatacgaaccgaacgaaatccgaaaaaaaaaaaaacaacgcgacccaccaaatcgcgacc

SEQ ID NO: 17807 - DNA, 650 bp, Artificial Sequence
  chemically treated genomic DNA (Homo sapiens) CpG-island No: 17807
tgaatagaaattttagttatagagttgatatttttaataggggttcgaaatttgtggatttatattaacggtgggtggtgtttcgcgggtaggagacgatatttgaggcggcggttaattcgttcgggttcgggcgttttcgggcggcggatattattcgtattcgtattggcgtcgttttacgttcgttgttttcgggttttttcggttttgtttattattatacgggagtaaaacgcgttttcggttttttcgttcggcggtttcggcgcgtttgatgtgtgcgcggtttgtatgcggcggggtttgggggatatgttttggttttttggtgcggaggtgggataggtacgggaacgacgattttcgtggatgatcggggttgttggaaatgaagtcgaggagaaagaagtagggtttgggacggaaaaaaggacggagcgcgttgtgcggggaagggggaagagaggtcgagttttagagttcgcgttgtgttggggaattggcggggatgaggtcgtgggtggagagagcgcggtgggaattggaagttgttagaagtttggattatgttttgatgagaggagtaggatgcggatcgagcgggattcggaggaaaaaaaggtagcgcggtttattaggtcgcggtt

SEQ ID NO: 17808 - DNA, 650 bp, Artificial Sequence
  chemically treated genomic DNA (Homo sapiens) CpG-island No: 17808
aaccgcgacctaataaaccgcgctacctttttttcctccgaatcccgctcgatccgcatcctactcctctcatcaaaacataatccaaacttctaacaacttccaattcccaccgcgctctctccacccacgacctcatccccgccaattccccaacacaacgcgaactctaaaactcgacctctcttcccccttccccgcacaacgcgctccgtccttttttccgtcccaaaccctacttctttctcctcgacttcatttccaacaaccccgatcatccacgaaaatcgtcgttcccgtacctatcccacctccgcaccaaaaaaccaaaacatatcccccaaaccccgccgcatacaaaccgcgcacacatcaaacgcgccgaaaccgccgaacgaaaaaaccgaaaacgcgttttactcccgtataataataaacaaaaccgaaaaaacccgaaaacaacgaacgtaaaacgacgccaatacgaatacgaataatatccgccgcccgaaaacgcccgaacccgaacgaattaaccgccgcctcaaatatcgtctcctacccgcgaaacaccacccaccgttaatataaatccacaaatttcgaacccctattaaaaatatcaactctataactaaaatttctattca

SEQ ID NO: 17809 - DNA, 903 bp, Artificial Sequence
  chemically treated genomic DNA (Homo sapiens) CpG-island No: 17809
tagaatttcggggttattggcgggagcgtcgcggaggaatcgaattttatttattttttcggcgcgttattattttaaagtttgagagcgtttgaggtcgagaaaatggtcgtaaaggaggaagtagtcgggcgtgtggttgtcggtagcgcgggttttcgtcggttcgggaaacgcggttttagggatttcggcgttttttcgtcggtcgtcgcggggtgatatgttttttcgttttttttttcgggttcgtcggtttatttcgttcgtcgtcgtcgttcgagttttatggtcgttcgttcgttcggtcgatcgcggagttcggcgtttatcgttcgtcggttgttggaagtttatatacgcgtagtttaaggagcggcgggtgattatgtttttgtagattcggatggagaggatgggttcggtcgggttgaatttttcgtagagtatcgtttcggttacgtcggggtggaggttttttacgtagagcgaggttatggggtagttgggggtattggggtttatttcggtacggttgttcgtagggttataggtcgcgattttttcgtgagaggaggagagcgagtgtcggggttgggggtcggagtcggggggaggggagcggggagtaagcgtagagggataaaaattaatcggaattgaaaattatttaacggtcgtagaacggggtcgatttattgtcgttggttgtcggttgtcggcggggagcgagggtggcggtgtcgggttcgggtagcgggaaggtttcggttttttggtttttttttggagttgttgcggggtcgcgggcgggcgggtcggtttcggttgttttatcgggttattttataaaagaggaagaaaaaaaataaaagttttcggcgggggagacgcggatttttt

SEQ ID NO: 17810 - DNA, 903 bp, Artificial Sequence
  chemically treated genomic DNA (Homo sapiens) CpG-island No: 17810
aaaaaatccgcgtctcccccgccgaaaacttttattttttttcttcctcttttataaaataacccgataaaacaaccgaaaccgacccgcccgcccgcgaccccgcaacaactccaaaaaaaaaccaaaaaaccgaaaccttcccgctacccgaacccgacaccgccaccctcgctccccgccgacaaccgacaaccaacgacaataaatcgaccccgttctacgaccgttaaataattttcaattccgattaatttttatccctctacgcttactccccgctcccctccccccgactccgacccccaaccccgacactcgctctcctcctctcacgaaaaaatcgcgacctataaccctacgaacaaccgtaccgaaataaaccccaatacccccaactaccccataacctcgctctacgtaaaaaacctccaccccgacgtaaccgaaacgatactctacgaaaaattcaacccgaccgaacccatcctctccatccgaatctacaaaaacataatcacccgccgctccttaaactacgcgtatataaacttccaacaaccgacgaacgataaacgccgaactccgcgatcgaccgaacgaacgaacgaccataaaactcgaacgacgacgacgaacgaaataaaccgacgaacccgaaaaaaaaaacgaaaaaacatatcaccccgcgacgaccgacgaaaaaacgccgaaatccctaaaaccgcgtttcccgaaccgacgaaaacccgcgctaccgacaaccacacgcccgactacttcctcctttacgaccattttctcgacctcaaacgctctcaaactttaaaataataacgcgccgaaaaaataaataaaattcgattcctccgcgacgctcccgccaataaccccgaaattcta

SEQ ID NO: 17811 - DNA, 903 bp, Artificial Sequence
  chemically treated genomic DNA (Homo sapiens) CpG-island No: 17811
aaaaaattcgcgtttttttcgtcggagatttttatttttttttttttttttttataaaataattcggtgaagtagtcgagatcgattcgttcgttcgcggtttcgtagtagttttaagaaggaattaagagatcgaggttttttcgttgttcggattcgatatcgttattttcgtttttcgtcggtagtcggtagttagcggtagtggatcgatttcgttttgcggtcgttgagtagtttttaatttcggttgatttttgtttttttgcgtttgtttttcgttttttttttttcggtttcggtttttagtttcggtattcgtttttttttttttacggaaaggtcgcggtttgtggttttgcgggtagtcgtgtcgagatgaattttagtgtttttagttattttatggtttcgttttacgtgggggatttttatttcgacgtgatcgaggcgatgttttacgagaagtttagttcggtcgggtttattttttttattcgggtttgtagggatatgattattcgtcgttttttgggttacgcgtatgtgaatttttagtagtcggcggacggtgagcgtcgggtttcgcggtcggtcgggcgggcgggcggttatgaggttcgggcggcggcggcgggcggggtaggtcggcgggttcggggaggggggcgggagggtatgttatttcgcgacggtcggcgggaaggcgtcggggtttttggagtcgcgtttttcgagtcggcggggattcgcgttgtcggtagttatacgttcggttatttttttttttgcgattattttttcggttttagacgtttttaaattttagggtgatgacgcgtcgggagggtgggtgagattcggttttttcgcggcgttttcgttagtggtttcgggattttg

SEQ ID NO: 17812 - DNA, 903 bp, Artificial Sequence
  chemically treated genomic DNA (Homo sapiens) CpG-island No: 17812
caaaatcccgaaaccactaacgaaaacgccgcgaaaaaaccgaatctcacccaccctcccgacgcgtcatcaccctaaaatttaaaaacgtctaaaaccgaaaaaataatcgcaaaaaaaaaaataaccgaacgtataactaccgacaacgcgaatccccgccgactcgaaaaacgcgactccaaaaaccccgacgccttcccgccgaccgtcgcgaaataacataccctcccgcccccctccccgaacccgccgacctaccccgcccgccgccgccgcccgaacctcataaccgcccgcccgcccgaccgaccgcgaaacccgacgctcaccgtccgccgactactaaaaattcacatacgcgtaacccaaaaaacgacgaataatcatatccctacaaacccgaataaaaaaaataaacccgaccgaactaaacttctcgtaaaacatcgcctcgatcacgtcgaaataaaaatcccccacgtaaaacgaaaccataaaataactaaaaacactaaaattcatctcgacacgactacccgcaaaaccacaaaccgcgacctttccgtaaaaaaaaaaaaacgaataccgaaactaaaaaccgaaaccgaaaaaaaaaaaacgaaaaacaaacgcaaaaaaacaaaaatcaaccgaaattaaaaactactcaacgaccgcaaaacgaaatcgatccactaccgctaactaccgactaccgacgaaaaacgaaaataacgatatcgaatccgaacaacgaaaaaacctcgatctcttaattccttcttaaaactactacgaaaccgcgaacgaacgaatcgatctcgactacttcaccgaattattttataaaaaaaaaaaaaaaaaaataaaaatctccgacgaaaaaaacgcgaatttttt

SEQ ID NO: 17813 - DNA, 876 bp, Artificial Sequence
  chemically treated genomic DNA (Homo sapiens) CpG-island No: 17813
cgttttttgtattttttatttatatttcgcgtcgtattcgtttcgttttcgcgcgtttgacgttagggtttttacgcgagcgttagcgtcggattaggaggagacgcggaggttagggggaggagggaagagaaaataggaagaaagagtagagaggaagggagaggtcgcgtcggtggaggttgcggtgtggggatggggttcgggcgaaggggcggggtttttgcgtaggcgttgcggtcggggaagcggagtcgcgttgcgtcgcgttcgtgggggtggggaggacggttcgcgggcggttatcgggggtgttggttgaggagttttcgtttttcgtttcgttcgtttttgtttttattaggaggagcgttaattagttatcgcggcggtgggcggtgtaaagggttttcgggttttttcgcgttaattattttttacgtgcgcggtcgtttgtggttttttttcgttgcggtcggttcggtttttttagttttagtttcgggggacgtcgggtacgggtgagcgggcgtggtttttttcgggttcggttttcgaaacgtgcgtagatggagttagcgtggttttttgtttttttttattcggatcgtattacgagttttagtcggtatcgtcgttacgcgcgtcggtcgtagaagcggtgtttgttgggagttggagtttttaacggtcgcggcgttcgttgatattaattggttgcgcgggttttggtcgttcgtttcgggattttttaatcgttttgcgcgttggatttcggtatcgttggagttttcggcgcggggttggggggtagggagagagaggggagggtttttcgggtttttcgttttttttttttttagttcgatttttttt

SEQ ID NO: 17814 - DNA, 876 bp, Artificial Sequence
  chemically treated genomic DNA (Homo sapiens) CpG-island No: 17814
aaaaaaaatcgaactaaaaaaaaaaaaaacgaaaaacccgaaaaaccctcccctctctctccctaccccccaaccccgcgccgaaaactccaacgataccgaaatccaacgcgcaaaacgattaaaaaatcccgaaacgaacgaccaaaacccgcgcaaccaattaatatcaacgaacgccgcgaccgttaaaaactccaactcccaacaaacaccgcttctacgaccgacgcgcgtaacgacgataccgactaaaactcgtaatacgatccgaataaaaaaaaacaaaaaaccacgctaactccatctacgcacgtttcgaaaaccgaacccgaaaaaaaccacgcccgctcacccgtacccgacgtcccccgaaactaaaactaaaaaaaccgaaccgaccgcaacgaaaaaaaaccacaaacgaccgcgcacgtaaaaaataattaacgcgaaaaaacccgaaaaccctttacaccgcccaccgccgcgataactaattaacgctcctcctaataaaaacaaaaacgaacgaaacgaaaaacgaaaactcctcaaccaacacccccgataaccgcccgcgaaccgtcctccccacccccacgaacgcgacgcaacgcgactccgcttccccgaccgcaacgcctacgcaaaaaccccgccccttcgcccgaaccccatccccacaccgcaacctccaccgacgcgacctctcccttcctctctactctttcttcctattttctcttccctcctccccctaacctccgcgtctcctcctaatccgacgctaacgctcgcgtaaaaaccctaacgtcaaacgcgcgaaaacgaaacgaatacgacgcgaaatataaataaaaaatacaaaaaacg

SEQ ID NO: 17815 - DNA, 876 bp, Artificial Sequence
  chemically treated genomic DNA (Homo sapiens) CpG-island No: 17815
gaggagggtcgggttggaaaagaagaggacgaggaattcgaggggtttttttttttttttttttgttttttaatttcgcgtcgggagttttagcggtgtcggggtttagcgcgtaggacggttggggggtttcggagcgggcggttaggattcgcgtagttagttggtgttagcgagcgtcgcggtcgttggggattttagtttttagtaggtatcgtttttgcggtcgacgcgcgtggcggcggtgtcggttgggattcgtagtgcggttcgggtaggagagagtagggggttacgttggttttatttacgtacgtttcggaaatcgggttcggaggggattacgttcgtttattcgtgttcggcgtttttcggagttggggttagaggagtcgggtcggtcgtagcgggaagaggttataggcggtcgcgtacgtggggggtggttagcgcggaggaattcggaagttttttgtatcgtttatcgtcgcggtgattggttaacgttttttttggtggaggtaggggcgggcggggcggaaggcggggattttttagttaatattttcgatgatcgttcgcgagtcgttttttttatttttacggacgcgacgtagcgcggtttcgttttttcggtcgtagcgtttgcgtaaaagtttcgttttttcgttcgagttttatttttatatcgtagtttttatcggcgcgatttttttttttttttttgttttttttttttgttttttttttttttttttttttggttttcgcgtttttttttaattcggcgttgacgttcgcgtaggggttttggcgttagacgcgcgggggcggggcgagtgcggcgcggggtataagtagagggtgtaggaggcg

SEQ ID NO: 17816 - DNA, 876 bp, Artificial Sequence
  chemically treated genomic DNA (Homo sapiens) CpG-island No: 17816
cgcctcctacaccctctacttataccccgcgccgcactcgccccgcccccgcgcgtctaacgccaaaacccctacgcgaacgtcaacgccgaattaaaaaaaaacgcgaaaaccaaaaaaaaaaaaaaaaaaaaaacaaaaaaaaaaaacaaaaaaaaaaaaaaaaatcgcgccgataaaaactacgatataaaaataaaactcgaacgaaaaaacgaaacttttacgcaaacgctacgaccgaaaaaacgaaaccgcgctacgtcgcgtccgtaaaaataaaaaaaacgactcgcgaacgatcatcgaaaatattaactaaaaaatccccgccttccgccccgcccgcccctacctccaccaaaaaaaacgttaaccaatcaccgcgacgataaacgatacaaaaaacttccgaattcctccgcgctaaccaccccccacgtacgcgaccgcctataacctcttcccgctacgaccgacccgactcctctaaccccaactccgaaaaacgccgaacacgaataaacgaacgtaatcccctccgaacccgatttccgaaacgtacgtaaataaaaccaacgtaaccccctactctctcctacccgaaccgcactacgaatcccaaccgacaccgccgccacgcgcgtcgaccgcaaaaacgatacctactaaaaactaaaatccccaacgaccgcgacgctcgctaacaccaactaactacgcgaatcctaaccgcccgctccgaaaccccccaaccgtcctacgcgctaaaccccgacaccgctaaaactcccgacgcgaaattaaaaaacaaaaaaaaaaaaaaaaaaacccctcgaattcctcgtcctcttcttttccaacccgaccctcctc

SEQ ID NO: 17817 - DNA, 858 bp, Artificial Sequence
  chemically treated genomic DNA (Homo sapiens) CpG-island No: 17817
ttgcgtttttcgcgggagtgttggcggcgggggtcgttttgcgcggggatattgggtagagggggcgtgcggtttttttaggaagttttttcggagttttagatattggcgaggcgtcgcgtttttttttttggatttcggcgcgttttttgaattcgggagttacgagcggagtcgtttttttttgtagtcgttttgggtttggcgcggacgtatttttcggtcgatttcgagtcgttgtagtcggcgtttttgcggtttttaattcgcgttgtttcgttcgtagcggaggtttcgtaattcgcgcgataggggtttgggtttcggacgtttagttaggagtcgagtcgttagtcgttcgtatttcgggttaatagggttcgttgtcgtttttgtagttacgtttacgcggcggcgatgcgtaggcgtagaagttcggaatattttcgtttagtttttgggttcggtcggattgagttcgttgttgtttcggtttttttcgagtcggttttaattgttaggtgggcggtcgggcgggcggtcgaggcggtagcgcgaggtcggggaggggcgcggtgcggggtcgggtttttgcgtgggcgatttcgtttattttttttttttcggttttgcgtagttcgggttggcgttatgtacgtcgtgtataaataggcgtattcgtttatcggtttggagttttttatgtattgtaatttttttaataatagcgagcgtaatttggtagtggtcgggatttcgtagttttacgtgtatcgttttaatcgcgacgtcgaggtaggtcgggttttgggagtttttttcgttgttcgcgaagtgggtgtttttatcgttttcggt

SEQ ID NO: 17818 - DNA, 858 bp, Artificial Sequence
  chemically treated genomic DNA (Homo sapiens) CpG-island No: 17818
accgaaaacgataaaaacacccacttcgcgaacaacgaaaaaaactcccaaaacccgacctacctcgacgtcgcgattaaaacgatacacgtaaaactacgaaatcccgaccactaccaaattacgctcgctattattaaaaaaattacaatacataaaaaactccaaaccgataaacgaatacgcctatttatacacgacgtacataacgccaacccgaactacgcaaaaccgaaaaaaaaaaaataaacgaaatcgcccacgcaaaaacccgaccccgcaccgcgcccctccccgacctcgcgctaccgcctcgaccgcccgcccgaccgcccacctaacaattaaaaccgactcgaaaaaaaccgaaacaacaacgaactcaatccgaccgaacccaaaaactaaacgaaaatattccgaacttctacgcctacgcatcgccgccgcgtaaacgtaactacaaaaacgacaacgaaccctattaacccgaaatacgaacgactaacgactcgactcctaactaaacgtccgaaacccaaacccctatcgcgcgaattacgaaacctccgctacgaacgaaacaacgcgaattaaaaaccgcaaaaacgccgactacaacgactcgaaatcgaccgaaaaatacgtccgcgccaaacccaaaacgactacaaaaaaaaacgactccgctcgtaactcccgaattcaaaaaacgcgccgaaatccaaaaaaaaaaacgcgacgcctcgccaatatctaaaactccgaaaaaacttcctaaaaaaaccgcacgccccctctacccaatatccccgcgcaaaacgacccccgccgccaacactcccgcgaaaaacgcaa

SEQ ID NO: 17819 - DNA, 858 bp, Artificial Sequence
  chemically treated genomic DNA (Homo sapiens) CpG-island No: 17819
atcgggggcggtgagagtatttatttcgcggatagcggggagggtttttagggttcgatttatttcggcgtcgcggttgaggcggtatacgtagagttgcgaggtttcggttattattaggttgcgttcgttgttgttgaagaagttgtagtatatggagaattttagatcggtgggcggatgcgtttgtttgtatacggcgtatatggcgttaattcgggttgcgtaaggtcgggagaggaagggtgagcggggtcgtttacgtaggagttcggtttcgtatcgcgttttttttcggtttcgcgttgtcgtttcggtcgttcgttcggtcgtttatttggtagttggagtcgattcgagaggaatcgggatagtagcgaatttagttcggtcgggtttagaagttgggcgggaatgtttcgggtttttgcgtttgcgtatcgtcgtcgcgtgagcgtggttgtaggggcgatagcgggttttattggttcgggatgcgggcggttggcggttcggtttttggttgggcgttcggaatttaaatttttatcgcgcgaattgcggggttttcgttgcgggcggagtagcgcgggttggaagtcgtaggggcgtcggttgtagcggttcggggtcggtcggggggtgcgttcgcgttagatttaggacggttgtagggagaagcgatttcgttcgtagttttcgggtttagggggcgcgtcggaatttagaagagggggcgcggcgtttcgttagtgtttggggtttcgagaaagttttttagagaggtcgtacgttttttttgtttagtgttttcgcgtagagcgattttcgtcgttaatattttcgcggaggacgtag

SEQ ID NO: 17820 - DNA, 858 bp, Artificial Sequence
  chemically treated genomic DNA (Homo sapiens) CpG-island No: 17820
ctacgtcctccgcgaaaatattaacgacgaaaatcgctctacgcgaaaacactaaacaaaaaaaacgtacgacctctctaaaaaactttctcgaaaccccaaacactaacgaaacgccgcgccccctcttctaaattccgacgcgccccctaaacccgaaaactacgaacgaaatcgcttctccctacaaccgtcctaaatctaacgcgaacgcaccccccgaccgaccccgaaccgctacaaccgacgcccctacgacttccaacccgcgctactccgcccgcaacgaaaaccccgcaattcgcgcgataaaaatttaaattccgaacgcccaaccaaaaaccgaaccgccaaccgcccgcatcccgaaccaataaaacccgctatcgcccctacaaccacgctcacgcgacgacgatacgcaaacgcaaaaacccgaaacattcccgcccaacttctaaacccgaccgaactaaattcgctactatcccgattcctctcgaatcgactccaactaccaaataaacgaccgaacgaacgaccgaaacgacaacgcgaaaccgaaaaaaaacgcgatacgaaaccgaactcctacgtaaacgaccccgctcacccttcctctcccgaccttacgcaacccgaattaacgccatatacgccgtatacaaacaaacgcatccgcccaccgatctaaaattctccatatactacaacttcttcaacaacaacgaacgcaacctaataataaccgaaacctcgcaactctacgtataccgcctcaaccgcgacgccgaaataaatcgaaccctaaaaaccctccccgctatccgcgaaataaatactctcaccgcccccgat

SEQ ID NO: 17821 - DNA, 1099 bp, Artificial Sequence
  chemically treated genomic DNA (Homo sapiens) CpG-island No: 17821
agaagcgcgttagggacgttattgtaagttgcgtgcgtagaaattaacgcgttgggtggcgggcgacgcgagtcgtcgcggatatcggttcggatagttggatcgtggcgtattaggcgttttttaaatgattgttcggagtgattcgtcgagatttcgtgtgtatataagtgggacgaggggcgggcgtatagcggttaggaagtcggggtttagcgtattttttagcggattatttcgtttcgtggggtcggataggatttcgggattacgcgggagcgatgtaaggttcgttttcgttgcgcgtatttgcggttcgtagtttcggttttgggagttgttacggtttttagggtgttttgcgtcggtgcggtcgcggcgattacgatttttagggtgttttgcgtcggcgcgttcgcggcgattacgatttttagggtgttttgcgtttcgttagtttttttaggtttcgttttaggtcggtcgcggattataaatggacgagagaggcggtcgtttattagttagcggtttcggagtaacgtagtcgttgtttttgaggtcgacgggtttgacgcgggcgggttgaacgcgttggtgaggcggttattcgggttacggcggtcggtagggggtagtggcggtcgttgtttagggttcggaggtggggtcgcgcgtttcgggcgttacgaattcggtaggtttacgtttggttgcggtcgggtgcgggttgaggttatgggcgatcgcggtagttttcggcgtcggaggatagggtcgcggttttcgagttacggcggcggcgggtttgcggcggcggaagaggaggtgcgggacgtcgttgcgggtttcgacgtgggagtcgcgggggacgcgttagtttcggtttttaataaggacggagacgtcggcgtgggtagcggttattgggagttgaggtagcggagcgtttgattttttaatttttgatttaagggtttcgcgatttttcggggttggtcgaagcgcgagtttcgagttcgagaatatgggttttgggttaagcggggatcggtgtgttttatgggttttgtggggaaattgaggtttggggagagtt

SEQ ID NO: 17822 - DNA, 1099 bp, Artificial Sequence
  chemically treated genomic DNA (Homo sapiens) CpG-island No: 17822
aactctccccaaacctcaatttccccacaaaacccataaaacacaccgatccccgcttaacccaaaacccatattctcgaactcgaaactcgcgcttcgaccaaccccgaaaaatcgcgaaacccttaaatcaaaaattaaaaaatcaaacgctccgctacctcaactcccaataaccgctacccacgccgacgtctccgtccttattaaaaaccgaaactaacgcgtcccccgcgactcccacgtcgaaacccgcaacgacgtcccgcacctcctcttccgccgccgcaaacccgccgccgccgtaactcgaaaaccgcgaccctatcctccgacgccgaaaactaccgcgatcgcccataacctcaacccgcacccgaccgcaaccaaacgtaaacctaccgaattcgtaacgcccgaaacgcgcgaccccacctccgaaccctaaacaacgaccgccactaccccctaccgaccgccgtaacccgaataaccgcctcaccaacgcgttcaacccgcccgcgtcaaacccgtcgacctcaaaaacaacgactacgttactccgaaaccgctaactaataaacgaccgcctctctcgtccatttataatccgcgaccgacctaaaacgaaacctaaaaaaactaacgaaacgcaaaacaccctaaaaatcgtaatcgccgcgaacgcgccgacgcaaaacaccctaaaaatcgtaatcgccgcgaccgcaccgacgcaaaacaccctaaaaaccgtaacaactcccaaaaccgaaactacgaaccgcaaatacgcgcaacgaaaacgaaccttacatcgctcccgcgtaatcccgaaatcctatccgaccccacgaaacgaaataatccgctaaaaaatacgctaaaccccgacttcctaaccgctatacgcccgcccctcgtcccacttatatacacacgaaatctcgacgaatcactccgaacaatcatttaaaaaacgcctaatacgccacgatccaactatccgaaccgatatccgcgacgactcgcgtcgcccgccacccaacgcgttaatttctacgcacgcaacttacaataacgtccctaacgcgcttct

SEQ ID NO: 17823 - DNA, 1099 bp, Artificial Sequence
  chemically treated genomic DNA (Homo sapiens) CpG-island No: 17823
gattttttttaagttttagtttttttatagggtttatagggtatatcgattttcgtttagtttagggtttatgttttcggattcggagttcgcgtttcggttaatttcggaaagtcgcggggtttttgggttagaggttagggggttaggcgtttcgttattttagtttttagtggtcgttgtttacgtcggcgttttcgtttttgttgggggtcggggttggcgcgtttttcgcggtttttacgtcggggttcgtagcggcgtttcgtattttttttttcgtcgtcgtaggttcgtcgtcgtcgtggttcgagggtcgcgattttgtttttcggcgtcgggagttgtcgcggtcgtttatggttttagttcgtattcggtcgtagttaagcgtgggtttgtcgggttcgtagcgttcgaggcgcgcggttttattttcgggttttagataacggtcgttattgttttttgtcggtcgtcgtagttcgggtgatcgttttattagcgcgtttaattcgttcgcgttaggttcgtcggttttaaggataacggttgcgttgtttcggagtcgttaattaatggacggtcgtttttttcgtttatttgtagttcgcggtcgatttgaggcggggtttggagaggttgacggggcgtagggtattttgggagtcgtagtcgtcgcgggcgcgtcggcgtaaagtattttgggagtcgtagtcgtcgcggtcgtatcggcgtagaatattttgggagtcgtggtagtttttagggtcggggttgcgggtcgtaagtgcgcgtagcgggaacggattttgtatcgttttcgcgtggtttcggggttttgttcggttttacggagcgggatggttcgttgaggggtgcgttgggtttcgattttttggtcgttgtgcgttcgtttttcgttttatttgtgtatatacggggtttcggcgagttatttcgggtaattatttaggaagcgtttagtgcgttacggtttagttgttcgggtcggtgttcgcggcggttcgcgtcgttcgttatttagcgcgttggtttttgcgtacgtagtttatagtaacgtttttggcgcgttttt

SEQ ID NO: 17824 - DNA, 1099 bp, Artificial Sequence
  chemically treated genomic DNA (Homo sapiens) CpG-island No: 17824
aaaaacgcgccaaaaacgttactataaactacgtacgcaaaaaccaacgcgctaaataacgaacgacgcgaaccgccgcgaacaccgacccgaacaactaaaccgtaacgcactaaacgcttcctaaataattacccgaaataactcgccgaaaccccgtatatacacaaataaaacgaaaaacgaacgcacaacgaccaaaaaatcgaaacccaacgcacccctcaacgaaccatcccgctccgtaaaaccgaacaaaaccccgaaaccacgcgaaaacgatacaaaatccgttcccgctacgcgcacttacgacccgcaaccccgaccctaaaaactaccacgactcccaaaatattctacgccgatacgaccgcgacgactacgactcccaaaatactttacgccgacgcgcccgcgacgactacgactcccaaaataccctacgccccgtcaacctctccaaaccccgcctcaaatcgaccgcgaactacaaataaacgaaaaaaacgaccgtccattaattaacgactccgaaacaacgcaaccgttatccttaaaaccgacgaacctaacgcgaacgaattaaacgcgctaataaaacgatcacccgaactacgacgaccgacaaaaaacaataacgaccgttatctaaaacccgaaaataaaaccgcgcgcctcgaacgctacgaacccgacaaacccacgcttaactacgaccgaatacgaactaaaaccataaacgaccgcgacaactcccgacgccgaaaaacaaaatcgcgaccctcgaaccacgacgacgacgaacctacgacgacgaaaaaaaaaatacgaaacgccgctacgaaccccgacgtaaaaaccgcgaaaaacgcgccaaccccgacccccaacaaaaacgaaaacgccgacgtaaacaacgaccactaaaaactaaaataacgaaacgcctaaccccctaacctctaacccaaaaaccccgcgactttccgaaattaaccgaaacgcgaactccgaatccgaaaacataaaccctaaactaaacgaaaatcgatataccctataaaccctataaaaaaactaaaacttaaaaaaaatc

SEQ ID NO: 17825 - DNA, 501 bp, Artificial Sequence
  chemically treated genomic DNA (Homo sapiens) CpG-island No: 17825
atttcgggcgtttcgggtcgggagagtttttatcggtcgttatattttcgattattgtttcgtttttttttcgttcggcgtcgtttagcgtttcgtagtttagtaggttttgcgggagggcgcgtagtgcgtacgcgtcggagttagagtttcgtttcgtgggcggtgggcgaggttggaggttacgtttcgagtcgtgtcggttttcgcggcggggtagcgttttttggcggtttttagaggtttattttttggcgttcggatcgcgttttttgagagcggagggttttagtttcgttttcggcgtattgcgtatttttcgggtaggtatttgtcggaaggatcgttgtgagaagtacgtggataattcggggagggttgagggttttttgaggtttttacggttcggtattcgtttttttttaatatttcgtgttatagtgtgattagcgtgaatttttttaattttaggattttaatttattatttgtttgtgtgagg

SEQ ID NO: 17826 - DNA, 501 bp, Artificial Sequence
  chemically treated genomic DNA (Homo sapiens) CpG-island No: 17826
cctcacacaaacaaataataaattaaaatcctaaaattaaaaaaattcacgctaatcacactataacacgaaatattaaaaaaaaacgaataccgaaccgtaaaaacctcaaaaaaccctcaaccctccccgaattatccacgtacttctcacaacgatccttccgacaaatacctacccgaaaaatacgcaatacgccgaaaacgaaactaaaaccctccgctctcaaaaaacgcgatccgaacgccaaaaaataaacctctaaaaaccgccaaaaaacgctaccccgccgcgaaaaccgacacgactcgaaacgtaacctccaacctcgcccaccgcccacgaaacgaaactctaactccgacgcgtacgcactacgcgccctcccgcaaaacctactaaactacgaaacgctaaacgacgccgaacgaaaaaaaaacgaaacaataatcgaaaatataacgaccgataaaaactctcccgacccgaaacgcccgaaat

SEQ ID NO: 17827 - DNA, 501 bp, Artificial Sequence
  chemically treated genomic DNA (Homo sapiens) CpG-island No: 17827
ttttatataggtaggtggtgagttggagttttgaggttaaagagatttacgttaattatattatagtacggagtgttaaagagaggcggatatcgggtcgtgaggattttaggaagtttttagtttttttcggattatttacgtgttttttatagcggttttttcggtaggtgtttgttcggggaatgcgtagtgcgtcgagggcgggattggaatttttcgtttttaggaggcgcggttcgggcgttaaaaggtaagtttttgggggtcgttaggggacgttgtttcgtcgcggaggtcggtacgattcggggcgtggtttttagtttcgtttatcgtttacggggcggggttttggtttcggcgcgtgcgtattacgcgttttttcgtagggtttgttgggttgcgagacgttaagcggcgtcgggcgggagaagagcggagtagtggtcggagatgtggcgatcggtgaggattttttcggttcggggcgttcgagat

SEQ ID NO: 17828 - DNA, 501 bp, Artificial Sequence
  chemically treated genomic DNA (Homo sapiens) CpG-island No: 17828
atctcgaacgccccgaaccgaaaaaatcctcaccgatcgccacatctccgaccactactccgctcttctcccgcccgacgccgcttaacgtctcgcaacccaacaaaccctacgaaaaaacgcgtaatacgcacgcgccgaaaccaaaaccccgccccgtaaacgataaacgaaactaaaaaccacgccccgaatcgtaccgacctccgcgacgaaacaacgtcccctaacgacccccaaaaacttaccttttaacgcccgaaccgcgcctcctaaaaacgaaaaattccaatcccgccctcgacgcactacgcattccccgaacaaacacctaccgaaaaaaccgctataaaaaacacgtaaataatccgaaaaaaactaaaaacttcctaaaatcctcacgacccgatatccgcctctctttaacactccgtactataatataattaacgtaaatctctttaacctcaaaactccaactcaccacctacctatataaaa

SEQ ID NO: 17829 - DNA, 1134 bp, Artificial Sequence
  chemically treated genomic DNA (Homo sapiens) CpG-island No: 17829
ttttcggcgtcgtttttgaagtaggtcgattcgtagtgtttgttgagataggatttgagcgcgaagttttttttgtagcgtttgtattggaagtgtttgaaggtcgaatgcgtttgtatgtgcgcgcgtaggttggagcggtcggcgaaggttttgtcgtagtgcgcgtagtcgaagggtttttcgtcggtgtgcgagcgtatgtggttttgtagtagttagggtcgcgagaaggttttgtcgtatacgtcgtatttgtggcgtaggtcgtgcgtgagtaggtgtatggttatggtcggtatggatacgtatattttgtcgtacgtcgggtagcgtcgcgttagttggttgtttaggttgcggtgcgtttgtttgtggcggtttaggttcgacgacgtggcgtatgttttgtcgtattcgtcgtacgcgtgtcggtcgttagtatttgcggtttttggtttcgcgcgcgtttcggtgtttgttttcgtacgcgtgtcgtttcggtttttcggttcggattttaagatgagttcgttcgttcggttttcgttttaggagtagtcgtcgggggtcgtcgtcgaggttgtggagggagcggcggtagaatcggtattggaagttttacgtcgcgagcgttcgtcggtgatgaagaaggagttcgtcgcgtagttttcgttgacggtcgcgtcgtcgttgatgtagtcgttcgtagcggtggttagtttcgggcgcggggtgggcggcggcgtagattttgtagtcgtcggatttagttttttacgtatagttgttgcgtatatgggtttcggcgacggttttttgagtagcgtagtttcggcgtcgttatcgtagacggacgagggttttacgtagtcgttgaggtattttgcgggcggaggcggacggatagcgggaagggaatggggcggcggtaggatatatacgggggatgggggggcgggagatattatacgtcgatcgggagattcgggttcgggagagaggcgaatagggaggaggataaaggagaggaagtcgagggatcgtcgggtagcgaggatggagatagtatggaggggaagagaggggaggagaggatgagatagggtcgggttacgtttcgtttttttcggt

SEQ ID NO: 17830 - DNA, 1134 bp, Artificial Sequence
  chemically treated genomic DNA (Homo sapiens) CpG-island No: 17830
accgaaaaaaacgaaacgtaacccgaccctatctcatcctctcctcccctctcttcccctccatactatctccatcctcgctacccgacgatccctcgacttcctctcctttatcctcctccctattcgcctctctcccgaacccgaatctcccgatcgacgtataatatctcccgcccccccatcccccgtatatatcctaccgccgccccattcccttcccgctatccgtccgcctccgcccgcaaaatacctcaacgactacgtaaaaccctcgtccgtctacgataacgacgccgaaactacgctactcaaaaaaccgtcgccgaaacccatatacgcaacaactatacgtaaaaaactaaatccgacgactacaaaatctacgccgccgcccaccccgcgcccgaaactaaccaccgctacgaacgactacatcaacgacgacgcgaccgtcaacgaaaactacgcgacgaactccttcttcatcaccgacgaacgctcgcgacgtaaaacttccaataccgattctaccgccgctccctccacaacctcgacgacgacccccgacgactactcctaaaacgaaaaccgaacgaacgaactcatcttaaaatccgaaccgaaaaaccgaaacgacacgcgtacgaaaacaaacaccgaaacgcgcgcgaaaccaaaaaccgcaaatactaacgaccgacacgcgtacgacgaatacgacaaaacatacgccacgtcgtcgaacctaaaccgccacaaacaaacgcaccgcaacctaaacaaccaactaacgcgacgctacccgacgtacgacaaaatatacgtatccataccgaccataaccatacacctactcacgcacgacctacgccacaaatacgacgtatacgacaaaaccttctcgcgaccctaactactacaaaaccacatacgctcgcacaccgacgaaaaacccttcgactacgcgcactacgacaaaaccttcgccgaccgctccaacctacgcgcgcacatacaaacgcattcgaccttcaaacacttccaatacaaacgctacaaaaaaaacttcgcgctcaaatcctatctcaacaaacactacgaatcgacctacttcaaaaacgacgccgaaaa

SEQ ID NO: 17831 - DNA, 1134 bp, Artificial Sequence
  chemically treated genomic DNA (Homo sapiens) CpG-island No: 17831
gtcggggggggcggagcgtggttcggttttgttttattttttttttttttttttttttttttatgttgtttttattttcgttgttcggcggtttttcggtttttttttttttgtttttttttttgttcgtttttttttcggattcgggtttttcggtcggcgtatgatgtttttcgtttttttatttttcgtgtgtgttttgtcgtcgttttatttttttttcgttgttcgttcgttttcgttcgtagggtattttagcgattacgtggggttttcgttcgtttacgatggcgacgtcgaggttgcgttgtttaaagggtcgtcgtcggagtttatgtacgtagtagttgtgcgtggagagttgggttcggcggttgtagggtttgcgtcgtcgtttatttcgcgttcggagttggttatcgttgcgggcggttatattaacggcgacgcggtcgttagcgagggttacgcggcggattttttttttattatcgacgggcgttcgcggcgtaaggtttttaatgtcggttttgtcgtcgttttttttatagtttcggcggcggttttcgacggttatttttgaggcgggggtcgggcgggcgggtttattttgggattcgggtcggggggtcggggcggtacgcgtgcgggggtaggtatcgaggcgcgcgcggggttaggggtcgtaggtgttggcggtcggtacgcgtgcggcgagtgcggtaaaatatacgttacgtcgtcgaatttgagtcgttataagtagacgtatcgtagtttggatagttagttggcgcggcgttgttcgacgtgcggtaaggtgtacgtgtttatgtcggttatggttatgtatttgtttacgtacgatttgcgttataagtgcggcgtgtgcggtaaagttttttcgcggttttggttgttgtagggttatatgcgttcgtatatcggcgagaaatttttcggttgcgcgtattgcggtaaggttttcgtcgatcgttttaatttgcgcgcgtatatgtagacgtattcggtttttaagtatttttagtgtaagcgttgtaagaagagtttcgcgtttaagttttattttaataagtattacgagtcggtttgttttaagggcggcgtcggagg

SEQ ID NO: 17832 - DNA, 1134 bp, Artificial Sequence
  chemically treated genomic DNA (Homo sapiens) CpG-island No: 17832
cctccgacgccgcccttaaaacaaaccgactcgtaatacttattaaaataaaacttaaacgcgaaactcttcttacaacgcttacactaaaaatacttaaaaaccgaatacgtctacatatacgcgcgcaaattaaaacgatcgacgaaaaccttaccgcaatacgcgcaaccgaaaaatttctcgccgatatacgaacgcatataaccctacaacaaccaaaaccgcgaaaaaactttaccgcacacgccgcacttataacgcaaatcgtacgtaaacaaatacataaccataaccgacataaacacgtacaccttaccgcacgtcgaacaacgccgcgccaactaactatccaaactacgatacgtctacttataacgactcaaattcgacgacgtaacgtatattttaccgcactcgccgcacgcgtaccgaccgccaacacctacgacccctaaccccgcgcgcgcctcgatacctacccccgcacgcgtaccgccccgaccccccgacccgaatcccaaaataaacccgcccgcccgacccccgcctcaaaaataaccgtcgaaaaccgccgccgaaactataaaaaaaacgacgacaaaaccgacattaaaaaccttacgccgcgaacgcccgtcgataataaaaaaaaaatccgccgcgtaaccctcgctaacgaccgcgtcgccgttaatataaccgcccgcaacgataaccaactccgaacgcgaaataaacgacgacgcaaaccctacaaccgccgaacccaactctccacgcacaactactacgtacataaactccgacgacgaccctttaaacaacgcaacctcgacgtcgccatcgtaaacgaacgaaaaccccacgtaatcgctaaaataccctacgaacgaaaacgaacgaacaacgaaaaaaaaataaaacgacgacaaaacacacacgaaaaataaaaaaacgaaaaacatcatacgccgaccgaaaaacccgaatccgaaaaaaaaacgaacaaaaaaaaaaacaaaaaaaaaaaaaccgaaaaaccgccgaacaacgaaaataaaaacaacataaaaaaaaaaaaaaaaaaaaaaaaaataaaacaaaaccgaaccacgctccgccccccccgac

SEQ ID NO: 17833 - DNA, 661 bp, Artificial Sequence
  chemically treated genomic DNA (Homo sapiens) CpG-island No: 17833
ggggacgatagggttacggtgtgttagagcgcgggttgggaagcggttttttgttagcggcggtatacgcgcgtagttttgggaggatagcgtgttgagggtgtcggttttttcgtaggcgatgtttttttttcgtagcgtagtagatatttcggtttaaagtcgggtttttgggattttaattgggcgtttaaggggttgcgttttcggattgagcggtgcgcgtttcgatgttttcgtttttcgttttcgttcgggttatcgttcggattacgtttggtttaagtcgttacgttcggcggcgggttcggtattagcgttatttgtttaggaagggtatggggtcgttcgtcgttattaataattcgaaaatttgtattaggatttttaagggaatgcggtttttttagttcgcgtcgggttttttttcgggcgtgggcgtgggtgtcggtgcgggtgcgggcgcggtcgtcgtttcggatttgagttcggttttgggtttggtcgcggcgttggggtttcggggcggttgtcggggaatgcggcgggaatcgcgtcgttgtgcgcggggtcgggcggggtttggtttagatagtattagtagtatgttgtcggattgtagtaggtggtatttcgagtttttcggcgttagtcggtttta

SEQ ID NO: 17834 - DNA, 661 bp, Artificial Sequence
  chemically treated genomic DNA (Homo sapiens) CpG-island No: 17834
taaaaccgactaacgccgaaaaactcgaaataccacctactacaatccgacaacatactactaatactatctaaaccaaaccccgcccgaccccgcgcacaacgacgcgattcccgccgcattccccgacaaccgccccgaaaccccaacgccgcgaccaaacccaaaaccgaactcaaatccgaaacgacgaccgcgcccgcacccgcaccgacacccacgcccacgcccgaaaaaaaacccgacgcgaactaaaaaaaccgcattcccttaaaaatcctaatacaaattttcgaattattaataacgacgaacgaccccatacccttcctaaacaaataacgctaataccgaacccgccgccgaacgtaacgacttaaaccaaacgtaatccgaacgataacccgaacgaaaacgaaaaacgaaaacatcgaaacgcgcaccgctcaatccgaaaacgcaaccccttaaacgcccaattaaaatcccaaaaacccgactttaaaccgaaatatctactacgctacgaaaaaaaaacatcgcctacgaaaaaaccgacaccctcaacacgctatcctcccaaaactacgcgcgtataccgccgctaacaaaaaaccgcttcccaacccgcgctctaacacaccgtaaccctatcgtcccc

SEQ ID NO: 17835 - DNA, 661 bp, Artificial Sequence
  chemically treated genomic DNA (Homo sapiens) CpG-island No: 17835
tgggatcggttggcgtcgaggggttcggggtattatttgttgtagttcgatagtatgttgttggtgttgtttgaattaggtttcgttcggtttcgcgtatagcggcgcgattttcgtcgtatttttcggtagtcgtttcggggttttagcgtcgcggttaagtttaaggtcgggtttaggttcgaggcggcggtcgcgttcgtattcgtatcggtatttacgtttacgttcgaggaagggttcgacgcgggttggggagatcgtatttttttggaaattttggtgtagattttcgggttgttggtggcggcggacggttttatgttttttttgggtaggtaacgttggtgtcgggttcgtcgtcgagcgtagcggtttgggttagacgtggttcgagcggtggttcgggcgggggcggagggcgaaagtatcggagcgcgtatcgtttagttcgagagcgtagttttttaggcgtttagttggagttttaggagttcggttttgagtcggggtgtttattgcgttgcgagaggggggtatcgtttacggaggggtcggtatttttagtacgttgtttttttagggttgcgcgcgtgtgtcgtcgttggtaggaggtcgttttttaattcgcgttttggtatatcgtgattttgtcgttttt

SEQ ID NO: 17836 - DNA, 661 bp, Artificial Sequence
  chemically treated genomic DNA (Homo sapiens) CpG-island No: 17836
aaaaacgacaaaatcacgatataccaaaacgcgaattaaaaaacgacctcctaccaacgacgacacacgcgcgcaaccctaaaaaaacaacgtactaaaaataccgacccctccgtaaacgatacccccctctcgcaacgcaataaacaccccgactcaaaaccgaactcctaaaactccaactaaacgcctaaaaaactacgctctcgaactaaacgatacgcgctccgatactttcgccctccgcccccgcccgaaccaccgctcgaaccacgtctaacccaaaccgctacgctcgacgacgaacccgacaccaacgttacctacccaaaaaaaacataaaaccgtccgccgccaccaacaacccgaaaatctacaccaaaatttccaaaaaaatacgatctccccaacccgcgtcgaacccttcctcgaacgtaaacgtaaataccgatacgaatacgaacgcgaccgccgcctcgaacctaaacccgaccttaaacttaaccgcgacgctaaaaccccgaaacgactaccgaaaaatacgacgaaaatcgcgccgctatacgcgaaaccgaacgaaacctaattcaaacaacaccaacaacatactatcgaactacaacaaataataccccgaacccctcgacgccaaccgatccca

SEQ ID NO: 17837 - DNA, 582 bp, Artificial Sequence
  chemically treated genomic DNA (Homo sapiens) CpG-island No: 17837
ggtcgagcggggtcgcggcgttgttcgggttttgcgtcggatttgtcgggaggttggggtagttatgattatcgacggcgttcggggaagttttagggagcggaacgggcgaggtttatagatcgattatttttcggttttttttaacgttcgttcgttcgtcgattagttttcggggcgggattttcggtcgtgggttatgtcgggggcgggttcggaatcgttacgggtgagtcgggtcgtggttgttgtcgggttttgcgcgtttcggattgaggtggcgtttttgggtcggacggcggtgtttcggcgtggcgggaagtcggtattggagcgggagcgtattgggcgcgggatcgggaggcgtagggatcggacggttttcgagtcgtttatttgacggtatcgagagggcggcgttttttcgagtagagtcgtttcggttatttttttgggatttgatttggtttttgcggtcgcgggtatcgtgaagttttggggtgtgcgtggttttttttggtaggcgttttttttcggcgttcggtttggggtggtggtggcgttgattttagtttcgttttt

SEQ ID NO: 17838 - DNA, 582 bp, Artificial Sequence
  chemically treated genomic DNA (Homo sapiens) CpG-island No: 17838
aaaaacgaaactaaaatcaacgccaccaccaccccaaaccgaacgccgaaaaaaaacgcctaccaaaaaaaaccacgcacaccccaaaacttcacgatacccgcgaccgcaaaaaccaaatcaaatcccaaaaaaataaccgaaacgactctactcgaaaaaacgccgccctctcgataccgtcaaataaacgactcgaaaaccgtccgatccctacgcctcccgatcccgcgcccaatacgctcccgctccaataccgacttcccgccacgccgaaacaccgccgtccgacccaaaaacgccacctcaatccgaaacgcgcaaaacccgacaacaaccacgacccgactcacccgtaacgattccgaacccgcccccgacataacccacgaccgaaaatcccgccccgaaaactaatcgacgaacgaacgaacgttaaaaaaaaccgaaaaataatcgatctataaacctcgcccgttccgctccctaaaacttccccgaacgccgtcgataatcataactaccccaacctcccgacaaatccgacgcaaaacccgaacaacgccgcgaccccgctcgacc

SEQ ID NO: 17839 - DNA, 582 bp, Artificial Sequence
  chemically treated genomic DNA (Homo sapiens) CpG-island No: 17839
agaggcggggttggagttaacgttattattattttaagtcggacgtcgggaaagggcgtttattaggaggagttacgtatattttagggttttacggtgttcgcgatcgtaagagttaagttagattttaggggagtggtcgggacggttttgttcggaggggcgtcgttttttcggtatcgttaggtgggcgattcgggagtcgttcggtttttgcgtttttcggtttcgcgtttagtgcgttttcgttttagtgtcggtttttcgttacgtcgggatatcgtcgttcggtttagggacgttattttagttcggagcgcgtaggattcggtagtagttacgattcgatttattcgtggcggtttcgggttcgttttcggtatggtttacgatcggaagtttcgtttcggaagttggtcggcgggcgggcgggcgttgagaggaatcggggggtagtcggtttataagtttcgttcgtttcgttttttggggttttttcgagcgtcgtcggtggttatggttgttttagtttttcggtaggttcgacgtagagttcgggtagcgtcgcggtttcgttcggtt

SEQ ID NO: 17840 - DNA, 582 bp, Artificial Sequence
  chemically treated genomic DNA (Homo sapiens) CpG-island No: 17840
aaccgaacgaaaccgcgacgctacccgaactctacgtcgaacctaccgaaaaactaaaacaaccataaccaccgacgacgctcgaaaaaaccccaaaaaacgaaacgaacgaaacttataaaccgactaccccccgattcctctcaacgcccgcccgcccgccgaccaacttccgaaacgaaacttccgatcgtaaaccataccgaaaacgaacccgaaaccgccacgaataaatcgaatcgtaactactaccgaatcctacgcgctccgaactaaaataacgtccctaaaccgaacgacgatatcccgacgtaacgaaaaaccgacactaaaacgaaaacgcactaaacgcgaaaccgaaaaacgcaaaaaccgaacgactcccgaatcgcccacctaacgataccgaaaaaacgacgcccctccgaacaaaaccgtcccgaccactcccctaaaatctaacttaactcttacgatcgcgaacaccgtaaaaccctaaaatatacgtaactcctcctaataaacgccctttcccgacgtccgacttaaaataataataacgttaactccaaccccgcctct

SEQ ID NO: 17841 - DNA, 590 bp, Artificial Sequence
  chemically treated genomic DNA (Homo sapiens) CpG-island No: 17841
gtttagcggcgggcgtatgtttagttatcgtgaggttgcgtttgttcggggttcgcgtttttttatttcggggatcgttttcgggtcgttcgttttatttggcgcgttattttcgcgtgtatggttttgttgtttcgagttttgagcgtcggcgcgggatcgagttggcggcgggcggcgcgcgtttttcgaggttttttgttgtttttgttcgagttcgcggtttttacgcgcgttttttttcgtgttatggtttgtaggtaggagtcgtagtcgtagggttcgtcgttcgttgttggcgtcgtggttttttatgattatttggtgatcgggggcggttcgggcgggttggttagcgcgcgtagggcggtcgagttgggtgttagggtcgtcgtggtggagagttataagttgggtggtatttgcgtgagtatcgtcggtttgttcgggcggggggcgtttttttgtttcggtttttcgggggatagtttgtgttcgtttttatggcgattttgtttttcggcgttgggttttttttttttttattttcgtaattttttatttcgaagttaggaatttagtaggtggag

SEQ ID NO: 17842 - DNA, 590 bp, Artificial Sequence
  chemically treated genomic DNA (Homo sapiens) CpG-island No: 17842
ctccacctactaaattcctaacttcgaaataaaaaattacgaaaataaaaaaaaaaaaaacccaacgccgaaaaacaaaatcgccataaaaacgaacacaaactatcccccgaaaaaccgaaacaaaaaaacgccccccgcccgaacaaaccgacgatactcacgcaaataccacccaacttataactctccaccacgacgaccctaacacccaactcgaccgccctacgcgcgctaaccaacccgcccgaaccgcccccgatcaccaaataatcataaaaaaccacgacgccaacaacgaacgacgaaccctacgactacgactcctacctacaaaccataacacgaaaaaaaacgcgcgtaaaaaccgcgaactcgaacaaaaacaacaaaaaacctcgaaaaacgcgcgccgcccgccgccaactcgatcccgcgccgacgctcaaaactcgaaacaacaaaaccatacacgcgaaaataacgcgccaaataaaacgaacgacccgaaaacgatccccgaaataaaaaaacgcgaaccccgaacaaacgcaacctcacgataactaaacatacgcccgccgctaaac

SEQ ID NO: 17843 - DNA, 590 bp, Artificial Sequence
  chemically treated genomic DNA (Homo sapiens) CpG-island No: 17843
ttttatttgttgggtttttggtttcggaatggggagttgcgggggtggaaaagaggaaagtttagcgtcgggggataggatcgttataggaacgagtataggttgtttttcgaaagatcgagataaagaggcgtttttcgttcgaataaatcggcggtatttacgtaagtgttatttagtttgtggttttttattacggcggttttggtatttagttcggtcgttttgcgcgcgttggttagttcgttcgagtcgttttcgattattaggtagttataggaggttacggcgttagtagcgggcggcgggttttgcggttgcggtttttgtttgtaggttatggtacgggagagggcgcgcgtgagggtcgcgggttcgggtagaagtagtaggaagtttcggaaggcgcgcgtcgttcgtcgttagttcggtttcgcgtcggcgtttagggttcggggtagtagggttatgtacgcggaagtggcgcgttaagtggggcgggcggttcgggggcggttttcggggtaggggggcgcgggtttcgggtaagcgtagttttacggtgattaagtatgcgttcgtcgttaggt

SEQ ID NO: 17844 - DNA, 590 bp, Artificial Sequence
  chemically treated genomic DNA (Homo sapiens) CpG-island No: 17844
acctaacgacgaacgcatacttaatcaccgtaaaactacgcttacccgaaacccgcgcccccctaccccgaaaaccgcccccgaaccgcccgccccacttaacgcgccacttccgcgtacataaccctactaccccgaaccctaaacgccgacgcgaaaccgaactaacgacgaacgacgcgcgccttccgaaacttcctactacttctacccgaacccgcgaccctcacgcgcgccctctcccgtaccataacctacaaacaaaaaccgcaaccgcaaaacccgccgcccgctactaacgccgtaacctcctataactacctaataatcgaaaacgactcgaacgaactaaccaacgcgcgcaaaacgaccgaactaaataccaaaaccgccgtaataaaaaaccacaaactaaataacacttacgtaaataccgccgatttattcgaacgaaaaacgcctctttatctcgatctttcgaaaaacaacctatactcgttcctataacgatcctatcccccgacgctaaactttcctcttttccacccccgcaactccccattccgaaaccaaaaacccaacaaataaaa

SEQ ID NO: 17845 - DNA, 606 bp, Artificial Sequence
  chemically treated genomic DNA (Homo sapiens) CpG-island No: 17845
atagtttcgttttcgcggtattagaggcggggtacgtaatgacgtatgcgttcgtttggttgttttggcgtcgcggtggttgtcgggattgagtttttagtattcgatcgggaagtggcgggcggagtttcgggtttagtcgtcgttttagttatcgtcgttgtcgtcgtcgtcgtcgttatcgttagtggtgagatttcgatttggcgggttagcgttgggcgtgcgtgcgggtaggcgggggcgttgacgagaagtaggaagagggtgtagtgtcggcgtgggcggtcggtcgaggcggaggcgtaggaagggggcggcgagtcgtgcgaggttgttttttttatttaggtaggggttgcggtcgtcgggtgtggggcgtagagtttcggtttgttgttttttgggacgtaggcgcgtcgtcgtttttcgggaggttgagcgtgatttttattttacgggaagttgggatcgtcgttttcgaagcgaaatatttagtacgcgaatcgtttttcggagtattgtttttaggttagaggtttattgagtaaatttttgggttggaaagagggaaaattcgcggtttgtcgtttgattgtgtttttt

SEQ ID NO: 17846 - DNA, 606 bp, Artificial Sequence
  chemically treated genomic DNA (Homo sapiens) CpG-island No: 17846
aaaaaacacaatcaaacgacaaaccgcgaattttccctctttccaacccaaaaatttactcaataaacctctaacctaaaaacaatactccgaaaaacgattcgcgtactaaatatttcgcttcgaaaacgacgatcccaacttcccgtaaaataaaaatcacgctcaacctcccgaaaaacgacgacgcgcctacgtcccaaaaaacaacaaaccgaaactctacgccccacacccgacgaccgcaacccctacctaaataaaaaaaacaacctcgcacgactcgccgcccccttcctacgcctccgcctcgaccgaccgcccacgccgacactacaccctcttcctacttctcgtcaacgcccccgcctacccgcacgcacgcccaacgctaacccgccaaatcgaaatctcaccactaacgataacgacgacgacgacgacaacgacgataactaaaacgacgactaaacccgaaactccgcccgccacttcccgatcgaatactaaaaactcaatcccgacaaccaccgcgacgccaaaacaaccaaacgaacgcatacgtcattacgtaccccgcctctaataccgcgaaaacgaaactat

SEQ ID NO: 17847 - DNA, 606 bp, Artificial Sequence
  chemically treated genomic DNA (Homo sapiens) CpG-island No: 17847
aagaggtatagttaggcggtagatcgcgaattttttttttttttaatttaaaagtttgtttaatgaatttttggtttaaagataatgtttcggggaacggttcgcgtgttgggtgtttcgtttcgagaacggcggttttagtttttcgtgaggtggaggttacgtttagtttttcgggaggcggcggcgcgtttgcgttttagggaatagtaagtcggggttttgcgttttatattcggcggtcgtagtttttatttgagtgagaagggtagtttcgtacgattcgtcgttttttttttgcgttttcgtttcggtcggtcgtttacgtcggtattgtattttttttttgtttttcgttagcgttttcgtttgttcgtacgtacgtttagcgttgattcgttaggtcggggttttattattggcggtggcggcggcggcggcggtagcggcggtagttgaggcggcgattggattcgggatttcgttcgttatttttcgatcgggtgttaggagtttagtttcggtagttatcgcggcgttagggtagttaagcgagcgtatgcgttattgcgtgtttcgtttttggtgtcgcgggagcggaattat

SEQ ID NO: 17848 - DNA, 606 bp, Artificial Sequence
  chemically treated genomic DNA (Homo sapiens) CpG-island No: 17848
ataattccgctcccgcgacaccaaaaacgaaacacgcaataacgcatacgctcgcttaactaccctaacgccgcgataactaccgaaactaaactcctaacacccgatcgaaaaataacgaacgaaatcccgaatccaatcgccgcctcaactaccgccgctaccgccgccgccgccgccaccgccaataataaaaccccgacctaacgaatcaacgctaaacgtacgtacgaacaaacgaaaacgctaacgaaaaacaaaaaaaaaatacaataccgacgtaaacgaccgaccgaaacgaaaacgcaaaaaaaaaacgacgaatcgtacgaaactacccttctcactcaaataaaaactacgaccgccgaatataaaacgcaaaaccccgacttactattccctaaaacgcaaacgcgccgccgcctcccgaaaaactaaacgtaacctccacctcacgaaaaactaaaaccgccgttctcgaaacgaaacacccaacacgcgaaccgttccccgaaacattatctttaaaccaaaaattcattaaacaaacttttaaattaaaaaaaaaaaaaattcgcgatctaccgcctaactatacctctt

SEQ ID NO: 17849 - DNA, 561 bp, Artificial Sequence
  chemically treated genomic DNA (Homo sapiens) CpG-island No: 17849
tttttttttgttttaagtgcgcggttatagcggtttttttttatggtaacgttttcgcgtttcgggtttcgtttcgattcgttattagaatcggaagttgttgtatagttggtagtttttcggttttttttcgacggcgtcgggaggtgagattcgaggtttttttagggtttttaagttgcggttagaggcggtggttttcgggtggtggaagggggacgcggagaagcggtcgcggattcgtcgttattttttttttcgcgcgtaagtgtagtatttttatatcgttttagatttttaggtttttttttttcgttgtttgtttttgagttcgcgtatttttttttatcgttttttttcggcggatttcgggcgtttgttttgttaggtgaattcgcgttatttgtcgttcgtttcggcggtttttagtttgggaggcgcgcggcgcggcgcggtgggcgcgggaggtcgggagatggtcggaagttagtttttttagagtcggtttattatagtagggtagagtcgagagcggcgttttttgtagaaagatttttgcgt

SEQ ID NO: 17850 - DNA, 561 bp, Artificial Sequence
  chemically treated genomic DNA (Homo sapiens) CpG-island No: 17850
acgcaaaaatctttctacaaaaaacgccgctctcgactctaccctactataataaaccgactctaaaaaaactaacttccgaccatctcccgacctcccgcgcccaccgcgccgcgccgcgcgcctcccaaactaaaaaccgccgaaacgaacgacaaataacgcgaattcacctaacaaaacaaacgcccgaaatccgccgaaaaaaaacgataaaaaaaaatacgcgaactcaaaaacaaacaacgaaaaaaaaaaacctaaaaatctaaaacgatataaaaatactacacttacgcgcgaaaaaaaaaataacgacgaatccgcgaccgcttctccgcgtcccccttccaccacccgaaaaccaccgcctctaaccgcaacttaaaaaccctaaaaaaacctcgaatctcacctcccgacgccgtcgaaaaaaaaccgaaaaactaccaactatacaacaacttccgattctaataacgaatcgaaacgaaacccgaaacgcgaaaacgttaccataaaaaaaaaccgctataaccgcgcacttaaaacaaaaaaaaa

SEQ ID NO: 17851 - DNA, 561 bp, Artificial Sequence
  chemically treated genomic DNA (Homo sapiens) CpG-island No: 17851
acgtaggggtttttttgtaggggacgtcgttttcggttttattttgttgtggtgggtcggttttgggaaggttggttttcgattatttttcgatttttcgcgtttatcgcgtcgcgtcgcgcgttttttaggttgggaatcgtcggggcgaacggtaggtggcgcgggtttatttggtagggtaggcgttcggggttcgtcggggaaagacgatgggaaggggtgcgcggatttaggggtaggtagcggaggggaggggtttggggatttgggacggtgtaagggtgttgtatttgcgcgcgaagggaggggtggcgacgagttcgcggtcgttttttcgcgttttttttttattattcggggattatcgtttttgatcgtagtttgggggttttaaagaggtttcgggttttatttttcgacgtcgtcggggagaaatcggggaattgttagttgtgtaataattttcggttttggtggcgggtcggggcggggttcggaacgcggggacgttgttatggagaagagtcgttgtggtcgcgtatttgggatagggaaaga

SEQ ID NO: 17852 - DNA, 561 bp, Artificial Sequence
  chemically treated genomic DNA (Homo sapiens) CpG-island No: 17852
tctttccctatcccaaatacgcgaccacaacgactcttctccataacaacgtccccgcgttccgaaccccgccccgacccgccaccaaaaccgaaaattattacacaactaacaattccccgatttctccccgacgacgtcgaaaaataaaacccgaaacctctttaaaacccccaaactacgatcaaaaacgataatccccgaataataaaaaaaaaacgcgaaaaaacgaccgcgaactcgtcgccacccctcccttcgcgcgcaaatacaacacccttacaccgtcccaaatccccaaacccctcccctccgctacctacccctaaatccgcgcaccccttcccatcgtctttccccgacgaaccccgaacgcctaccctaccaaataaacccgcgccacctaccgttcgccccgacgattcccaacctaaaaaacgcgcgacgcgacgcgataaacgcgaaaaatcgaaaaataatcgaaaaccaaccttcccaaaaccgacccaccacaacaaaataaaaccgaaaacgacgtcccctacaaaaaaacccctacgt

SEQ ID NO: 17853 - DNA, 594 bp, Artificial Sequence
  chemically treated genomic DNA (Homo sapiens) CpG-island No: 17853
gcgatttcgcgggtcgtttaattcgcgatcggtttacgcggtattcgtttttttttaggttttcgttttgtcggttcgcgcgcgttcgacgggagtatgcggggcggtgggcgtagggttattttgggcggcgtagataaaggcgggcgcgcgtacgttttgacgtagtttgggttcgcggcggcggtaagggcgggagggagcggtcgtcgcgggatttggagttgtttagtttcgcggtcggtgagtaggagggagttggttttttattttaaagttttcgattttcggggagtcgagagcgggacgtgggagtcgggtttgggcggtcgcgcggggtttgcggtttgggacgtttcggagacgttgcgtcggcgttaggaggtattatcgtcgcgtttcggggattttcggcgggtggagcgggtgtttttcgttcgggatggaacggttagagttcgtttcgaatttcggtcgttcgtttattcgttcgtttgttattcgagttcggtttatcggagtttttcgttttttttaagttttaggtgtgagtagttttttcgtttcgggagttcggggatgtgggtggcgagg

SEQ ID NO: 17854 - DNA, 594 bp, Artificial Sequence
  chemically treated genomic DNA (Homo sapiens) CpG-island No: 17854
cctcgccacccacatccccgaactcccgaaacgaaaaaactactcacacctaaaacttaaaaaaaacgaaaaactccgataaaccgaactcgaataacaaacgaacgaataaacgaacgaccgaaattcgaaacgaactctaaccgttccatcccgaacgaaaaacacccgctccacccgccgaaaatccccgaaacgcgacgataatacctcctaacgccgacgcaacgtctccgaaacgtcccaaaccgcaaaccccgcgcgaccgcccaaacccgactcccacgtcccgctctcgactccccgaaaatcgaaaactttaaaataaaaaaccaactccctcctactcaccgaccgcgaaactaaacaactccaaatcccgcgacgaccgctccctcccgcccttaccgccgccgcgaacccaaactacgtcaaaacgtacgcgcgcccgcctttatctacgccgcccaaaataaccctacgcccaccgccccgcatactcccgtcgaacgcgcgcgaaccgacaaaacgaaaacctaaaaaaaaacgaataccgcgtaaaccgatcgcgaattaaacgacccgcgaaatcgc

SEQ ID NO: 17855 - DNA, 594 bp, Artificial Sequence
  chemically treated genomic DNA (Homo sapiens) CpG-island No: 17855
tttcgttatttatattttcggattttcggggcgggagggttgtttatatttgggatttgggggaggcgaggggtttcgatgaatcgggttcggatagtaggcgagcggataggcgggcggtcggggttcggggcgggttttgatcgttttatttcggacggggggtattcgttttattcgtcggggattttcggggcgcggcgatggtgttttttgacgtcggcgtagcgttttcggggcgttttagatcgtaggtttcgcgcggtcgtttaagttcggtttttacgtttcgttttcggtttttcggaggtcggagattttgaggtaaggggttagtttttttttatttatcgatcgcgaggttaggtagttttaaatttcgcggcgatcgttttttttcgtttttgtcgtcgtcgcgggtttaagttgcgttaggacgtgcgcgcgttcgtttttgtttgcgtcgtttaaagtgattttgcgtttatcgtttcgtatgttttcgtcgggcgcgcgcgggtcggtagggcgggggtttagggagaggcgggtgtcgcgtggatcggtcgcgggttgggcgattcgcggagtcgt

SEQ ID NO: 17856 - DNA, 594 bp, Artificial Sequence
  chemically treated genomic DNA (Homo sapiens) CpG-island No: 17856
acgactccgcgaatcgcccaacccgcgaccgatccacgcgacacccgcctctccctaaacccccgccctaccgacccgcgcgcgcccgacgaaaacatacgaaacgataaacgcaaaatcactttaaacgacgcaaacaaaaacgaacgcgcgcacgtcctaacgcaacttaaacccgcgacgacgacaaaaacgaaaaaaaacgatcgccgcgaaatttaaaactacctaacctcgcgatcgataaataaaaaaaaactaaccccttacctcaaaatctccgacctccgaaaaaccgaaaacgaaacgtaaaaaccgaacttaaacgaccgcgcgaaacctacgatctaaaacgccccgaaaacgctacgccgacgtcaaaaaacaccatcgccgcgccccgaaaatccccgacgaataaaacgaataccccccgtccgaaataaaacgatcaaaacccgccccgaaccccgaccgcccgcctatccgctcgcctactatccgaacccgattcatcgaaacccctcgcctcccccaaatcccaaatataaacaaccctcccgccccgaaaatccgaaaatataaataacgaaa

SEQ ID NO: 17857 - DNA, 563 bp, Artificial Sequence
  chemically treated genomic DNA (Homo sapiens) CpG-island No: 17857
aggcgatttttggttttatttacgtcggagtcggttcgcgtttatttttacgttttaattcgtattaagaaatatcgttttagcgtttttcggggcgtcgtcgcgtaggttgcgtcgttttcgattggttaaacgcggtatagcgttatttcggtttatcgcgcggtgcgcgtttttattggtcggcggcggtaggagtaggggtagggggcggggtagtacgcggggcgcgcggtatgggcggattagagtttgagtttcgttttcggattttcgtttgggtcgagttcgtttagttggttgaaacgagtggagtttggcggcgagtgggggcgtgcgacggttattttggttattggggtcgcgtcgcgttggcgagagtcgtcgttcgcgagggatgttggtgaggaagtcgtcgggagtcgtcgtcgttatttgagggaggtattttggaaattattttttatcggtggggaagtgtagtcgcggtgggcggttttgggggttaacgaaataggaggtttttaaatttttaggttggggttgtattgttttggagtcgt

SEQ ID NO: 17858 - DNA, 563 bp, Artificial Sequence
  chemically treated genomic DNA (Homo sapiens) CpG-island No: 17858
acgactccaaaacaatacaaccccaacctaaaaatttaaaaacctcctatttcgttaacccccaaaaccgcccaccgcgactacacttccccaccgataaaaaataatttccaaaatacctccctcaaataacgacgacgactcccgacgacttcctcaccaacatccctcgcgaacgacgactctcgccaacgcgacgcgaccccaataaccaaaataaccgtcgcacgcccccactcgccgccaaactccactcgtttcaaccaactaaacgaactcgacccaaacgaaaatccgaaaacgaaactcaaactctaatccgcccataccgcgcgccccgcgtactaccccgccccctacccctactcctaccgccgccgaccaataaaaacgcgcaccgcgcgataaaccgaaataacgctataccgcgtttaaccaatcgaaaacgacgcaacctacgcgacgacgccccgaaaaacgctaaaacgatatttcttaatacgaattaaaacgtaaaaataaacgcgaaccgactccgacgtaaataaaaccaaaaatcgcct

SEQ ID NO: 17859 - DNA, 563 bp, Artificial Sequence
  chemically treated genomic DNA (Homo sapiens) CpG-island No: 17859
gcggttttagggtaatgtagttttaatttaaagatttagaggttttttgtttcgttggtttttagagtcgtttatcgcgattgtatttttttatcgataaaaggtggtttttagggtattttttttagatggcggcggcggttttcgacggtttttttattagtatttttcgcgggcggcggttttcgttagcgcggcgcggttttagtaattagagtaatcgtcgtacgtttttattcgtcgttaggttttattcgttttagttagttgggcgggttcggtttagacgagggttcgggggcggggtttaggttttagttcgtttatatcgcgcgtttcgcgtgttgtttcgttttttatttttgtttttgtcgtcgtcggttaatgagggcgcgtatcgcgcggtaggtcgagatggcgttatgtcgcgtttggttaatcggaggcggcgtaatttgcgcggcgacgtttcgaaaggcgttagggcgatgttttttggtgcgggttggggcgtggggatgggcgcgggtcggtttcggcgtgggtggggttaagggtcgttt

SEQ ID NO: 17860 - DNA, 563 bp, Artificial Sequence
  chemically treated genomic DNA (Homo sapiens) CpG-island No: 17860
aaacgacccttaaccccacccacgccgaaaccgacccgcgcccatccccacgccccaacccgcaccaaaaaacatcgccctaacgcctttcgaaacgtcgccgcgcaaattacgccgcctccgattaaccaaacgcgacataacgccatctcgacctaccgcgcgatacgcgccctcattaaccgacgacgacaaaaacaaaaataaaaaacgaaacaacacgcgaaacgcgcgatataaacgaactaaaacctaaaccccgcccccgaaccctcgtctaaaccgaacccgcccaactaactaaaacgaataaaacctaacgacgaataaaaacgtacgacgattactctaattactaaaaccgcgccgcgctaacgaaaaccgccgcccgcgaaaaatactaataaaaaaaccgtcgaaaaccgccgccgccatctaaaaaaaataccctaaaaaccaccttttatcgataaaaaaatacaatcgcgataaacgactctaaaaaccaacgaaacaaaaaacctctaaatctttaaattaaaactacattaccctaaaaccgc

SEQ ID NO: 17861 - DNA, 901 bp, Artificial Sequence
  chemically treated genomic DNA (Homo sapiens) CpG-island No: 17861
tcggcgatttaaagtcgggggaagaagtgtaggaatttttagaaaggggattttacgggtcgttgtcgaatcggtaaagagttgttattagtcgagagaagatttgtcggttttaagttttcgaaataattcggggagtagtagttatatattaagtttcgagggcgcgcggtcgggttagggttatacgttttttagttttagcgtggtgagggttttttttgcggggaattttttcggaaatcgcgtacgtgtgggcggttttagttagttcgaacggttagcgtggtaagattgtgtagagttttagcgatcgcgtttttcgggagtttagtcgtcgtcgaagttagcggtgttcgttatttcgtttttttcgttttagcgtcgttagtagtcggggtcgggtacgcggttggagtagcgggcggtgcggggtaaggatcgggtattttcgcggggtcggcggaaggcgcggcgtttaggttgcgcgtagttgtttttgaggcgatttcggttagtcgcggttttggggagagttcggtttcgggacgttgtttcgaggttgtcggcgcgcgggatgtaaatgcgcgcgcgcgtttttttttcgttcgttgcgttttcgaagttttttcgcgttttatttttatcgagtttatcgggtatatgatcgagtgttttaggatttcggttatcgtttttgttgttatgtgggtggatacggaggcgttagtcggtaggttttcgtagttttttcgattcggtggcggtttttgtcgtcgtcgttatttcggttgtttttatttatttttcgggttatcgtttggttgtttaagttttcgcggcgtagttttattcgttagttcggcggggcgtaggaggttgtaggaggtgggtagggagg

SEQ ID NO: 17862 - DNA, 901 bp, Artificial Sequence
  chemically treated genomic DNA (Homo sapiens) CpG-island No: 17862
cctccctacccacctcctacaacctcctacgccccgccgaactaacgaataaaactacgccgcgaaaacttaaacaaccaaacgataacccgaaaaataaataaaaacaaccgaaataacgacgacgacaaaaaccgccaccgaatcgaaaaaactacgaaaacctaccgactaacgcctccgtatccacccacataacaacaaaaacgataaccgaaatcctaaaacactcgatcatatacccgataaactcgataaaaataaaacgcgaaaaaacttcgaaaacgcaacgaacgaaaaaaaaacgcgcgcgcgcatttacatcccgcgcgccgacaacctcgaaacaacgtcccgaaaccgaactctccccaaaaccgcgactaaccgaaatcgcctcaaaaacaactacgcgcaacctaaacgccgcgccttccgccgaccccgcgaaaatacccgatccttaccccgcaccgcccgctactccaaccgcgtacccgaccccgactactaacgacgctaaaacgaaaaaaacgaaataacgaacaccgctaacttcgacgacgactaaactcccgaaaaacgcgatcgctaaaactctacacaatcttaccacgctaaccgttcgaactaactaaaaccgcccacacgtacgcgatttccgaaaaaattccccgcaaaaaaaaccctcaccacgctaaaactaaaaaacgtataaccctaacccgaccgcgcgccctcgaaacttaatatataactactactccccgaattatttcgaaaacttaaaaccgacaaatcttctctcgactaataacaactctttaccgattcgacaacgacccgtaaaatcccctttctaaaaattcctacacttcttcccccgactttaaatcgccga

SEQ ID NO: 17863 - DNA, 901 bp, Artificial Sequence
  chemically treated genomic DNA (Homo sapiens) CpG-island No: 17863
tttttttgtttattttttgtagttttttgcgtttcgtcgagttggcggatggagttgcgtcgcgggagtttgggtagttaggcggtggttcggaggatggatggggatagtcgagatggcggcggcggtaaggatcgttatcgggtcgggaggattacgagaatttgtcgattagcgttttcgtgtttatttatatgatagtaggagcgatggtcgggattttggagtattcggttatgtattcggtggattcggtgaaggtgaggcgcggggagatttcggggacgtaacgagcggagaaggagcgcgcgcgcgtatttgtatttcgcgcgtcggtagtttcggggtagcgtttcgaaatcgagttttttttaggatcgcggttggtcggggtcgttttaggagtagttgcgcgtagtttgggcgtcgcgtttttcgtcgatttcgcgagggtgttcggtttttgtttcgtatcgttcgttgttttagtcgcgtgttcggtttcggttgttggcggcgttgaggcgggggaggcggagtggcgagtatcgttggtttcggcggcgattgggttttcgggggacgcgatcgttgaagttttgtatagttttattacgttggtcgttcgggttggttggggtcgtttatacgtgcgcggttttcgagggagtttttcgtaggggaagtttttattacgttggagttgagaaacgtgtggttttggttcggtcgcgcgttttcgggatttggtgtgtggttgttgtttttcgggttatttcgggaatttggggtcggtaagttttttttcgattagtggtagttttttatcggttcgatagcggttcgtgggattttttttttgagggtttttgtattttttttttcgattttgggtcgtcga

SEQ ID NO: 17864 - DNA, 901 bp, Artificial Sequence
  chemically treated genomic DNA (Homo sapiens) CpG-island No: 17864
tcgacgacccaaaatcgaaaaaaaaaatacaaaaaccctcaaaaaaaaaatcccacgaaccgctatcgaaccgataaaaaactaccactaatcgaaaaaaaacttaccgaccccaaattcccgaaataacccgaaaaacaacaaccacacaccaaatcccgaaaacgcgcgaccgaaccaaaaccacacgtttctcaactccaacgtaataaaaacttcccctacgaaaaactccctcgaaaaccgcgcacgtataaacgaccccaaccaacccgaacgaccaacgtaataaaactatacaaaacttcaacgatcgcgtcccccgaaaacccaatcgccgccgaaaccaacgatactcgccactccgcctcccccgcctcaacgccgccaacaaccgaaaccgaacacgcgactaaaacaacgaacgatacgaaacaaaaaccgaacaccctcgcgaaatcgacgaaaaacgcgacgcccaaactacgcgcaactactcctaaaacgaccccgaccaaccgcgatcctaaaaaaaactcgatttcgaaacgctaccccgaaactaccgacgcgcgaaatacaaatacgcgcgcgcgctccttctccgctcgttacgtccccgaaatctccccgcgcctcaccttcaccgaatccaccgaatacataaccgaatactccaaaatcccgaccatcgctcctactatcatataaataaacacgaaaacgctaatcgacaaattctcgtaatcctcccgacccgataacgatccttaccgccgccgccatctcgactatccccatccatcctccgaaccaccgcctaactacccaaactcccgcgacgcaactccatccgccaactcgacgaaacgcaaaaaactacaaaaaataaacaaaaaaa

SEQ ID NO: 17865 - DNA, 581 bp, Artificial Sequence
  chemically treated genomic DNA (Homo sapiens) CpG-island No: 17865
  unsure (34)
ggcggtagcgatggttttaggcgcggaaaggtanggattattttttttagggtttttgcgtttttttttttagtttcggtcgtttcgattattttttcgttgttacgtttttttcgggtgcggcgcgcgttgatgacgttatcgcgtttttgggttacgttttcgttgtcgttagaggtgaagacgggtggaaaagattcggggtttcgagggtcgtagatcgttagttttacgttattttcgttttttttttcgtagggcgggtaattcgaacgttttttgtagcgagtggttttttcggttggcgcgcgttcggggcggcggcgttggaggagttcgagacggagtttagttatgtttgggaggcgaacgcggttcggaggagtcgtttagcgtttcggtgagcggagggcgcgcgggagacgtgaggtcgagtcgtttgggggacgtagttcggtgaaagattattttttttttttcgttgtcgtcgtcggaggagacgtttttaaaagggtttgtttgggaattttttcgttgtttttagaatttgttttttggattttaaggtttagagttttttt

SEQ ID NO: 17866 - DNA, 581 bp, Artificial Sequence
  chemically treated genomic DNA (Homo sapiens) CpG-island No: 17866
  unsure (548)
aaaaaaactctaaaccttaaaatccaaaaaacaaattctaaaaacaacgaaaaaattcccaaacaaacccttttaaaaacgtctcctccgacgacgacaacgaaaaaaaaaaaataatctttcaccgaactacgtcccccaaacgactcgacctcacgtctcccgcgcgccctccgctcaccgaaacgctaaacgactcctccgaaccgcgttcgcctcccaaacataactaaactccgtctcgaactcctccaacgccgccgccccgaacgcgcgccaaccgaaaaaaccactcgctacaaaaaacgttcgaattacccgccctacgaaaaaaaaaacgaaaataacgtaaaactaacgatctacgaccctcgaaaccccgaatcttttccacccgtcttcacctctaacgacaacgaaaacgtaacccaaaaacgcgataacgtcatcaacgcgcgccgcacccgaaaaaaacgtaacaacgaaaaaataatcgaaacgaccgaaactaaaaaaaaaaacgcaaaaaccctaaaaaaaataatccntacctttccgcgcctaaaaccatcgctaccgcc

SEQ ID NO: 17867 - DNA, 581 bp, Artificial Sequence
  chemically treated genomic DNA (Homo sapiens) CpG-island No: 17867
  unsure (548)
aggaggattttagattttagagtttagagaataggttttagagatagcgagaagatttttaaataagtttttttaagggcgtttttttcggcggcggtagcgggagggaagaggtgattttttatcggattgcgttttttaaacggttcgattttacgtttttcgcgcgtttttcgtttatcggagcgttgagcggttttttcggatcgcgttcgttttttagatataattaggtttcgtttcgagtttttttagcgtcgtcgtttcgggcgcgcgttaatcgggaaggttattcgttgtaaaaaacgttcgaattattcgttttgcgggaaaggaagcggaagtgacgtagggttagcggtttgcggttttcggaatttcgagttttttttattcgtttttatttttagcggtagcggaggcgtggtttaggggcgcgatggcgttattagcgcgcgtcgtattcggaagagacgtggtagcggagggataatcggggcggtcggggttgaagggagaggcgtaggagttttggggagagtggtttntgttttttcgcgtttagagttatcgttatcgtt

SEQ ID NO: 17868 - DNA, 581 bp, Artificial Sequence
  chemically treated genomic DNA (Homo sapiens) CpG-island No: 17868
  unsure (34)
aacgataacgataactctaaacgcgaaaaaacanaaaccactctccccaaaactcctacgcctctcccttcaaccccgaccgccccgattatccctccgctaccacgtctcttccgaatacgacgcgcgctaataacgccatcgcgcccctaaaccacgcctccgctaccgctaaaaataaaaacgaataaaaaaaactcgaaattccgaaaaccgcaaaccgctaaccctacgtcacttccgcttcctttcccgcaaaacgaataattcgaacgttttttacaacgaataaccttcccgattaacgcgcgcccgaaacgacgacgctaaaaaaactcgaaacgaaacctaattatatctaaaaaacgaacgcgatccgaaaaaaccgctcaacgctccgataaacgaaaaacgcgcgaaaaacgtaaaatcgaaccgtttaaaaaacgcaatccgataaaaaatcacctcttccctcccgctaccgccgccgaaaaaaacgcccttaaaaaaacttatttaaaaatcttctcgctatctctaaaacctattctctaaactctaaaatctaaaatcctcct

SEQ ID NO: 17869 - DNA, 551 bp, Artificial Sequence
  chemically treated genomic DNA (Homo sapiens) CpG-island No: 17869
  unsure (209, 258, 356, 499, 518..519, 531, 534)
ggcgaagcgttcgttagatttattttttcgttttttgcgttatcgtatagggcggggttcgtatttgacgttcggtttttgggtttgttttcgttttattagggaaaggggtggggtttggttttcgggcgtgggcggaaattgtcgaaaattttcggaagttttgcgaaaatatagcgcgtcgtcggtcgcgttgcgaatcggaagtnatcgaagaagtttcggaagtttcgaattattatcggcgtgcgttcgtangtatatcgcggtgttagttgttatggagtcggtcgggttttgtggtttttgttcggcgggggatgtttagttagcgcgttatatttgttttcgttgtnatgcgttttattgttcgttgcgttgttatcggacgtatggtatttgcgtaaaaaatttttatcgtgattatgtgttgggagagtttcgcggttgtagcgttttttttagtcgtttaataagcgtttttacgtcggttgcgttngtaacgcgagatcgaagannaatttggggaantanggtttattttcggttcg

SEQ ID NO: 17870 - DNA, 551 bp, Artificial Sequence
  chemically treated genomic DNA (Homo sapiens) CpG-island No: 17870
  unsure (18, 21, 33..34, 53, 196, 294, 343)
cgaaccgaaaataaaccntanttccccaaattnntcttcgatctcgcgttacnaacgcaaccgacgtaaaaacgcttattaaacgactaaaaaaaacgctacaaccgcgaaactctcccaacacataatcacgataaaaattttttacgcaaataccatacgtccgataacaacgcaacgaacaataaaacgcatnacaacgaaaacaaatataacgcgctaactaaacatcccccgccgaacaaaaaccacaaaacccgaccgactccataacaactaacaccgcgatatacntacgaacgcacgccgataataattcgaaacttccgaaacttcttcgatnacttccgattcgcaacgcgaccgacgacgcgctatattttcgcaaaacttccgaaaattttcgacaatttccgcccacgcccgaaaaccaaaccccacccctttccctaataaaacgaaaacaaacccaaaaaccgaacgtcaaatacgaaccccgccctatacgataacgcaaaaaacgaaaaaataaatctaacgaacgcttcgcc

SEQ ID NO: 17871 - DNA, 551 bp, Artificial Sequence
  chemically treated genomic DNA (Homo sapiens) CpG-island No: 17871
  unsure (18, 21, 33..34, 53, 196, 294, 343)
cgggtcggagatgagttntgnttttttaggttnnttttcggtttcgcgttgtngacgtagtcggcgtaggggcgtttgttaggcggttgggaggagcgttgtaatcgcggagtttttttagtatatggttacggtagaagttttttgcgtaggtgttatgcgttcggtagtagcgtagcgagtagtagggcgtatnatagcgagggtaggtgtaacgcgttggttggatatttttcgtcgggtagaagttatagggttcggtcggttttatggtaattggtatcgcgatatatntgcgaacgtacgtcggtggtagttcgaaattttcggggttttttcgatnattttcggttcgtagcgcggtcgacggcgcgttgtgttttcgtaaagttttcgaggattttcggtaattttcgtttacgttcgaaagttaagttttatttttttttttagtagggcgagagtaggtttagaagtcgggcgttaggtacgagtttcgttttatgcgatgacgtaaggagcgaaaaaatgggtttggcgagcgtttcgtt

SEQ ID NO: 17872 - DNA, 551 bp, Artificial Sequence
  chemically treated genomic DNA (Homo sapiens) CpG-island No: 17872
  unsure (209, 258, 356, 499, 518..519, 531, 534)
aacgaaacgctcgccaaacccattttttcgctccttacgtcatcgcataaaacgaaactcgtacctaacgcccgacttctaaacctactctcgccctactaaaaaaaaaaataaaacttaactttcgaacgtaaacgaaaattaccgaaaatcctcgaaaactttacgaaaacacaacgcgccgtcgaccgcgctacgaaccgaaaatnatcgaaaaaaccccgaaaatttcgaactaccaccgacgtacgttcgcanatatatcgcgataccaattaccataaaaccgaccgaaccctataacttctacccgacgaaaaatatccaaccaacgcgttacacctaccctcgctatnatacgccctactactcgctacgctactaccgaacgcataacacctacgcaaaaaacttctaccgtaaccatatactaaaaaaactccgcgattacaacgctcctcccaaccgcctaacaaacgcccctacgccgactacgtcnacaacgcgaaaccgaaaannaacctaaaaaancanaactcatctccgacccg

SEQ ID NO: 17873 - DNA, 515 bp, Artificial Sequence
  chemically treated genomic DNA (Homo sapiens) CpG-island No: 17873
ggttgtttttgaattgtttcgagattgagtagtttaatttatattcgtttattcgttttttttaggaagtttttcgttcgttttttttagttttttttttatttgttcggttttttagttcggtgttttcggcgcgggagggggcggttcgtagatttttaggtttcggtttttcggatttttttcgtttatttatttttcggttttcggttttcggtattggtaggcgttgtggttttcgcgtagtggttgtagtatttaaatgttcggtatttagggagaggggtgtagtcgcggagtagtcgttgttttcggtatttagaggggtttaaattttcgcgtgtttaggtcgagtttcgcgcgtagtttacgtgggttgagggattgagtattggtttttcggtagttgtaatcgcgtatagttggagttggcggggcggagggcgggtcgggatttcgcggggaaggaggttttttttttatttttttgttgttcggaaattttttcggttttt

SEQ ID NO: 17874 - DNA, 515 bp, Artificial Sequence
  chemically treated genomic DNA (Homo sapiens) CpG-island No: 17874
aaaaaccgaaaaaatttccgaacaacaaaaaaataaaaaaaaaacctccttccccgcgaaatcccgacccgccctccgccccgccaactccaactatacgcgattacaactaccgaaaaaccaatactcaatccctcaacccacgtaaactacgcgcgaaactcgacctaaacacgcgaaaatttaaacccctctaaataccgaaaacaacgactactccgcgactacacccctctccctaaataccgaacatttaaatactacaaccactacgcgaaaaccacaacgcctaccaataccgaaaaccgaaaaccgaaaaataaataaacgaaaaaaatccgaaaaaccgaaacctaaaaatctacgaaccgccccctcccgcgccgaaaacaccgaactaaaaaaccgaacaaataaaaaaaaaactaaaaaaaacgaacgaaaaacttcctaaaaaaaacgaataaacgaatataaattaaactactcaatctcgaaacaattcaaaaacaacc

SEQ ID NO: 17875 - DNA, 515 bp, Artificial Sequence
  chemically treated genomic DNA (Homo sapiens) CpG-island No: 17875
gagagtcggggggattttcgggtagtaggaggatgggaaggaagttttttttttcgcggggtttcggttcgtttttcgtttcgttagttttagttgtgcgcggttgtagttgtcggagggttaatatttagttttttagtttacgtgggttgcgcgcggggttcggtttgggtacgcgggggtttgggtttttttagatgtcgggagtagcggttgtttcgcgattgtatttttttttttaagtgtcggatatttaaatgttgtagttattgcgcggaagttatagcgtttgttagtgtcgggagtcggggatcggggagtgagtaggcgggggagattcgggaagtcgagatttgggggtttgcgagtcgttttttttcgcgtcgagagtatcgggttaggaggtcggataggtggggaaggaattggaggaagcgggcgggaggttttttggggagggcgggtgggcgagtgtgagttaaattgtttagtttcggagtagtttaggggtagtt

SEQ ID NO: 17876 - DNA, 515 bp, Artificial Sequence
  chemically treated genomic DNA (Homo sapiens) CpG-island No: 17876
aactacccctaaactactccgaaactaaacaatttaactcacactcgcccacccgccctccccaaaaaacctcccgcccgcttcctccaattccttccccacctatccgacctcctaacccgatactctcgacgcgaaaaaaaacgactcgcaaacccccaaatctcgacttcccgaatctcccccgcctactcactccccgatccccgactcccgacactaacaaacgctataacttccgcgcaataactacaacatttaaatatccgacacttaaaaaaaaaaatacaatcgcgaaacaaccgctactcccgacatctaaaaaaacccaaacccccgcgtacccaaaccgaaccccgcgcgcaacccacgtaaactaaaaaactaaatattaaccctccgacaactacaaccgcgcacaactaaaactaacgaaacgaaaaacgaaccgaaaccccgcgaaaaaaaaaacttccttcccatcctcctactacccgaaaatccccccgactctc

SEQ ID NO: 17877 - DNA, 575 bp, Artificial Sequence
  chemically treated genomic DNA (Homo sapiens) CpG-island No: 17877
tttcgagaaagtagaagcgagttttgtttcggggagttttataggagcggggatttgggaagagaaatttgcggacgagggagttagagtcgtggattttcggttttcgttcgggcgttttgcgtcggaggagggtttttgggtcgggtaggggttattttttggttcgttttttgtcgttggacgttcgaagattgggttattttttttgtcgcgtttttatcgtatatcggggtgcgttcggttcggttcggttcgttttatttagtttttcgttcgcgttcggagaggaggggtcgttggcgtagcgtttcgggatttcgagaggtcgtcgcggtatatttagattttcgtcgttttcgcgtttttttaattattttgggattttcgggtttattcgatttagcggcgcgattttggtttttcgggatttttcgttgattttatcgcgtatttttcgggatttttatatatattttagtttttcggtcgatttttttttattcggtgtcgggtgtttttcgttttttttaggttcggatttttttttttaggttttcgggtcggttttagtt

SEQ ID NO: 17878 - DNA, 575 bp, Artificial Sequence
  chemically treated genomic DNA (Homo sapiens) CpG-island No: 17878
aactaaaaccgacccgaaaacctaaaaaaaaaaatccgaacctaaaaaaaacgaaaaacacccgacaccgaataaaaaaaaatcgaccgaaaaactaaaatatatataaaaatcccgaaaaatacgcgataaaatcaacgaaaaatcccgaaaaaccaaaatcgcgccgctaaatcgaataaacccgaaaatcccaaaataattaaaaaaacgcgaaaacgacgaaaatctaaatataccgcgacgacctctcgaaatcccgaaacgctacgccaacgacccctcctctccgaacgcgaacgaaaaactaaataaaacgaaccgaaccgaaccgaacgcaccccgatatacgataaaaacgcgacaaaaaaaataacccaatcttcgaacgtccaacgacaaaaaacgaaccaaaaaataacccctacccgacccaaaaaccctcctccgacgcaaaacgcccgaacgaaaaccgaaaatccacgactctaactccctcgtccgcaaatttctcttcccaaatccccgctcctataaaactccccgaaacaaaactcgcttctactttctcgaaa

SEQ ID NO: 17879 - DNA, 575 bp, Artificial Sequence
  chemically treated genomic DNA (Homo sapiens) CpG-island No: 17879
ggttggggtcgattcggggatttgggggaggagattcgggtttggagagggcggggggtattcggtatcgagtagggagggatcggtcggagggttgggatgtgtgtgggggtttcgggaagtgcgcggtggagttagcggagggtttcggagggttagggtcgcgtcgttgggtcgggtgggttcgggaattttaggatggttgagagggcgcgggagcggcggaggtttggatgtgtcgcggcggtttttcggggtttcggggcgttgcgttagcggtttttttttttcgggcgcgagcggagggttgggtggggcgggtcgggtcgggtcgggcgtatttcgatatgcggtaagggcgcggtaagggaaatggtttaattttcggacgtttagcgataaggggcgggttaagaggtggtttttgttcgatttagagattttttttcgacgtaggacgttcgggcgggggtcgggggtttacggttttaattttttcgttcgtaagtttttttttttagattttcgtttttgtgggatttttcggggtagggttcgtttttgttttttcgaag

SEQ ID NO: 17880 - DNA, 575 bp, Artificial Sequence
  chemically treated genomic DNA (Homo sapiens) CpG-island No: 17880
cttcgaaaaaacaaaaacgaaccctaccccgaaaaatcccacaaaaacgaaaatctaaaaaaaaaaacttacgaacgaaaaaattaaaaccgtaaacccccgacccccgcccgaacgtcctacgtcgaaaaaaaatctctaaatcgaacaaaaaccacctcttaacccgccccttatcgctaaacgtccgaaaattaaaccatttcccttaccgcgcccttaccgcatatcgaaatacgcccgacccgacccgacccgccccacccaaccctccgctcgcgcccgaaaaaaaaaaaccgctaacgcaacgccccgaaaccccgaaaaaccgccgcgacacatccaaacctccgccgctcccgcgccctctcaaccatcctaaaattcccgaacccacccgacccaacgacgcgaccctaaccctccgaaaccctccgctaactccaccgcgcacttcccgaaacccccacacacatcccaaccctccgaccgatccctccctactcgataccgaataccccccgccctctccaaacccgaatctcctcccccaaatccccgaatcgaccccaacc

SEQ ID NO: 17881 - DNA, 569 bp, Artificial Sequence
  chemically treated genomic DNA (Homo sapiens) CpG-island No: 17881
ttggcggaaggcgggttaagttagtatagcgtttcgcgggcgtgggtgcgtaggtggcgtagtaggtgggagttgcggttgaagttgcggttatattgcgtgtaggagtagggtttggcgttcgtgtgtattagtaggtgtcgtagtagattgtagttgcggttgaagtttttttcgtattttacgtatttttgcgggggttcggtttgtttttgttcgggtttcgtatgggtagttaggtgtcgtcgtagatgcgcgttgcgtcggaagttgcgatcgtacgtttgatagttgtagggtcgttcgttcgtgtggttgcggcgatggcgggttaggttggagttattgcggaaacggtggtcgtaggtgtcgtaggcgtggggttttttttttgtgtggatgcgttggtggcgcgttaggtgggcgttttggttgaagtttttatcgtattcgttgtagcggtagggtttttcgttcgtgtggttgcgttggtggcgggttagattttgggtttggtcgaaatttttttcgtattgggtgtagtggtggggtcgagggttatcgtgggt

SEQ ID NO: 17882 - DNA, 569 bp, Artificial Sequence
  chemically treated genomic DNA (Homo sapiens) CpG-island No: 17882
acccacgataaccctcgaccccaccactacacccaatacgaaaaaaatttcgaccaaacccaaaatctaacccgccaccaacgcaaccacacgaacgaaaaaccctaccgctacaacgaatacgataaaaacttcaaccaaaacgcccacctaacgcgccaccaacgcatccacacaaaaaaaaaaccccacgcctacgacacctacgaccaccgtttccgcaataactccaacctaacccgccatcgccgcaaccacacgaacgaacgaccctacaactatcaaacgtacgatcgcaacttccgacgcaacgcgcatctacgacgacacctaactacccatacgaaacccgaacaaaaacaaaccgaacccccgcaaaaatacgtaaaatacgaaaaaaacttcaaccgcaactacaatctactacgacacctactaatacacacgaacgccaaaccctactcctacacgcaatataaccgcaacttcaaccgcaactcccacctactacgccacctacgcacccacgcccgcgaaacgctatactaacttaacccgccttccgccaa

SEQ ID NO: 17883 - DNA, 569 bp, Artificial Sequence
  chemically treated genomic DNA (Homo sapiens) CpG-island No: 17883
atttacggtggttttcggttttattattgtatttagtgcgggaagagtttcggttagatttaggatttggttcgttattagcgtagttatacgggcgagaagttttgtcgttgtagcgagtgcggtgagggttttagttagagcgtttatttggcgcgttattagcgtatttatataggggagaagttttacgtttgcgatatttgcggttatcgttttcgtaatagttttaatttggttcgttatcgtcgtagttatacgggcgagcggttttatagttgttagacgtgcggtcgtagttttcggcgtaacgcgtatttgcggcggtatttggttatttatgcggagttcgggtaggagtaggtcgagttttcgtaggagtgcgtggagtgcgggaagagttttagtcgtagttgtaatttgttgcgatatttgttggtgtatacgggcgttaggttttatttttgtacgtagtgtggtcgtagttttagtcgtaatttttatttgttgcgttatttgcgtatttacgttcgcgagacgttgtattagtttggttcgtttttcgttag

SEQ ID NO: 17884 - DNA, 569 bp, Artificial Sequence
  chemically treated genomic DNA (Homo sapiens) CpG-island No: 17884
ctaacgaaaaacgaaccaaactaatacaacgtctcgcgaacgtaaatacgcaaataacgcaacaaataaaaattacgactaaaactacgaccacactacgtacaaaaataaaacctaacgcccgtatacaccaacaaatatcgcaacaaattacaactacgactaaaactcttcccgcactccacgcactcctacgaaaactcgacctactcctacccgaactccgcataaataaccaaataccgccgcaaatacgcgttacgccgaaaactacgaccgcacgtctaacaactataaaaccgctcgcccgtataactacgacgataacgaaccaaattaaaactattacgaaaacgataaccgcaaatatcgcaaacgtaaaacttctcccctatataaatacgctaataacgcgccaaataaacgctctaactaaaaccctcaccgcactcgctacaacgacaaaacttctcgcccgtataactacgctaataacgaaccaaatcctaaatctaaccgaaactcttcccgcactaaatacaataataaaaccgaaaaccaccgtaaat

SEQ ID NO: 17885 - DNA, 805 bp, Artificial Sequence
  chemically treated genomic DNA (Homo sapiens) CpG-island No: 17885
aaagcgtttttcgtattgcggataggcgtagggtttttcgttcgtgtgtattcgttggtggttgattagttgcgagttttgcgtgaagttgcggtcgtaagtttggtaggagaagggtcgttcgttcgtgtgtatttttcggtgggttattaggtgttcgttgcgtcggaaggttttgtcgtagtcgttgtatacgaagggttttcggtcggagtttcggcggcggttgtcggagttttcggaggatcggcggtttttgtttttggcgtggattcgtaggtggcgtttgaggttggagcggcgttggaagttttggtcgtagtgggagtataggatatcggttagtggcggcgtttcggttttatttttaggagcgtagggcggtttttggttttgggcgtgcgttagtaggtgttgtataaggttggcgcggcgttggaagtcgcggtcgtattttgcgtataggaaggcgggttcggaggagtgggttagtaggtgtttgtttaggtgcgagttttggcggaagcggtggtcgtataggtggtaggcgtgcggtcgttcgttcgtgtgagtgcgtatgtgtagtttgagaatggagttgcggtcgaagtttttttcgtagtaaaggtataggaaggagcgtttagtcgggtgcgagcgtagttggtgcgtttttaggcgagatagttgcgggaagtttatttcgtagttcgcgtagatgaattgtaatttcggattgggttcggggacgtttttagttattttgatttttaaaattttattgttgttaagaagggatttattt

SEQ ID NO: 17886 - DNA, 805 bp, Artificial Sequence
  chemically treated genomic DNA (Homo sapiens) CpG-island No: 17886
aaataaatcccttcttaacaacaataaaattttaaaaatcaaaataactaaaaacgtccccgaacccaatccgaaattacaattcatctacgcgaactacgaaataaacttcccgcaactatctcgcctaaaaacgcaccaactacgctcgcacccgactaaacgctccttcctatacctttactacgaaaaaaacttcgaccgcaactccattctcaaactacacatacgcactcacacgaacgaacgaccgcacgcctaccacctatacgaccaccgcttccgccaaaactcgcacctaaacaaacacctactaacccactcctccgaacccgccttcctatacgcaaaatacgaccgcgacttccaacgccgcgccaaccttatacaacacctactaacgcacgcccaaaaccaaaaaccgccctacgctcctaaaaataaaaccgaaacgccgccactaaccgatatcctatactcccactacgaccaaaacttccaacgccgctccaacctcaaacgccacctacgaatccacgccaaaaacaaaaaccgccgatcctccgaaaactccgacaaccgccgccgaaactccgaccgaaaacccttcgtatacaacgactacgacaaaaccttccgacgcaacgaacacctaataacccaccgaaaaatacacacgaacgaacgacccttctcctaccaaacttacgaccgcaacttcacgcaaaactcgcaactaatcaaccaccaacgaatacacacgaacgaaaaaccctacgcctatccgcaatacgaaaaacgcttt

SEQ ID NO: 17887 - DNA, 805 bp, Artificial Sequence
  chemically treated genomic DNA (Homo sapiens) CpG-island No: 17887
agatgggtttttttttggtagtagtgaaattttggaggttaaagtggttgagggcgttttcgagtttaattcggagttgtagtttatttgcgcggattgcggggtgagtttttcgtagttgtttcgtttgaaggcgtattagttgcgttcgtattcggttgggcgtttttttttgtgtttttgttgcgggaagagtttcggtcgtagttttatttttaagttgtatatgcgtatttatacggacgagcggtcgtacgtttgttatttgtgcggttatcgttttcgttagagttcgtatttgagtaagtatttgttgatttattttttcgaattcgtttttttgtgcgtagagtgcggtcgcggtttttagcgtcgcgttagttttgtgtagtatttgttggcgtacgtttaggattagaagtcgttttgcgtttttgagagtaaggtcgaagcgtcgttattgatcgatgttttgtgtttttattgcggttagagtttttagcgtcgttttagttttaagcgttatttgcggatttacgttagggataaggatcgtcggtttttcgaaggtttcggtagtcgtcgtcgggatttcgatcggaggtttttcgtgtgtagcgattgcggtaaggtttttcggcgtagcgagtatttggtggtttatcggagggtgtatacgggcgagcggttttttttttgttaggtttgcggtcgtagttttacgtagagttcgtagttggttagttattaacgggtgtatacgggcgagaagttttacgtttgttcgtagtgcgggaagcgtttt

SEQ ID NO: 17888 - DNA, 805 bp, Artificial Sequence
  chemically treated genomic DNA (Homo sapiens) CpG-island No: 17888
aaaacgcttcccgcactacgaacaaacgtaaaacttctcgcccgtatacacccgttaataactaaccaactacgaactctacgtaaaactacgaccgcaaacctaacaaaaaaaaaaccgctcgcccgtatacaccctccgataaaccaccaaatactcgctacgccgaaaaaccttaccgcaatcgctacacacgaaaaacctccgatcgaaatcccgacgacgactaccgaaaccttcgaaaaaccgacgatccttatccctaacgtaaatccgcaaataacgcttaaaactaaaacgacgctaaaaactctaaccgcaataaaaacacaaaacatcgatcaataacgacgcttcgaccttactctcaaaaacgcaaaacgacttctaatcctaaacgtacgccaacaaatactacacaaaactaacgcgacgctaaaaaccgcgaccgcactctacgcacaaaaaaacgaattcgaaaaaataaatcaacaaatacttactcaaatacgaactctaacgaaaacgataaccgcacaaataacaaacgtacgaccgctcgtccgtataaatacgcatatacaacttaaaaataaaactacgaccgaaactcttcccgcaacaaaaacacaaaaaaaaacgcccaaccgaatacgaacgcaactaatacgccttcaaacgaaacaactacgaaaaactcaccccgcaatccgcgcaaataaactacaactccgaattaaactcgaaaacgccctcaaccactttaacctccaaaatttcactactaccaaaaaaaaacccatct

SEQ ID NO: 17889 - DNA, 520 bp, Artificial Sequence
  chemically treated genomic DNA (Homo sapiens) CpG-island No: 17889
aagtcgattcgagggtggggtgttttcgtttcgtttgttttttacggcgattgttttcgcgtttcgggttggataggtggggcgtcgcgaaaaggttcggtaagtcggaagttgtaatggggtagtcggacgtaaaacgcggggatatcggtcgggattcgttaagttagggtgagttgtcgatcggggacgcgaacgggagcgcgtaggtgagggcggcggggcggggttggggcgggggcggggttattgaggttgcggttaattatcggcgtttttcgtgggcggggcggggtcgttgtttgggcgataggttttagcgtttgcgttttgtgaatttagtcgttgggttgtgcggataggttcgcgtggggtttttgggtttttcgtagtcgcgtaggtttcgggaatcgggtcgtttttttgttttcggatttttacgcgttggtgttcggtggttttgggaaatttttttttttaataatgtgtattttttgggttttatttatttaatattttt

SEQ ID NO: 17890 - DNA, 520 bp, Artificial Sequence
  chemically treated genomic DNA (Homo sapiens) CpG-island No: 17890
aaaaatattaaataaataaaacccaaaaaatacacattattaaaaaaaaaaatttcccaaaaccaccgaacaccaacgcgtaaaaatccgaaaacaaaaaaacgacccgattcccgaaacctacgcgactacgaaaaacccaaaaaccccacgcgaacctatccgcacaacccaacgactaaattcacaaaacgcaaacgctaaaacctatcgcccaaacaacgaccccgccccgcccacgaaaaacgccgataattaaccgcaacctcaataaccccgcccccgccccaaccccgccccgccgccctcacctacgcgctcccgttcgcgtccccgatcgacaactcaccctaacttaacgaatcccgaccgatatccccgcgttttacgtccgactaccccattacaacttccgacttaccgaaccttttcgcgacgccccacctatccaacccgaaacgcgaaaacaatcgccgtaaaaaacaaacgaaacgaaaacaccccaccctcgaatcgactt

SEQ ID NO: 17891 - DNA, 520 bp, Artificial Sequence
  chemically treated genomic DNA (Homo sapiens) CpG-island No: 17891
agaagtgttagataggtaggatttaaggaatatatattgttaaaagaaaagattttttagggttatcggatattagcgcgtgagaattcggaggtagggaggcgattcggttttcgaaatttacgcggttgcgggaggtttaggagttttacgcgaatttgttcgtatagtttagcggttaggtttatagaacgtagacgttggagtttgtcgtttaagtaacggtttcgtttcgtttacgggaggcgtcggtgattggtcgtagttttagtggtttcgttttcgttttagtttcgtttcgtcgtttttatttgcgcgttttcgttcgcgttttcgatcggtagtttattttagtttggcggatttcggtcggtgttttcgcgttttgcgttcggttgttttattgtaattttcggtttgtcgggttttttcgcggcgttttatttgtttagttcggggcgcgggggtaatcgtcgtgaggagtaggcggggcgagggtattttattttcgagtcggttt

SEQ ID NO: 17892 - DNA, 520 bp, Artificial Sequence
  chemically treated genomic DNA (Homo sapiens) CpG-island No: 17892
aaaccgactcgaaaataaaataccctcgccccgcctactcctcacgacgattacccccgcgccccgaactaaacaaataaaacgccgcgaaaaaacccgacaaaccgaaaattacaataaaacaaccgaacgcaaaacgcgaaaacaccgaccgaaatccgccaaactaaaataaactaccgatcgaaaacgcgaacgaaaacgcgcaaataaaaacgacgaaacgaaactaaaacgaaaacgaaaccactaaaactacgaccaatcaccgacgcctcccgtaaacgaaacgaaaccgttacttaaacgacaaactccaacgtctacgttctataaacctaaccgctaaactatacgaacaaattcgcgtaaaactcctaaacctcccgcaaccgcgtaaatttcgaaaaccgaatcgcctccctacctccgaattctcacgcgctaatatccgataaccctaaaaaatcttttcttttaacaatatatattccttaaatcctacctatctaacacttct

SEQ ID NO: 17893 - DNA, 872 bp, Artificial Sequence
  chemically treated genomic DNA (Homo sapiens) CpG-island No: 17893
gttgcgttttcggacgtttttaaagtttagggcggcgattggtacgattgttaggggcgcgtttgttaagaggatagggggtttcgtttcggtatagtcgttttttttaggatttttttcgtcgacgttttacggattttacgttcgagcggagatcggcgcgagttcggggttttcggttcggtagtttttttttggttcggcgttttaaagggaagcggtttgggggaggagacgtgtggaaagagcggtagaagataaagaggaagtagcggtagagaataaaaaggaattgttcgtagtgtgttcggacgcggggaggcgttggggttaagcgagattcgatttgtacgtaattttcgtcggggtttcggtttgtttgcgggagggaaaggatttagggcggtttttgttaaaagtgcggtttttgtcgaaagtgcgttttttgtcgaggggtttatataaggcgcgatagatattttagttcgatttcgacgtttcgtttttacgtatgtatatgcgcggaatatttttagaaatatattttttagagcgtttcgggagtacgcgagttaattggagggcggattagcgggggtttacgttttttagaggttttcgagtcgcggttttgttggtttgattggtagtcgtaatagtttatagttgtttttcgtcggaggggttacgcgtcgtttgtcgggattgagtcgttgttgtcgttggtatttcgggagtagcgtcggtaagtggagtcgtcgtatttcgggcggttcgcggtttacggggatgggacgtttcggggttgtgttgattttaaaatttttttatattttattagtttgtcgttttttttttatgtttatagtaaa

SEQ ID NO: 17894 - DNA, 872 bp, Artificial Sequence
  chemically treated genomic DNA (Homo sapiens) CpG-island No: 17894
tttactataaacataaaaaaaaaacgacaaactaataaaatataaaaaaattttaaaatcaacacaaccccgaaacgtcccatccccgtaaaccgcgaaccgcccgaaatacgacgactccacttaccgacgctactcccgaaataccaacgacaacaacgactcaatcccgacaaacgacgcgtaacccctccgacgaaaaacaactataaactattacgactaccaatcaaaccaacaaaaccgcgactcgaaaacctctaaaaaacgtaaacccccgctaatccgccctccaattaactcgcgtactcccgaaacgctctaaaaaatatatttctaaaaatattccgcgcatatacatacgtaaaaacgaaacgtcgaaatcgaactaaaatatctatcgcgccttatataaacccctcgacaaaaaacgcactttcgacaaaaaccgcacttttaacaaaaaccgccctaaatcctttccctcccgcaaacaaaccgaaaccccgacgaaaattacgtacaaatcgaatctcgcttaaccccaacgcctccccgcgtccgaacacactacgaacaattcctttttattctctaccgctacttcctctttatcttctaccgctctttccacacgtctcctcccccaaaccgcttccctttaaaacgccgaaccaaaaaaaaactaccgaaccgaaaaccccgaactcgcgccgatctccgctcgaacgtaaaatccgtaaaacgtcgacgaaaaaaatcctaaaaaaaacgactataccgaaacgaaaccccctatcctcttaacaaacgcgcccctaacaatcgtaccaatcgccgccctaaactttaaaaacgtccgaaaacgcaac

SEQ ID NO: 17895 - DNA, 872 bp, Artificial Sequence
  chemically treated genomic DNA (Homo sapiens) CpG-island No: 17895
tttgttgtaaatatgaaagaagggcgataggttaataaagtgtggaagggttttggggttagtatagtttcgggacgttttattttcgtgggtcgcgggtcgttcggaatacgacgattttatttgtcggcgttgttttcgggatattagcgataatagcggtttagtttcggtaaacggcgcgtggttttttcggcgaaaagtagttataggttgttgcggttgttaattagattaatagagtcgcgattcggagatttttgggagacgtgggttttcgttaattcgttttttaattggttcgcgtgttttcggggcgttttgggagatgtgtttttgggagtgtttcgcgtatgtgtatgcgtgagggcggggcgtcggggtcgggttggagtgtttgtcgcgttttatgtgggtttttcggtagaagacgtattttcggtagaagtcgtatttttggtagaagtcgttttgggttttttttttttcgtaggtaggtcgggatttcggcgggaattgcgtgtaggtcgggtttcgtttgattttagcgttttttcgcgttcgggtatattgcggatagtttttttttattttttatcgttattttttttttattttttgtcgttttttttatacgtttttttttttaggtcgtttttttttggggcgtcgggttagggaggggttgtcggatcggagatttcggattcgcgtcggttttcgttcgggcgtggggttcgtggggcgtcggcgggaggggttttggaggagacggttgtgtcggggcgggattttttgtttttttaatagacgcgtttttgatagtcgtgttagtcgtcgttttgggttttggggacgttcgaggacgtagt

SEQ ID NO: 17896 - DNA, 872 bp, Artificial Sequence
  chemically treated genomic DNA (Homo sapiens) CpG-island No: 17896
actacgtcctcgaacgtccccaaaacccaaaacgacgactaacacgactatcaaaaacgcgtctattaaaaaaacaaaaaatcccgccccgacacaaccgtctcctccaaaacccctcccgccgacgccccacgaaccccacgcccgaacgaaaaccgacgcgaatccgaaatctccgatccgacaacccctccctaacccgacgccccaaaaaaaaacgacctaaaaaaaaaaacgtataaaaaaaacgacaaaaaataaaaaaaaaataacgataaaaaataaaaaaaaactatccgcaatatacccgaacgcgaaaaaacgctaaaatcaaacgaaacccgacctacacgcaattcccgccgaaatcccgacctacctacgaaaaaaaaaaaacccaaaacgacttctaccaaaaatacgacttctaccgaaaatacgtcttctaccgaaaaacccacataaaacgcgacaaacactccaacccgaccccgacgccccgccctcacgcatacacatacgcgaaacactcccaaaaacacatctcccaaaacgccccgaaaacacgcgaaccaattaaaaaacgaattaacgaaaacccacgtctcccaaaaatctccgaatcgcgactctattaatctaattaacaaccgcaacaacctataactacttttcgccgaaaaaaccacgcgccgtttaccgaaactaaaccgctattatcgctaatatcccgaaaacaacgccgacaaataaaatcgtcgtattccgaacgacccgcgacccacgaaaataaaacgtcccgaaactatactaaccccaaaacccttccacactttattaacctatcgcccttctttcatatttacaacaaa

SEQ ID NO: 17897 - DNA, 1037 bp, Artificial Sequence
  chemically treated genomic DNA (Homo sapiens) CpG-island No: 17897
gcgtttttcgaagtttagcgttagcgtcgcgtaatttgtcgtaggggcggttttcgggttaggtagttaggcgcgttttcgttttattcgggaacgttaggttcgcgtagggaggggcggggttttatggcggtttcgtttcgtcgttcggagggttataatgtagggttagggcggtcggcgggcggggttttgcgggggaggagtcgtcgggcgggggcggggatggcgcgtgggggaggggagggaggaggattcgcggagggaggaggataacgttatttcgggcggtcgtttttttcgtttttttttttttttttttaaagtagttcgcggatcggtagtaaaggaacgtgcgaacgcgtgacgtcgttcgattggttcgcgttttttcgtgtttcggcgtttttcgttcgtttatggttcgggtcgtcgcggacgagcggcgttgaggcgggtcgcgtggagacgtgaggcggtcgtcgtggtttttatagtcggcgtttcgtcgtttgttcgcggtgttcgcgtacgtcggtcgttatcgttttcgcgtttggttggcgggggcgttgtttttttaggtcgttcgcgtcgttttttggagttcggcggagcgcggtagttagggtcggcggaggcgcgaggagtcgggcgttatcgtcgtcgtcgtcgtcgtcgtcgcgggggttatgatcgtggagtagaacgtgttgtagtagagcgcggcgtagaaggtgaggcgagttcgttagtcggcgggttttattttttttttcgacgggttgttttttttcgttgcggtcgggcgtttcggtttcgtcgtcgtcgttttttcgggtttttttttcggttattttcggtttttgtttatcgtttcgggggcgtcgcgtttagagtttagttgcgtgtgggaagtagagtgtagtttgcgggttttaatttatttttttttgtcgattgttttttcgtagtagacggtgttaggtattgagagcgatttttatatttttatagtgttttgtgtggtattttaa

SEQ ID NO: 17898 - DNA, 1037 bp, Artificial Sequence
  chemically treated genomic DNA (Homo sapiens) CpG-island No: 17898
ttaaaataccacacaaaacactataaaaatataaaaatcgctctcaatacctaacaccgtctactacgaaaaaacaatcgacaaaaaaaaataaattaaaacccgcaaactacactctacttcccacacgcaactaaactctaaacgcgacgcccccgaaacgataaacaaaaaccgaaaataaccgaaaaaaaaacccgaaaaaacgacgacgacgaaaccgaaacgcccgaccgcaacgaaaaaaaacaacccgtcgaaaaaaaaaataaaacccgccgactaacgaactcgcctcaccttctacgccgcgctctactacaacacgttctactccacgatcataacccccgcgacgacgacgacgacgacgacgataacgcccgactcctcgcgcctccgccgaccctaactaccgcgctccgccgaactccaaaaaacgacgcgaacgacctaaaaaaacaacgcccccgccaaccaaacgcgaaaacgataacgaccgacgtacgcgaacaccgcgaacaaacgacgaaacgccgactataaaaaccacgacgaccgcctcacgtctccacgcgacccgcctcaacgccgctcgtccgcgacgacccgaaccataaacgaacgaaaaacgccgaaacacgaaaaaacgcgaaccaatcgaacgacgtcacgcgttcgcacgttcctttactaccgatccgcgaactactttaaaaaaaaaaaaaaaaaaacgaaaaaaacgaccgcccgaaataacgttatcctcctccctccgcgaatcctcctccctcccctcccccacgcgccatccccgcccccgcccgacgactcctcccccgcaaaaccccgcccgccgaccgccctaaccctacattataaccctccgaacgacgaaacgaaaccgccataaaaccccgcccctccctacgcgaacctaacgttcccgaataaaacgaaaacgcgcctaactacctaacccgaaaaccgcccctacgacaaattacgcgacgctaacgctaaacttcgaaaaacgc

SEQ ID NO: 17899 - DNA, 1037 bp, Artificial Sequence
  chemically treated genomic DNA (Homo sapiens) CpG-island No: 17899
ttaagatgttatatagagtattgtaggaatgtgagggtcgtttttaatatttggtatcgtttgttacgggaaaataatcggtagaaggaagtggattgaagttcgtaaattatattttgttttttatacgtagttgggttttgggcgcgacgttttcgaggcgatgggtaggggtcgggggtgatcggggaggaagttcgggaaggcggcggcggcgaggtcggggcgttcggtcgtagcgggagaggatagttcgtcggaaggagaagtggggttcgtcggttggcggattcgttttattttttgcgtcgcgttttgttgtagtacgttttgttttacggttatggttttcgcggcggcggcggcggcggcggcggtggcgttcggtttttcgcgttttcgtcggttttggttgtcgcgtttcgtcgagttttagggagcggcgcggacggtttgggaggatagcgttttcgttagttaggcgcgaaggcgatggcggtcggcgtgcgcgggtatcgcgggtaggcggcgaaacgtcgattgtgagggttacggcggtcgttttacgtttttacgcggttcgttttagcgtcgttcgttcgcggcggttcgggttatgagcgggcggaggacgtcggggtacgggagagcgcgagttagtcgggcggcgttacgcgttcgtacgtttttttgttgtcggttcgcgggttgttttggggaagggagagaggggacggagggagcggtcgttcggaatggcgttgttttttttttttcgcgagtttttttttttttttttttttacgcgttattttcgttttcgttcggcggtttttttttcgtagagtttcgttcgtcggtcgttttaattttatattgtgatttttcgggcggcggggcggggtcgttatggagtttcgtttttttttgcgcgggtttggcgttttcgggtggggcgagggcgcgtttggttgtttggttcgggagtcgtttttgcggtaggttgcgcgacgttggcgttgggtttcggggagcgt

SEQ ID NO: 17900 - DNA, 1037 bp, Artificial Sequence
  chemically treated genomic DNA (Homo sapiens) CpG-island No: 17900
acgctccccgaaacccaacgccaacgtcgcgcaacctaccgcaaaaacgactcccgaaccaaacaaccaaacgcgccctcgccccacccgaaaacgccaaacccgcgcaaaaaaaaacgaaactccataacgaccccgccccgccgcccgaaaaatcacaatataaaattaaaacgaccgacgaacgaaactctacgaaaaaaaaaccgccgaacgaaaacgaaaataacgcgtaaaaaaaaaaaaaaaaaaaaactcgcgaaaaaaaaaaaacaacgccattccgaacgaccgctccctccgtcccctctctcccttccccaaaacaacccgcgaaccgacaacaaaaaaacgtacgaacgcgtaacgccgcccgactaactcgcgctctcccgtaccccgacgtcctccgcccgctcataacccgaaccgccgcgaacgaacgacgctaaaacgaaccgcgtaaaaacgtaaaacgaccgccgtaaccctcacaatcgacgtttcgccgcctacccgcgatacccgcgcacgccgaccgccatcgccttcgcgcctaactaacgaaaacgctatcctcccaaaccgtccgcgccgctccctaaaactcgacgaaacgcgacaaccaaaaccgacgaaaacgcgaaaaaccgaacgccaccgccgccgccgccgccgccgccgcgaaaaccataaccgtaaaacaaaacgtactacaacaaaacgcgacgcaaaaaataaaacgaatccgccaaccgacgaaccccacttctccttccgacgaactatcctctcccgctacgaccgaacgccccgacctcgccgccgccgccttcccgaacttcctccccgatcacccccgacccctacccatcgcctcgaaaacgtcgcgcccaaaacccaactacgtataaaaaacaaaatataatttacgaacttcaatccacttccttctaccgattattttcccgtaacaaacgataccaaatattaaaaacgaccctcacattcctacaatactctatataacatcttaa

SEQ ID NO: 17901 - DNA, 602 bp, Artificial Sequence
  chemically treated genomic DNA (Homo sapiens) CpG-island No: 17901
ggacgggaaacgtttcgaaagtagttagattcggcgattgaaatgaggcggaggagtttggcgaggggaggcgtaggttcggaaaggcgcgcgaggttttaggttttttttcgatttatcgtttttttcgttgattttcgagttattttcggaagttttcgttattgtcgggcgaatagattttcgcggatttttaagcgcgcggggtcggggttttagtttaggttttcgttgtttttttaagggttttcgaaatttttttttcggtattagatgagtttcgttatattcgttggtcgtggtcgttggggcgtttttcgaggaaattcgggattcgagtttttcggggaagaggcgcggtttgagttcggcgagggtggggagggtaggcgtaggtggatttcggcgtttttcgagtttcgttgtgattttggtcgcgggggaggggttgggtcgttgcggggtagtcgcggtcgttagagggggtagcggagaagaatttgtttaatttggcggcgcgggttggggcggttttgcgttttcgcgttcgttttttcgggtttcgtttttttttttttcgcgagtttttttttttttcgcga

SEQ ID NO: 17902 - DNA, 602 bp, Artificial Sequence
  chemically treated genomic DNA (Homo sapiens) CpG-island No: 17902
tcgcgaaaaaaaaaaaaactcgcgaaaaaaaaaaaaacgaaacccgaaaaaacgaacgcgaaaacgcaaaaccgccccaacccgcgccgccaaattaaacaaattcttctccgctaccccctctaacgaccgcgactaccccgcaacgacccaacccctcccccgcgaccaaaatcacaacgaaactcgaaaaacgccgaaatccacctacgcctaccctccccaccctcgccgaactcaaaccgcgcctcttccccgaaaaactcgaatcccgaatttcctcgaaaaacgccccaacgaccacgaccaacgaatataacgaaactcatctaataccgaaaaaaaaatttcgaaaacccttaaaaaaacaacgaaaacctaaactaaaaccccgaccccgcgcgcttaaaaatccgcgaaaatctattcgcccgacaataacgaaaacttccgaaaataactcgaaaatcaacgaaaaaaacgataaatcgaaaaaaaacctaaaacctcgcgcgcctttccgaacctacgcctcccctcgccaaactcctccgcctcatttcaatcgccgaatctaactactttcgaaacgtttcccgtcc

SEQ ID NO: 17903 - DNA, 602 bp, Artificial Sequence
  chemically treated genomic DNA (Homo sapiens) CpG-island No: 17903
tcgcgggaggggaggaggttcgcgggaggggagaaggcggagttcggggaggcgggcgcggaggcgtagagtcgttttagttcgcgtcgttaagttgggtaagttttttttcgttgttttttttggcggtcgcgattgtttcgtagcggtttagtttttttttcgcggttaaggttatagcggggttcggggggcgtcggggtttatttgcgtttgttttttttattttcgtcgggtttaggtcgcgtttttttttcgggaaattcgagtttcgaattttttcggaaagcgttttagcggttacggttaacggatgtgacgaggtttatttgatatcggggggaaagtttcgagaatttttaaaggggtagcgagggtttgaattagggtttcggtttcgcgcgtttgggggttcgcgggggtttattcgttcggtagtggcgggagttttcgggggtgattcggaggttagcgaggagagcggtggatcgggaaggagtttggagtttcgcgcgttttttcgagtttgcgttttttttcgttaagttttttcgttttattttagtcgtcgggtttggttgttttcgaggcgtttttcgttt

SEQ ID NO: 17904 - DNA, 602 bp, Artificial Sequence
  chemically treated genomic DNA (Homo sapiens) CpG-island No: 17904
aaacgaaaaacgcctcgaaaacaaccaaacccgacgactaaaataaaacgaaaaaacttaacgaaaaaaaacgcaaactcgaaaaaacgcgcgaaactccaaactccttcccgatccaccgctctcctcgctaacctccgaatcacccccgaaaactcccgccactaccgaacgaataaacccccgcgaacccccaaacgcgcgaaaccgaaaccctaattcaaaccctcgctacccctttaaaaattctcgaaactttccccccgatatcaaataaacctcgtcacatccgttaaccgtaaccgctaaaacgctttccgaaaaaattcgaaactcgaatttcccgaaaaaaaaacgcgacctaaacccgacgaaaataaaaaaaacaaacgcaaataaaccccgacgccccccgaaccccgctataaccttaaccgcgaaaaaaaaactaaaccgctacgaaacaatcgcgaccgccaaaaaaaacaacgaaaaaaaacttacccaacttaacgacgcgaactaaaacgactctacgcctccgcgcccgcctccccgaactccgccttctcccctcccgcgaacctcctcccctcccgcga

SEQ ID NO: 17905 - DNA, 1220 bp, Artificial Sequence
  chemically treated genomic DNA (Homo sapiens) CpG-island No: 17905
tttagacgtttgttttcgagtcgatttcgtgtattcgatataggatttcgtatttagggcgatgtcgggggagagggcgattttaattagtaatgatttaggagaggagtacgtaaagacgtttcggggatattgttggggcgggattcgagggcgtcgcgttttgtaggagtagtagcgcggggttcgatatcgggcgtttaaggaggcgttgggcgcgcgtttttttagttggggaggagacgggcgtggagcggaggcgtggttaggttcggagggggcggagttcgcggtatagcgcgtttcgcgggggtagagggggcgtattttgggcgggtttatttaggggcggggttttagagggcggggaggggcggagtttgttaggggcgggacgcggggcggagtcggggtgggggcggagtcgggttgggggcgggacgttcgcgatagacgcgcgtgtaggcggggtcgtcgcgtttattttgggttttttttcggatatggttgcgcgagcggcgcggggaggcggcgcgggggaagtagcgcggagcgggcgagttacgttttcggtttcgtcgttttttcgtcgtaattgtgcgcggggtcgcgttttattttttaaatttcggcgtattcgttggtcggtacgggggttacgtggttgcgcgcgtttacgaggcgcgtttttcggggcgtcgggcgcgcgtaggtcgggtcgcggttttgggcggttggagatgcgttacggggcgggtttcgcgcgatttcgtcgggcgcggaagttttagggcgttgtggggcgcgggttaggagcgtttacggggagttcgggttttggggatttttgttcgttttttcgcgtcgttcgggtttcgattttttttttgggggtcgcgtttttggggcgtcgggaagtgaggtcggggtcgtcgtttatggtcgtagggatttggggcggaggagggaggacgttgggggtgacgtttttttttaggagtcgcggatagagcggagaaggcggttcgcggggtttcgttcgcgggggtcgcgcgaatcgggttagtattttagacgattgggggcgttattcgtttttttgtcgtcgcggttttttgttagttttaggtcgggtttttttggttaacgtttttacggggttgtttcgggttttttatattcgtttttaagaagattcgttttatttgtgaagaaattga

SEQ ID NO: 17906 - DNA, 1220 bp, Artificial Sequence
  chemically treated genomic DNA (Homo sapiens) CpG-island No: 17906
tcaatttcttcacaaataaaacgaatcttcttaaaaacgaatataaaaaacccgaaacaaccccgtaaaaacgttaaccaaaaaaacccgacctaaaactaacaaaaaaccgcgacgacaaaaaaacgaataacgcccccaatcgtctaaaatactaacccgattcgcgcgacccccgcgaacgaaaccccgcgaaccgccttctccgctctatccgcgactcctaaaaaaaaacgtcacccccaacgtcctccctcctccgccccaaatccctacgaccataaacgacgaccccgacctcacttcccgacgccccaaaaacgcgacccccaaaaaaaaaatcgaaacccgaacgacgcgaaaaaacgaacaaaaatccccaaaacccgaactccccgtaaacgctcctaacccgcgccccacaacgccctaaaacttccgcgcccgacgaaatcgcgcgaaacccgccccgtaacgcatctccaaccgcccaaaaccgcgacccgacctacgcgcgcccgacgccccgaaaaacgcgcctcgtaaacgcgcgcaaccacgtaacccccgtaccgaccaacgaatacgccgaaatttaaaaaataaaacgcgaccccgcgcacaattacgacgaaaaaacgacgaaaccgaaaacgtaactcgcccgctccgcgctacttcccccgcgccgcctccccgcgccgctcgcgcaaccatatccgaaaaaaaacccaaaataaacgcgacgaccccgcctacacgcgcgtctatcgcgaacgtcccgcccccaacccgactccgcccccaccccgactccgccccgcgtcccgcccctaacaaactccgcccctccccgccctctaaaaccccgcccctaaataaacccgcccaaaatacgccccctctacccccgcgaaacgcgctataccgcgaactccgccccctccgaacctaaccacgcctccgctccacgcccgtctcctccccaactaaaaaaacgcgcgcccaacgcctccttaaacgcccgatatcgaaccccgcgctactactcctacaaaacgcgacgccctcgaatcccgccccaacaatatccccgaaacgtctttacgtactcctctcctaaatcattactaattaaaatcgccctctcccccgacatcgccctaaatacgaaatcctatatcgaatacacgaaatcgactcgaaaacaaacgtctaaa

SEQ ID NO: 17907 - DNA, 1220 bp, Artificial Sequence
  chemically treated genomic DNA (Homo sapiens) CpG-island No: 17907
ttagtttttttataggtaaaacgggtttttttgaggacgggtgtggagggttcggggtagtttcgtaggagcgttggttaaaggagttcggtttggggttgataggaaatcgcggcggtagggaggcgggtggcgtttttaatcgtttagggtgttggttcgattcgcgcggttttcgcggacgggatttcgcgggtcgtttttttcgttttgttcgcggtttttgagagggaacgttatttttagcgttttttttttttcgttttaggtttttgcggttatgggcggcggtttcggttttatttttcggcgttttaggaacgcggtttttaggaaaggagtcggggttcgggcgacgcggggaggcgggtaagggtttttagggttcgggtttttcgtaaacgtttttggttcgcgttttatagcgttttagggttttcgcgttcgacggggtcgcgcgggattcgtttcgtgacgtatttttaatcgtttagagtcgcggttcggtttgcgcgcgttcgacgtttcggggagcgcgtttcgtgaacgcgcgtagttacgtgattttcgtgtcggttaacgggtgcgtcgggatttgggggataaagcgcggtttcgcgtatagttgcggcgggagagcggcggggtcgagagcgtgattcgttcgtttcgcgttgtttttttcgcgtcgttttttcgcgtcgttcgcgtagttatgttcgaggagaagtttaaggtaagcgcggcgatttcgtttgtacgcgcgtttatcgcgggcgtttcgtttttagttcggtttcgtttttatttcgatttcgtttcgcgtttcgtttttgataggtttcgttttttttcgttttttagagtttcgtttttaagtgggttcgtttaaggtgcgttttttttgttttcgcgaagcgcgttgtgtcgcgagtttcgtttttttcgggtttggttacgttttcgttttacgttcgttttttttttagttgggaaggcgcgcgtttagcgtttttttgagcgttcggtgtcgggtttcgcgttgttgtttttgtagagcgcggcgttttcggatttcgttttagtagtgttttcgaagcgtttttgcgtgttttttttttgagttattgttggttggggtcgttttttttttcggtatcgttttgggtgcgggattttgtgtcgagtgtacggagtcggttcgggaataagcgtttggg

SEQ ID NO: 17908 - DNA, 1220 bp, Artificial Sequence
  chemically treated genomic DNA (Homo sapiens) CpG-island No: 17908
cccaaacgcttattcccgaaccgactccgtacactcgacacaaaatcccgcacccaaaacgataccgaaaaaaaaaacgaccccaaccaacaataactcaaaaaaaaaacacgcaaaaacgcttcgaaaacactactaaaacgaaatccgaaaacgccgcgctctacaaaaacaacaacgcgaaacccgacaccgaacgctcaaaaaaacgctaaacgcgcgccttcccaactaaaaaaaaaacgaacgtaaaacgaaaacgtaaccaaacccgaaaaaaacgaaactcgcgacacaacgcgcttcgcgaaaacaaaaaaaacgcaccttaaacgaacccacttaaaaacgaaactctaaaaaacgaaaaaaaacgaaacctatcaaaaacgaaacgcgaaacgaaatcgaaataaaaacgaaaccgaactaaaaacgaaacgcccgcgataaacgcgcgtacaaacgaaatcgccgcgcttaccttaaacttctcctcgaacataactacgcgaacgacgcgaaaaaacgacgcgaaaaaaacaacgcgaaacgaacgaatcacgctctcgaccccgccgctctcccgccgcaactatacgcgaaaccgcgctttatcccccaaatcccgacgcacccgttaaccgacacgaaaatcacgtaactacgcgcgttcacgaaacgcgctccccgaaacgtcgaacgcgcgcaaaccgaaccgcgactctaaacgattaaaaatacgtcacgaaacgaatcccgcgcgaccccgtcgaacgcgaaaaccctaaaacgctataaaacgcgaaccaaaaacgtttacgaaaaacccgaaccctaaaaacccttacccgcctccccgcgtcgcccgaaccccgactcctttcctaaaaaccgcgttcctaaaacgccgaaaaataaaaccgaaaccgccgcccataaccgcaaaaacctaaaacgaaaaaaaaaaaacgctaaaaataacgttccctctcaaaaaccgcgaacaaaacgaaaaaaacgacccgcgaaatcccgtccgcgaaaaccgcgcgaatcgaaccaacaccctaaacgattaaaaacgccacccgcctccctaccgccgcgatttcctatcaaccccaaaccgaactcctttaaccaacgctcctacgaaactaccccgaaccctccacacccgtcctcaaaaaaacccgttttacctataaaaaaactaa

SEQ ID NO: 17909 - DNA, 518 bp, Artificial Sequence
  chemically treated genomic DNA (Homo sapiens) CpG-island No: 17909
ggcgggaacgtaattttagtattttgcggttttcgttacggggtcgcgttttttttttgatatttagagtttgcggtttttagaggcgttttcggaataaatcggggcgcgtagagtttttttcgtcgttgtttgggggtcgtaggattgttttagggttcgtgattgacggattagttttcggtattgagttttgtgtttttttagttataggcgatgttgtcggaaacgtgtgtttttttatttaggagttagtttgtcgtagatcgatttttggatcgtcgaggtcgtttattttttttagaagtttgttttttttcgattcgatcggtgggaggtcgcgttttcgacgtttgttaggagtttcgtttgtagtcgaggcgtttttttcgcgtcgcgggtttttgtggtaacggtcgtttttcggttggttttttttttgttttttgttttttcgttggcgattggggaggttcgtggttaacgaggttttagcgattatttgggggacgttttgt

SEQ ID NO: 17910 - DNA, 518 bp, Artificial Sequence
  chemically treated genomic DNA (Homo sapiens) CpG-island No: 17910
acaaaacgtcccccaaataatcgctaaaacctcgttaaccacgaacctccccaatcgccaacgaaaaaacaaaaaacaaaaaaaaaaccaaccgaaaaacgaccgttaccacaaaaacccgcgacgcgaaaaaaacgcctcgactacaaacgaaactcctaacaaacgtcgaaaacgcgacctcccaccgatcgaatcgaaaaaaaacaaacttctaaaaaaaataaacgacctcgacgatccaaaaatcgatctacgacaaactaactcctaaataaaaaaacacacgtttccgacaacatcgcctataactaaaaaaacacaaaactcaataccgaaaactaatccgtcaatcacgaaccctaaaacaatcctacgacccccaaacaacgacgaaaaaaactctacgcgccccgatttattccgaaaacgcctctaaaaaccgcaaactctaaatatcaaaaaaaaaacgcgaccccgtaacgaaaaccgcaaaatactaaaattacgttcccgcc

SEQ ID NO: 17911 - DNA, 518 bp, Artificial Sequence
  chemically treated genomic DNA (Homo sapiens) CpG-island No: 17911
ataggacgttttttaggtgatcgttggggtttcgttgattacgggtttttttagtcgttaacgggaaggtagaaggtagaaaagaggttagtcgggaggcggtcgttgttataggagttcgcggcgcggggaggacgtttcggttgtaggcggggtttttggtaagcgtcggggacgcggttttttatcggtcgggtcgggagggagtaggtttttggggagagtgggcgatttcggcgatttaggaatcggtttgcgatagattgatttttagataggaaaatatacgttttcggtagtatcgtttgtaattggaaagatataaggtttaatgtcggggattggttcgttaattacgggttttgggatagttttgcggtttttagatagcggcgaagaaagttttgcgcgtttcggtttgtttcgggagcgtttttgggagtcgtaggttttggatattagagggagggcgcgatttcgtggcgggagtcgtagggtgttggggttgcgttttcgtt

SEQ ID NO: 17912 - DNA, 518 bp, Artificial Sequence
  chemically treated genomic DNA (Homo sapiens) CpG-island No: 17912
aacgaaaacgcaaccccaacaccctacgactcccgccacgaaatcgcgccctccctctaatatccaaaacctacgactcccaaaaacgctcccgaaacaaaccgaaacgcgcaaaactttcttcgccgctatctaaaaaccgcaaaactatcccaaaacccgtaattaacgaaccaatccccgacattaaaccttatatctttccaattacaaacgatactaccgaaaacgtatattttcctatctaaaaatcaatctatcgcaaaccgattcctaaatcgccgaaatcgcccactctccccaaaaacctactccctcccgacccgaccgataaaaaaccgcgtccccgacgcttaccaaaaaccccgcctacaaccgaaacgtcctccccgcgccgcgaactcctataacaacgaccgcctcccgactaacctcttttctaccttctaccttcccgttaacgactaaaaaaacccgtaatcaacgaaaccccaacgatcacctaaaaaacgtcctat

SEQ ID NO: 17913 - DNA, 731 bp, Artificial Sequence
  chemically treated genomic DNA (Homo sapiens) CpG-island No: 17913
gaggggatggcggggtttagatggaggggacggcggggtttagatggaggggacggcggggtttagatggaggggatggcggggtttagatggaggggacggcggggtttagatggaggggacggcggggtttagatggaggggacgtcggggttttagatggaggggacggcgggagtttagatggaggggacggcggggtttagatggaggggacggcggggtttagatggaggggacggcggggtttagatggaggggacgtcggggttttagatggaggggacggcgggagtttagatggaggggacggcgtggtttagatggaggggacggcggggtttagatggaggggacgtcggggttttagatggaggggacggcgggggtttagatggaggggacggcggggtttagatggaggggacggcggggtttagatggaggggacggcggggtttagatggaggggacggcggggtttagatggaggggacggcggggtttagatggaggggacggcgggagtttagatggaggggacggcgtggtttagatggaggggacggcggggtttagatggaggggacgtcggggttttagatggaggggacggcggggtttagatggaggggatgtcggggtttagatggaagggacggcggggtttagtaggtaggtttcggtcgtgtagggtgtggattgtttcgggggcgttgggggtttttgag

SEQ ID NO: 17914 - DNA, 731 bp, Artificial Sequence
  chemically treated genomic DNA (Homo sapiens) CpG-island No: 17914
ctcaaaaacccccaacgcccccgaaacaatccacaccctacacgaccgaaacctacctactaaaccccgccgtcccttccatctaaaccccgacatcccctccatctaaaccccgccgtcccctccatctaaaaccccgacgtcccctccatctaaaccccgccgtcccctccatctaaaccacgccgtcccctccatctaaactcccgccgtcccctccatctaaaccccgccgtcccctccatctaaaccccgccgtcccctccatctaaaccccgccgtcccctccatctaaaccccgccgtcccctccatctaaaccccgccgtcccctccatctaaacccccgccgtcccctccatctaaaaccccgacgtcccctccatctaaaccccgccgtcccctccatctaaaccacgccgtcccctccatctaaactcccgccgtcccctccatctaaaaccccgacgtcccctccatctaaaccccgccgtcccctccatctaaaccccgccgtcccctccatctaaaccccgccgtcccctccatctaaactcccgccgtcccctccatctaaaaccccgacgtcccctccatctaaaccccgccgtcccctccatctaaaccccgccgtcccctccatctaaaccccgccatcccctccatctaaaccccgccgtcccctccatctaaaccccgccgtcccctccatctaaaccccgccatcccctc

SEQ ID NO: 17915 - DNA, 731 bp, Artificial Sequence
  chemically treated genomic DNA (Homo sapiens) CpG-island No: 17915
tttagaagtttttagcgttttcgggatagtttatattttgtacggtcggagtttgtttgttggatttcgtcgttttttttatttggatttcgatattttttttatttggatttcgtcgttttttttatttggagtttcgacgttttttttatttggatttcgtcgttttttttatttggattacgtcgttttttttatttggattttcgtcgttttttttatttggatttcgtcgttttttttatttggatttcgtcgttttttttatttggatttcgtcgttttttttatttggatttcgtcgttttttttatttggatttcgtcgttttttttatttggattttcgtcgttttttttatttggagtttcgacgttttttttatttggatttcgtcgttttttttatttggattacgtcgttttttttatttggattttcgtcgttttttttatttggagtttcgacgttttttttatttggatttcgtcgttttttttatttggatttcgtcgttttttttatttggatttcgtcgttttttttatttggattttcgtcgttttttttatttggagtttcgacgttttttttatttggatttcgtcgttttttttatttggatttcgtcgttttttttatttggatttcgttattttttttatttggatttcgtcgttttttttatttggatttcgtcgttttttttatttggatttcgttattttttt

SEQ ID NO: 17916 - DNA, 731 bp, Artificial Sequence
  chemically treated genomic DNA (Homo sapiens) CpG-island No: 17916
aaaaaaataacgaaatccaaataaaaaaaacgacgaaatccaaataaaaaaaacgacgaaatccaaataaaaaaaataacgaaatccaaataaaaaaaacgacgaaatccaaataaaaaaaacgacgaaatccaaataaaaaaaacgtcgaaactccaaataaaaaaaacgacgaaaatccaaataaaaaaaacgacgaaatccaaataaaaaaaacgacgaaatccaaataaaaaaaacgacgaaatccaaataaaaaaaacgtcgaaactccaaataaaaaaaacgacgaaaatccaaataaaaaaaacgacgtaatccaaataaaaaaaacgacgaaatccaaataaaaaaaacgtcgaaactccaaataaaaaaaacgacgaaaatccaaataaaaaaaacgacgaaatccaaataaaaaaaacgacgaaatccaaataaaaaaaacgacgaaatccaaataaaaaaaacgacgaaatccaaataaaaaaaacgacgaaatccaaataaaaaaaacgacgaaaatccaaataaaaaaaacgacgtaatccaaataaaaaaaacgacgaaatccaaataaaaaaaacgtcgaaactccaaataaaaaaaacgacgaaatccaaataaaaaaaatatcgaaatccaaataaaaaaaacgacgaaatccaacaaacaaactccgaccgtacaaaatataaactatcccgaaaacgctaaaaacttctaaa

SEQ ID NO: 17917 - DNA, 769 bp, Artificial Sequence
  chemically treated genomic DNA (Homo sapiens) CpG-island No: 17917
tgcgtttcgggggaggtgggcggggaggggcggcggggcggggcgggttcgggacgcgggttgggagttggagtttatagcgtgaagcgttcgtcgttcgggtttcgtagggttaggcgaggcgagggggggcggggcgggcgttacgggaaggggaggtcgcgcggatcgggagtcgtatcgtttagtcggttgtagcggtcgcgtattaaggttgcgatggggttggagacggagaaggcggacgtatagttttttatggacgacgatttttatagttattatagcggtttcgagtacgtcgatttcgagaagttcgcggattcggattaggatcgggatttttatcggtttaattcgtattttaaggtgaagttcggggtgggcgggtttaagttttcgttgaggtcgggaggtgcgggcgttttttagtttcgttttaattcgttttattattgttatcgggttggtttcgtagggtttgagattcgtattttttttcggttttattcgttattaggtcgttcgcgtagttaggaatttttagttaggtttttgtgcgtttatcgtgattttaagagaagaggcggacgttttggtacgttttttttttttgtttttttcgtttaaagcgttttcggttttcggggcgttaggttggttgatagttcggggtttttgcgttttgtttttttagttgggtttcgaggatgtgatcgtagagtcggtgattacgtatttttttgataaagtgtggatttgtagttat

SEQ ID NO: 17918 - DNA, 769 bp, Artificial Sequence
  chemically treated genomic DNA (Homo sapiens) CpG-island No: 17918
ataactacaaatccacactttatcaaaaaaatacgtaatcaccgactctacgatcacatcctcgaaacccaactaaaaaaacaaaacgcaaaaaccccgaactatcaaccaacctaacgccccgaaaaccgaaaacgctttaaacgaaaaaaacaaaaaaaaaaaacgtaccaaaacgtccgcctcttctcttaaaatcacgataaacgcacaaaaacctaactaaaaattcctaactacgcgaacgacctaataacgaataaaaccgaaaaaaaatacgaatctcaaaccctacgaaaccaacccgataacaataataaaacgaattaaaacgaaactaaaaaacgcccgcacctcccgacctcaacgaaaacttaaacccgcccaccccgaacttcaccttaaaatacgaattaaaccgataaaaatcccgatcctaatccgaatccgcgaacttctcgaaatcgacgtactcgaaaccgctataataactataaaaatcgtcgtccataaaaaactatacgtccgccttctccgtctccaaccccatcgcaaccttaatacgcgaccgctacaaccgactaaacgatacgactcccgatccgcgcgacctccccttcccgtaacgcccgccccgccccccctcgcctcgcctaaccctacgaaacccgaacgacgaacgcttcacgctataaactccaactcccaacccgcgtcccgaacccgccccgccccgccgcccctccccgcccacctcccccgaaacgca

SEQ ID NO: 17919 - DNA, 769 bp, Artificial Sequence
  chemically treated genomic DNA (Homo sapiens) CpG-island No: 17919
atggttgtagatttatattttgttaaaggagtgcgtagttatcggttttgcgattatattttcgaagtttagttgaggagataggacgtagggatttcgaattgttagttaatttgacgtttcgggaatcgggagcgttttgggcgggggaagtaggagggaaggacgtgttagggcgttcgtttttttttttagggttacggtgggcgtataggaatttggttaagaatttttggttacgcgggcggtttggtgacgggtgggatcggggaagggtgcgggttttagattttgcggggttaattcggtggtaatggtgggacgggttagggcggggttgaggggcgttcgtatttttcggttttagcggggatttgggttcgtttatttcgggttttattttgagatgcgagttgagtcggtggggatttcggttttggttcgagttcgcgaatttttcggggtcggcgtattcgaggtcgttgtggtggttgtaggagtcgtcgtttatgaagagttgtacgttcgtttttttcgtttttagttttatcgtagttttggtgcgcggtcgttgtagtcggttgggcggtgcggttttcggttcgcgcggtttttttttttcgtagcgttcgtttcgttttttttcgtttcgtttagttttgcgaggttcgggcggcggacgttttacgttgtgggttttagtttttagttcgcgtttcgagttcgtttcgtttcgtcgttttttttcgtttatttttttcggggcgta

SEQ ID NO: 17920 - DNA, 769 bp, Artificial Sequence
  chemically treated genomic DNA (Homo sapiens) CpG-island No: 17920
tacgccccgaaaaaaataaacgaaaaaaaacgacgaaacgaaacgaactcgaaacgcgaactaaaaactaaaacccacaacgtaaaacgtccgccgcccgaacctcgcaaaactaaacgaaacgaaaaaaaacgaaacgaacgctacgaaaaaaaaaaaccgcgcgaaccgaaaaccgcaccgcccaaccgactacaacgaccgcgcaccaaaactacgataaaactaaaaacgaaaaaaacgaacgtacaactcttcataaacgacgactcctacaaccaccacaacgacctcgaatacgccgaccccgaaaaattcgcgaactcgaaccaaaaccgaaatccccaccgactcaactcgcatctcaaaataaaacccgaaataaacgaacccaaatccccgctaaaaccgaaaaatacgaacgcccctcaaccccgccctaacccgtcccaccattaccaccgaattaaccccgcaaaatctaaaacccgcacccttccccgatcccacccgtcaccaaaccgcccgcgtaaccaaaaattcttaaccaaattcctatacgcccaccgtaaccctaaaaaaaaaaacgaacgccctaacacgtccttccctcctacttcccccgcccaaaacgctcccgattcccgaaacgtcaaattaactaacaattcgaaatccctacgtcctatctcctcaactaaacttcgaaaatataatcgcaaaaccgataactacgcactcctttaacaaaatataaatctacaaccat

SEQ ID NO: 17921 - DNA, 946 bp, Artificial Sequence
  chemically treated genomic DNA (Homo sapiens) CpG-island No: 17921
gaggagggggcggggttaagcgggatagatgatacgagcggggttaagtaggtgggttcgggcgggggtgggggtgggggcgggggcgtaggcgggggcgggggcgcggataggttaagttagggggtgaggcggaggtagggttaggtcggttcgtgagggagagggcgggttaaatcggtgggcgcgggtagggacgttttgtgcgcgtcggatcggcgggggcggggcgtgtaggcgggggcggggtacgtcgttttatgggatcggttttcggttattgtttttttcggtttcgtttcgagcgttcgggttgggtcggtagcggtttttcgcggcggggttggtagtagtggttgttcgtattgcgttcgggcgttcgttttcgttgtagttttcggtgtcgtcgttcgggtcggtttttcggtaggtttttttcgttatggtcgcggtttttttttcgtttagggtcgaaaggaagcgttggggttggggtcgtttgttaggcgttcggcggggtagcgcgggtttggttaaaaaatgttttttttcgttggaattggcggagggcggttcggcgggcggcgcgttttacgcgtttatcgcgttcggcgttttaggtttcgcgttttatgtgttttcggtcgcgttcgtcgcgtttttagttgttttcgattttggttcgcggtcgtcggtgagtttagattcgcgcgtttttatatatagtacgcgtcgttcggtgttggcgcgaatttacgtttagggtcgcgtttataattttttcgagcgttttatcggttggaaatgtttcgtttattatttcgtcgtgtgagtatcgttatcggcgacggtcggtacgaaggtgttttttgagagttggtgtgggggagttttgttttagcgttatttgtttcgtcggagttgcgatttcggagtagaggaggga

SEQ ID NO: 17922 - DNA, 946 bp, Artificial Sequence
  chemically treated genomic DNA (Homo sapiens) CpG-island No: 17922
tccctcctctactccgaaatcgcaactccgacgaaacaaataacgctaaaacaaaactcccccacaccaactctcaaaaaacaccttcgtaccgaccgtcgccgataacgatactcacacgacgaaataataaacgaaacatttccaaccgataaaacgctcgaaaaaattataaacgcgaccctaaacgtaaattcgcgccaacaccgaacgacgcgtactatatataaaaacgcgcgaatctaaactcaccgacgaccgcgaaccaaaatcgaaaacaactaaaaacgcgacgaacgcgaccgaaaacacataaaacgcgaaacctaaaacgccgaacgcgataaacgcgtaaaacgcgccgcccgccgaaccgccctccgccaattccaacgaaaaaaaacattttttaaccaaacccgcgctaccccgccgaacgcctaacaaacgaccccaaccccaacgcttcctttcgaccctaaacgaaaaaaaaaccgcgaccataacgaaaaaaacctaccgaaaaaccgacccgaacgacgacaccgaaaactacaacgaaaacgaacgcccgaacgcaatacgaacaaccactactaccaaccccgccgcgaaaaaccgctaccgacccaacccgaacgctcgaaacgaaaccgaaaaaaacaataaccgaaaaccgatcccataaaacgacgtaccccgcccccgcctacacgccccgcccccgccgatccgacgcgcacaaaacgtccctacccgcgcccaccgatttaacccgccctctccctcacgaaccgacctaaccctacctccgcctcaccccctaacttaacctatccgcgcccccgcccccgcctacgcccccgcccccacccccacccccgcccgaacccacctacttaaccccgctcgtatcatctatcccgcttaaccccgccccctcctc

SEQ ID NO: 17923 - DNA, 946 bp, Artificial Sequence
  chemically treated genomic DNA (Homo sapiens) CpG-island No: 17923
ttttttttttgtttcggggtcgtagtttcgacggggtaggtggcgttgggatagagtttttttatattagtttttaggaagtattttcgtgtcggtcgtcgtcggtggcgatatttatacggcgaagtggtaaacgaagtatttttagtcggtgggacgttcgaggaagttgtagacgcggttttggacgtgggttcgcgttaatatcgggcggcgcgtgttgtatatggagacgcgcgggtttaggtttatcggcggtcgcgggttaaggtcggaagtaattgggggcgcggcgggcgcggtcggggatatatggggcgcgggatttggggcgtcgggcgcgatgggcgcgtagagcgcgtcgttcgtcgggtcgtttttcgttagttttagcgagaaggggtattttttggttaggttcgcgttgtttcgtcgggcgtttggtaggcggttttaattttagcgttttttttcggttttgggcggggaggaggtcgcggttataacgaggagggtttgtcggggggtcggttcgagcggcggtatcgggagttgtagcgaaggcgagcgttcgggcgtagtgcgggtagttattgttgttagtttcgtcgcggggggtcgttgtcggtttagttcgggcgttcggggcggggtcggagggggtagtggtcgagggtcggttttatgggacggcgtgtttcgttttcgtttgtacgtttcgttttcgtcggttcggcgcgtatagggcgtttttgttcgcgtttatcggtttggttcgtttttttttttacggatcggtttggttttgttttcgttttattttttggtttggtttgttcgcgttttcgttttcgtttgcgttttcgtttttatttttattttcgttcgagtttatttgtttagtttcgttcgtgttatttatttcgtttggtttcgtttttttttt

SEQ ID NO: 17924 - DNA, 946 bp, Artificial Sequence
  chemically treated genomic DNA (Homo sapiens) CpG-island No: 17924
aaaaaaaaaacgaaaccaaacgaaataaataacacgaacgaaactaaacaaataaactcgaacgaaaataaaaataaaaacgaaaacgcaaacgaaaacgaaaacgcgaacaaaccaaaccaaaaaataaaacgaaaacaaaaccaaaccgatccgtaaaaaaaaaaacgaaccaaaccgataaacgcgaacaaaaacgccctatacgcgccgaaccgacgaaaacgaaacgtacaaacgaaaacgaaacacgccgtcccataaaaccgaccctcgaccactaccccctccgaccccgccccgaacgcccgaactaaaccgacaacgaccccccgcgacgaaactaacaacaataactacccgcactacgcccgaacgctcgccttcgctacaactcccgataccgccgctcgaaccgaccccccgacaaaccctcctcgttataaccgcgacctcctccccgcccaaaaccgaaaaaaaacgctaaaattaaaaccgcctaccaaacgcccgacgaaacaacgcgaacctaaccaaaaaataccccttctcgctaaaactaacgaaaaacgacccgacgaacgacgcgctctacgcgcccatcgcgcccgacgccccaaatcccgcgccccatatatccccgaccgcgcccgccgcgcccccaattacttccgaccttaacccgcgaccgccgataaacctaaacccgcgcgtctccatatacaacacgcgccgcccgatattaacgcgaacccacgtccaaaaccgcgtctacaacttcctcgaacgtcccaccgactaaaaatacttcgtttaccacttcgccgtataaatatcgccaccgacgacgaccgacacgaaaatacttcctaaaaactaatataaaaaaactctatcccaacgccacctaccccgtcgaaactacgaccccgaaacaaaaaaaaaa

SEQ ID NO: 17925 - DNA, 607 bp, Artificial Sequence
  chemically treated genomic DNA (Homo sapiens) CpG-island No: 17925
tcgtttcgcgtcgttcgtttaggttcgtgttgatcgtgtttaaatttttttagagagatggggagggtcgcgttgaggagagtttgggagaatcgtattgaggagtcgtcgggagagtgtcgcgttgaggagttttcggggagagtgtcgcgttgaggaggtttagggaggatcgcgcggaggagaattatgttgaggagttttcggggagaatagaatcgcggcgagaggttttcggagagaatcgcgtcgaagaattttcggggagaatcgcgtcgaagaattttcggggagaatcgcgtcgaagaattttcggggagaatcgcgtcgaaaagtttcgggtgtttcgaggagaacggcgtcgaggagttttcggggagaattgcgtcgaggagtttttagaagagcgtcgcgttgaggagtttcgaggagaatcgcgtcgaggggcgcgtcggggagaattacgatgattgacgtatcgaggaggatcgcgttgaggggcgtatcgggagaatcgtgttgaggagtttcggggaggattacgttgagaggtatttcggtagaatcgcgttgaggggcgttttggtaggattttgttgaggagttt

SEQ ID NO: 17926 - DNA, 607 bp, Artificial Sequence
  chemically treated genomic DNA (Homo sapiens) CpG-island No: 17926
aaactcctcaacaaaatcctaccaaaacgcccctcaacgcgattctaccgaaatacctctcaacgtaatcctccccgaaactcctcaacacgattctcccgatacgcccctcaacgcgatcctcctcgatacgtcaatcatcgtaattctccccgacgcgcccctcgacgcgattctcctcgaaactcctcaacgcgacgctcttctaaaaactcctcgacgcaattctccccgaaaactcctcgacgccgttctcctcgaaacacccgaaacttttcgacgcgattctccccgaaaattcttcgacgcgattctccccgaaaattcttcgacgcgattctccccgaaaattcttcgacgcgattctctccgaaaacctctcgccgcgattctattctccccgaaaactcctcaacataattctcctccgcgcgatcctccctaaacctcctcaacgcgacactctccccgaaaactcctcaacgcgacactctcccgacgactcctcaatacgattctcccaaactctcctcaacgcgaccctccccatctctctaaaaaaatttaaacacgatcaacacgaacctaaacgaacgacgcgaaacga

SEQ ID NO: 17927 - DNA, 607 bp, Artificial Sequence
  chemically treated genomic DNA (Homo sapiens) CpG-island No: 17927
gagttttttagtaagattttgttagggcgttttttagcgcgattttgtcggggtgttttttagcgtggtttttttcggggttttttagtacgattttttcggtgcgttttttagcgcggtttttttcggtgcgttagttatcgtggtttttttcggcgcgtttttcggcgcggtttttttcggggttttttagcgcggcgtttttttgggggtttttcggcgtagtttttttcggggatttttcggcgtcgtttttttcggggtattcggggtttttcggcgcggtttttttcgggggtttttcggcgcggtttttttcgggggtttttcggcgcggtttttttcgggggtttttcggcgcggtttttttcgggggtttttcgtcgcggttttgtttttttcgggggttttttagtatggttttttttcgcgcggttttttttgggtttttttagcgcggtatttttttcgggggttttttagcgcggtattttttcggcggttttttagtgcggtttttttagattttttttagcgcggttttttttatttttttgggagggtttgaatacggttagtacggatttgggcggacggcgcgggacgg

SEQ ID NO: 17928 - DNA, 607 bp, Artificial Sequence
  chemically treated genomic DNA (Homo sapiens) CpG-island No: 17928
ccgtcccgcgccgtccgcccaaatccgtactaaccgtattcaaaccctcccaaaaaaataaaaaaaaccgcgctaaaaaaaatctaaaaaaaccgcactaaaaaaccgccgaaaaaataccgcgctaaaaaacccccgaaaaaaataccgcgctaaaaaaacccaaaaaaaaccgcgcgaaaaaaaaccatactaaaaaacccccgaaaaaaacaaaaccgcgacgaaaaacccccgaaaaaaaccgcgccgaaaaacccccgaaaaaaaccgcgccgaaaaacccccgaaaaaaaccgcgccgaaaaacccccgaaaaaaaccgcgccgaaaaaccccgaataccccgaaaaaaacgacgccgaaaaatccccgaaaaaaactacgccgaaaaacccccaaaaaaacgccgcgctaaaaaaccccgaaaaaaaccgcgccgaaaaacgcgccgaaaaaaaccacgataactaacgcaccgaaaaaaaccgcgctaaaaaacgcaccgaaaaaatcgtactaaaaaaccccgaaaaaaaccacgctaaaaaacaccccgacaaaatcgcgctaaaaaacgccctaacaaaatcttactaaaaaactc

SEQ ID NO: 17929 - DNA, 510 bp, Artificial Sequence
  chemically treated genomic DNA (Homo sapiens) CpG-island No: 17929
aacgcgcggttggtgtgttgtatttgtcgtttggcgatgaaagcgggtaatataggtttggtaatagtgttggtagcgtagatgtttgtcgattattagattatcgtttcggtaattattttattggcgaataattttaatacggtattgattttcgcgcgtataattggcgcgatcgattttattcgttaaatggcggcggtggcgtttgttagtgtggcgcggtaggatgttgagaatgtacggttgatgattttatcgtttgtttaggcgtagtagtttaatgaagattagatttaggacgtgcgcgatatcgtcgtttggcgtttgatgggtaacgatgttatcgacgagtaggcgaaatggcgcgatgacgttattatgcgttcgtaatttatttcgtttattgaacgtcgtgtacgaatggcgtttggtatcggcgatcgtcgcggtttgaatatttgttggcgcgtttgtttatggaagcgaaagagaaagatgaatggcgtt

SEQ ID NO: 17930 - DNA, 510 bp, Artificial Sequence
  chemically treated genomic DNA (Homo sapiens) CpG-island No: 17930
aacgccattcatctttctctttcgcttccataaacaaacgcgccaacaaatattcaaaccgcgacgatcgccgataccaaacgccattcgtacacgacgttcaataaacgaaataaattacgaacgcataataacgtcatcgcgccatttcgcctactcgtcgataacatcgttacccatcaaacgccaaacgacgatatcgcgcacgtcctaaatctaatcttcattaaactactacgcctaaacaaacgataaaatcatcaaccgtacattctcaacatcctaccgcgccacactaacaaacgccaccgccgccatttaacgaataaaatcgatcgcgccaattatacgcgcgaaaatcaataccgtattaaaattattcgccaataaaataattaccgaaacgataatctaataatcgacaaacatctacgctaccaacactattaccaaacctatattacccgctttcatcgccaaacgacaaatacaacacaccaaccgcgcgtt

SEQ ID NO: 17931 - DNA, 510 bp, Artificial Sequence
  chemically treated genomic DNA (Homo sapiens) CpG-island No: 17931
aacgttatttatttttttttttcgtttttataggtagacgcgttagtaggtatttaggtcgcgacgatcgtcggtgttaagcgttattcgtatacggcgtttaataagcgaagtagattgcgagcgtataatggcgttatcgcgttatttcgtttgttcgtcggtgatatcgttgtttattaaacgttaggcgacgatatcgcgtacgttttgaatttgatttttattaagttgttgcgtttgggtaagcgatgggattattagtcgtgtatttttagtattttgtcgcgttatattggtaaacgttatcgtcgttatttgacgggtaaaatcggtcgcgttagttgtacgcgcgaaggttagtatcgtattagggttgttcgttagtgaaatgattgtcgaggcgatagtttggtaatcggtaggtatttgcgttgttagtattgttattaggtttgtgttattcgtttttatcgttaagcggtagatgtaatatattaatcgcgcgtt

SEQ ID NO: 17932 - DNA, 510 bp, Artificial Sequence
  chemically treated genomic DNA (Homo sapiens) CpG-island No: 17932
aacgcgcgattaatatattacatctaccgcttaacgataaaaacgaataacacaaacctaataacaatactaacaacgcaaatacctaccgattaccaaactatcgcctcgacaatcatttcactaacgaacaaccctaatacgatactaaccttcgcgcgtacaactaacgcgaccgattttacccgtcaaataacgacgataacgtttaccaatataacgcgacaaaatactaaaaatacacgactaataatcccatcgcttacccaaacgcaacaacttaataaaaatcaaattcaaaacgtacgcgatatcgtcgcctaacgtttaataaacaacgatatcaccgacgaacaaacgaaataacgcgataacgccattatacgctcgcaatctacttcgcttattaaacgccgtatacgaataacgcttaacaccgacgatcgtcgcgacctaaatacctactaacgcgtctacctataaaaacgaaaaaaaaaaataaataacgtt

SEQ ID NO: 17933 - DNA, 756 bp, Artificial Sequence
  chemically treated genomic DNA (Homo sapiens) CpG-island No: 17933
atcggtcgttaatagttaggagtcgttattcgtcgtttgtagtttcggggcgaagttcgtttgtagtttttggggtagaaggttgggggtggcgggcgggagcgagaaggaatggggtgggagttaggagaaacgtatttatttattttaagcgtaagtttcggcggcgtttttaggtgttgttttttcgttttttcgttaggtgttcggtttcgtcgggcgttgttagtgttcgggatttagggcgtttcggtcgatttttgcgggaaacgattgtaaatttatattattgttcgagttgtcgttcgggttttcgtattgttttttttcggttgttggtagcggtgttttaaatcggcggtcgtcggaggtaggaatcgaatttagttattattgtattagcggacgatcgttgttagaagggtgtttgcgtttagggttttatgtgtgtgcgagagagtgtgaatacgtgtgtgtgtgtgagtgaaagagagtgttcgtgtgtgagagagtagaaggggtgagtttagttttcggggtattcggaggtgaatttcgggttgagtcgaagttcgtcgcgttttcgggtgttgggcgtttgttcggttgatggttgggttgatgttgtcgtggtcgtcgtcgtcgcgttttaaggttggtcgcggtggtgtaaaaaatgttttttcgttattcgagattaaaaaatttgttttgtttattgagtatgttcggtttgatagttttatagtcgaggtt

SEQ ID NO: 17934 - DNA, 756 bp, Artificial Sequence
  chemically treated genomic DNA (Homo sapiens) CpG-island No: 17934
aacctcgactataaaactatcaaaccgaacatactcaataaacaaaacaaattttttaatctcgaataacgaaaaaacattttttacaccaccgcgaccaaccttaaaacgcgacgacgacgaccacgacaacatcaacccaaccatcaaccgaacaaacgcccaacacccgaaaacgcgacgaacttcgactcaacccgaaattcacctccgaataccccgaaaactaaactcaccccttctactctctcacacacgaacactctctttcactcacacacacacacgtattcacactctctcgcacacacataaaaccctaaacgcaaacacccttctaacaacgatcgtccgctaatacaataataactaaattcgattcctacctccgacgaccgccgatttaaaacaccgctaccaacaaccgaaaaaaaacaatacgaaaacccgaacgacaactcgaacaataatataaatttacaatcgtttcccgcaaaaatcgaccgaaacgccctaaatcccgaacactaacaacgcccgacgaaaccgaacacctaacgaaaaaacgaaaaaacaacacctaaaaacgccgccgaaacttacgcttaaaataaataaatacgtttctcctaactcccaccccattccttctcgctcccgcccgccacccccaaccttctaccccaaaaactacaaacgaacttcgccccgaaactacaaacgacgaataacgactcctaactattaacgaccgat

SEQ ID NO: 17935 - DNA, 756 bp, Artificial Sequence
  chemically treated genomic DNA (Homo sapiens) CpG-island No: 17935
aatttcggttgtgaagttgttaaatcgggtatgtttagtagatagggtaggttttttggtttcgagtagcggagaaatattttttgtattatcgcgattagttttagagcgcggcggcggcggttacggtaatattagtttagttattagtcgagtagacgtttagtattcgggagcgcggcgagtttcggtttagttcggagtttattttcgagtgtttcgggggttgagtttattttttttgtttttttatatacgaatatttttttttatttatatatatatacgtatttatattttttcgtatatatataggattttgggcgtaagtatttttttggtagcggtcgttcgttggtgtaatagtagttaggttcggtttttgttttcggcggtcgtcggtttagagtatcgttgttagtagtcggaggagagtaatgcgggggttcgagcggtagttcgaatagtaatgtggatttatagtcgtttttcgtaggagtcggtcgagacgttttaagtttcgggtattggtagcgttcggcggagtcgagtatttggcgagggggcgggggaatagtatttggggacgtcgtcgaaatttgcgtttggaataggtaggtgcgttttttttggtttttattttattttttttcgttttcgttcgttatttttaattttttattttaaggattataggcgaatttcgtttcgaggttgtaggcggcggatggcggtttttggttgttagcggtcggt

SEQ ID NO: 17936 - DNA, 756 bp, Artificial Sequence
  chemically treated genomic DNA (Homo sapiens) CpG-island No: 17936
accgaccgctaacaaccaaaaaccgccatccgccgcctacaacctcgaaacgaaattcgcctataatccttaaaataaaaaattaaaaataacgaacgaaaacgaaaaaaaataaaataaaaaccaaaaaaaacgcacctacctattccaaacgcaaatttcgacgacgtccccaaatactattcccccgccccctcgccaaatactcgactccgccgaacgctaccaatacccgaaacttaaaacgtctcgaccgactcctacgaaaaacgactataaatccacattactattcgaactaccgctcgaacccccgcattactctcctccgactactaacaacgatactctaaaccgacgaccgccgaaaacaaaaaccgaacctaactactattacaccaacgaacgaccgctaccaaaaaaatacttacgcccaaaatcctatatatatacgaaaaaatataaatacgtatatatatataaataaaaaaaaatattcgtatataaaaaaacaaaaaaaataaactcaacccccgaaacactcgaaaataaactccgaactaaaccgaaactcgccgcgctcccgaatactaaacgtctactcgactaataactaaactaatattaccgtaaccgccgccgccgcgctctaaaactaatcgcgataatacaaaaaatatttctccgctactcgaaaccaaaaaacctaccctatctactaaacatacccgatttaacaacttcacaaccgaaatt

SEQ ID NO: 17937 - DNA, 1111 bp, Artificial Sequence
  chemically treated genomic DNA (Homo sapiens) CpG-island No: 17937
tacgagttacgtgaatttcggcgttacgtgatagtttttttttcgttttttttttggtttttacggatttggggggcggtggcggttaatgtcgggttaaggttcgcgggtttcgtagatcgtagttcgggcgtacgcgattagatgattttgttgtggacggttaagttgtaggcgggatggttgagaaagcggcgttaggattttcgggtagaggttcggggaagggagttaggggggaaatgttttataaggtcgttttgcggttattattattgttcgtcgtttaaaatagttttcggcgttagttggtttgttttatggtcgagagatggttgttgttttcgagttcgtggattcgggtgtattttggggattcgagcgttcggagtttttttttattcgtttttatcgggtgtacggtgttaatattcgcgtggatttttttgggacgcgggttatacgcgtggagagtttcgtttacggcgtgtgttttagtcgcgagtcgttggtttcgggttaggtttttttggtcgagatcgaggagaaagagttgggttggtgcggatatttgcgtttcggtttgatcgcgttggatttcgttagtttggttttcgttttcgagttttttttgttcgatttggttaatttgggttatatttgggttttcgttattacgcgttattataatcgcgtgtttcgggagggtcgttcggaggcggaggtagcggtttttagtcgatttttaatttttttcgtggaattatatttgcgtattgagtagtttcgtatttttcgggatcgtttggtgggtcgtagtcggttagggttttatagttattttttggattagttttatgagttgaacgtgttgttttcgatcgcgcgtcgtagtcgtttgggtgtttttttttgttcgcgtttcgatggtacggtcgatatgtatattattattaacggcgaggatatgggttcgagcgttcggggattgttagttgcgtagtttttttacgcggtggtggacgtgtttgtttttataaagagcgtgcgttttgtttagttcgagtatggttgtaggtatttttgggtagcgattttttttggtttagtg

SEQ ID NO: 17938 - DNA, 1111 bp, Artificial Sequence
  chemically treated genomic DNA (Homo sapiens) CpG-island No: 17938
cactaaaccaaaaaaaatcgctacccaaaaatacctacaaccatactcgaactaaacaaaacgcacgctctttataaaaacaaacacgtccaccaccgcgtaaaaaaactacgcaactaacaatccccgaacgctcgaacccatatcctcgccgttaataataatatacatatcgaccgtaccatcgaaacgcgaacaaaaaaaaacacccaaacgactacgacgcgcgatcgaaaacaacacgttcaactcataaaactaatccaaaaaataactataaaaccctaaccgactacgacccaccaaacgatcccgaaaaatacgaaactactcaatacgcaaatataattccacgaaaaaaattaaaaatcgactaaaaaccgctacctccgcctccgaacgaccctcccgaaacacgcgattataataacgcgtaataacgaaaacccaaatataacccaaattaaccaaatcgaacaaaaaaaactcgaaaacgaaaaccaaactaacgaaatccaacgcgatcaaaccgaaacgcaaatatccgcaccaacccaactctttctcctcgatctcgaccaaaaaaacctaacccgaaaccaacgactcgcgactaaaacacacgccgtaaacgaaactctccacgcgtataacccgcgtcccaaaaaaatccacgcgaatattaacaccgtacacccgataaaaacgaataaaaaaaaactccgaacgctcgaatccccaaaatacacccgaatccacgaactcgaaaacaacaaccatctctcgaccataaaacaaaccaactaacgccgaaaactattttaaacgacgaacaataataataaccgcaaaacgaccttataaaacatttcccccctaactcccttccccgaacctctacccgaaaatcctaacgccgctttctcaaccatcccgcctacaacttaaccgtccacaacaaaatcatctaatcgcgtacgcccgaactacgatctacgaaacccgcgaaccttaacccgacattaaccgccaccgccccccaaatccgtaaaaaccaaaaaaaaaacgaaaaaaaaactatcacgtaacgccgaaattcacgtaactcgta

SEQ ID NO: 17939 - DNA, 1111 bp, Artificial Sequence
  chemically treated genomic DNA (Homo sapiens) CpG-island No: 17939
tattgagttaggaggggtcgttgtttagggatatttatagttatattcgagttggataaggcgtacgttttttgtggaagtaaatacgtttattatcgcgtagaggggttgcgtagttggtagttttcgggcgttcgggtttatgttttcgtcgttgatgatgatgtgtatgtcggtcgtgttatcggggcgcgggtaaaagaggatatttaggcggttacggcgcgcggtcggaggtagtacgtttagtttatagagttggtttaagagatggttgtagagttttggtcggttgcggtttattaggcggtttcggggaatgcgaaattgtttaatgcgtagatatggttttacgaggagggttggaggtcggttgggggtcgttgttttcgttttcgggcggttttttcggggtacgcggttgtggtggcgcgtgatggcgaagatttaggtgtggtttaggttgattagatcgggtagagaaaattcgggaacgggggttagattggcggggtttagcgcggttagatcgagacgtagatgttcgtattagtttagtttttttttttcgatttcgattaggaagatttggttcggggttagcggttcgcggttgaagtatacgtcgtgggcgaagttttttacgcgtgtggttcgcgttttagaggggtttacgcggatgttggtatcgtgtattcgatggaagcgggtgggagggggtttcgggcgttcgagtttttagagtgtattcgaatttacgggttcggaggtagtagttatttttcggttatagggtaggttagttggcgtcgggggttattttgggcggcgggtaatgatggtgatcgtaaggcgattttgtaaggtattttttttttgattttttttttcgagtttttgttcgggggttttagcgtcgtttttttagttatttcgtttataatttagtcgtttataataggattatttgatcgcgtgcgttcgggttacgatttgcgaggttcgcggattttgattcggtattgatcgttatcgttttttaggttcgtagggattaaagaaggggcgggaggaagattgttacgtggcgtcggagtttacgtgattcgta

SEQ ID NO: 17940 - DNA, 1111 bp, Artificial Sequence
  chemically treated genomic DNA (Homo sapiens) CpG-island No: 17940
tacgaatcacgtaaactccgacgccacgtaacaatcttcctcccgccccttctttaatccctacgaacctaaaaaacgataacgatcaataccgaatcaaaatccgcgaacctcgcaaatcgtaacccgaacgcacgcgatcaaataatcctattataaacgactaaattataaacgaaataactaaaaaaacgacgctaaaacccccgaacaaaaactcgaaaaaaaaaatcaaaaaaaaaataccttacaaaatcgccttacgatcaccatcattacccgccgcccaaaataacccccgacgccaactaacctaccctataaccgaaaaataactactacctccgaacccgtaaattcgaatacactctaaaaactcgaacgcccgaaaccccctcccacccgcttccatcgaatacacgataccaacatccgcgtaaacccctctaaaacgcgaaccacacgcgtaaaaaacttcgcccacgacgtatacttcaaccgcgaaccgctaaccccgaaccaaatcttcctaatcgaaatcgaaaaaaaaaaactaaactaatacgaacatctacgtctcgatctaaccgcgctaaaccccgccaatctaacccccgttcccgaattttctctacccgatctaatcaacctaaaccacacctaaatcttcgccatcacgcgccaccacaaccgcgtaccccgaaaaaaccgcccgaaaacgaaaacaacgacccccaaccgacctccaaccctcctcgtaaaaccatatctacgcattaaacaatttcgcattccccgaaaccgcctaataaaccgcaaccgaccaaaactctacaaccatctcttaaaccaactctataaactaaacgtactacctccgaccgcgcgccgtaaccgcctaaatatcctcttttacccgcgccccgataacacgaccgacatacacatcatcatcaacgacgaaaacataaacccgaacgcccgaaaactaccaactacgcaacccctctacgcgataataaacgtatttacttccacaaaaaacgtacgccttatccaactcgaatataactataaatatccctaaacaacgacccctcctaactcaata

SEQ ID NO: 17941 - DNA, 1391 bp, Artificial Sequence
  chemically treated genomic DNA (Homo sapiens) CpG-island No: 17941
agattcgtatttttttttcggggtcgtttcgtttttatcggaatttggacgttatcgagtttagtatacgttcggggacggtgatttattcgcggtttttttcgcgggtttaggtcgtttttgtttttttgatttaatcgattttttgataatttttcggtttttttttcgttgttgggagaagtcgcggcggtttcggggcggcggggagggcggcgttcgggtgttttcggtaggttttttgggggaggcgttgcgggagggtgggggcgtttcgacgggggatcgggtcgcgtcgttaatttcgattcggattggcgggaaaagcgaaattaatttagtcgagcggggtttcgtttttttcgggttaaaggggggacgggtcggcggtttcggagcgttttagttttttttcgggatcgtaattcgttgcgacggttttcgcgtttcgagattttcgtcgcgtttcgtttcgggattttttgttttgtagcggcggtagcgcggggcgggtttgggttttttttttaggagtcgcggcgagggaggcgttttcggagttatcgcgggaggggtcgcgtttcgagtttttatttcgtattttattcgttttttcgcgttcggtttcgcgttatttattcggttttttagcggcgcgattttcgcgttcgttttcgttcggtttttcgcgtttttttttttcgggtcggtcgtttatttatcggggttttaggtgtttcgcgtcgtttatcgcgttcggggtgtcgtcgtcgtcgttgttttttaaggtcgaggaggttcgggcgttcgggtcgcgttcgtcgtagggagcgaagtcgtttttttttcgcggtttcggtttcggcgtcggcgtttggagtttggtttttgttgcgagcgcgtaggttgttcgagcgcgatttttgtgcggaggagaaaaagtaatcgacggttttaaagtgaaaaaaaagagaaaagcgtcggtgggcggggtcgtttttgtttcgtttcgtttcgtttcgttttcgatttcgggcgtacggattatttagtattgtagggaaggtcgggggcgcggggcgcggggcgcggggcgcgttagttcggcgttggttcggtcgtttttttcgtttttttagttcgtagttttttttcgagtcgtcgttttggtgttgtcggttcgaagttcgggttttttcggaggcgtttttgggaaacgcgtggcgtagggtttgggttgtagtcgtgggaggttggagtgggggcgggggttttacgagaaggagaaattttcgcggagagtggggttgttttaggaatttcgagtaaggtttcgtcggttttttttgaagtgtttagcggggacgagtgggtagtcgtcgggggtttag

SEQ ID NO: 17942 - DNA, 1391 bp, Artificial Sequence
  chemically treated genomic DNA (Homo sapiens) CpG-island No: 17942
ctaaacccccgacgactacccactcgtccccgctaaacacttcaaaaaaaaccgacgaaaccttactcgaaattcctaaaacaaccccactctccgcgaaaatttctccttctcgtaaaacccccgcccccactccaacctcccacgactacaacccaaaccctacgccacgcgtttcccaaaaacgcctccgaaaaaacccgaacttcgaaccgacaacaccaaaacgacgactcgaaaaaaaactacgaactaaaaaaacgaaaaaaacgaccgaaccaacgccgaactaacgcgccccgcgccccgcgccccgcgcccccgaccttccctacaatactaaataatccgtacgcccgaaatcgaaaacgaaacgaaacgaaacgaaacaaaaacgaccccgcccaccgacgcttttctcttttttttcactttaaaaccgtcgattactttttctcctccgcacaaaaatcgcgctcgaacaacctacgcgctcgcaacaaaaaccaaactccaaacgccgacgccgaaaccgaaaccgcgaaaaaaaaacgacttcgctccctacgacgaacgcgacccgaacgcccgaacctcctcgaccttaaaaaacaacgacgacgacgacaccccgaacgcgataaacgacgcgaaacacctaaaaccccgataaataaacgaccgacccgaaaaaaaaaaacgcgaaaaaccgaacgaaaacgaacgcgaaaatcgcgccgctaaaaaaccgaataaataacgcgaaaccgaacgcgaaaaaacgaataaaatacgaaataaaaactcgaaacgcgacccctcccgcgataactccgaaaacgcctccctcgccgcgactcctaaaaaaaaaacccaaacccgccccgcgctaccgccgctacaaaacaaaaaatcccgaaacgaaacgcgacgaaaatctcgaaacgcgaaaaccgtcgcaacgaattacgatcccgaaaaaaaactaaaacgctccgaaaccgccgacccgtcccccctttaacccgaaaaaaacgaaaccccgctcgactaaattaatttcgcttttcccgccaatccgaatcgaaattaacgacgcgacccgatcccccgtcgaaacgcccccaccctcccgcaacgcctcccccaaaaaacctaccgaaaacacccgaacgccgccctccccgccgccccgaaaccgccgcgacttctcccaacaacgaaaaaaaaaccgaaaaattatcaaaaaatcgattaaatcaaaaaaacaaaaacgacctaaacccgcgaaaaaaaccgcgaataaatcaccgtccccgaacgtatactaaactcgataacgtccaaattccgataaaaacgaaacgaccccgaaaaaaaaatacgaatct

SEQ ID NO: 17943 - DNA, 1391 bp, Artificial Sequence
  chemically treated genomic DNA (Homo sapiens) CpG-island No: 17943
ttggattttcggcggttgtttattcgttttcgttgggtattttagaggaggtcggcgaggttttgttcggggtttttgggataattttatttttcgcgaagatttttttttttcgtaagattttcgtttttattttagttttttacggttgtaatttaggttttgcgttacgcgttttttaaagacgttttcggagggattcgagtttcgggtcggtaatattagggcggcggttcgggagagggttgcggattaagggggcggagggggcggtcgaattagcgtcgggttgacgcgtttcgcgtttcgcgtttcgcgttttcggttttttttgtagtgttgagtggttcgtgcgttcgaggtcgggggcggggcggggcggggcggggtagggacggtttcgtttatcggcgtttttttttttttttttattttaaagtcgtcggttgttttttttttttcgtatagaagtcgcgttcgggtagtttgcgcgttcgtagtaggaattaggttttaggcgtcggcgtcggggtcggggtcgcggggaggaggcgatttcgttttttgcggcgggcgcggttcgggcgttcgagttttttcggttttggagagtagcggcggcggcggtatttcgggcgcggtaggcggcgcggggtatttgggatttcgatgggtgggcgatcggttcgggagggggaggcgcggggggtcgggcgagggcggacgcggggatcgcgtcgttgggggatcgagtgggtggcgcggggtcgggcgcgggggagcgggtggagtacgggatggggattcggggcgcggtttttttcgcggtggtttcgggggcgtttttttcgtcgcggtttttgggagaggggtttaggttcgtttcgcgttgtcgtcgttgtagggtagggggtttcggggcgaggcgcggcgggggtttcggggcgcggggatcgtcgtaacgagttgcggtttcgaggaggggttggggcgtttcggggtcgtcgattcgttttttttttagttcggggaaagcgggatttcgttcggttgagttagtttcgtttttttcgttagttcgagtcgggattggcggcgcggttcggtttttcgtcggggcgtttttattttttcgtagcgttttttttagggagtttgtcggggatattcgagcgtcgtttttttcgtcgtttcggagtcgtcgcggttttttttagtagcggagggagagtcggagggttgttaggaaatcgattaaattagaaaaataagggcggtttgggttcgcgggaggaatcgcggatgggttatcgttttcgggcgtgtattgggttcggtggcgtttaggtttcggtgaggacgggacggtttcgagaggagggtgcgggttt

SEQ ID NO: 17944 - DNA, 1391 bp, Artificial Sequence
  chemically treated genomic DNA (Homo sapiens) CpG-island No: 17944
aaacccgcaccctcctctcgaaaccgtcccgtcctcaccgaaacctaaacgccaccgaacccaatacacgcccgaaaacgataacccatccgcgattcctcccgcgaacccaaaccgcccttatttttctaatttaatcgatttcctaacaaccctccgactctccctccgctactaaaaaaaaccgcgacgactccgaaacgacgaaaaaaacgacgctcgaatatccccgacaaactccctaaaaaaaacgctacgaaaaaataaaaacgccccgacgaaaaaccgaaccgcgccgccaatcccgactcgaactaacgaaaaaaacgaaactaactcaaccgaacgaaatcccgctttccccgaactaaaaaaaaaacgaatcgacgaccccgaaacgccccaacccctcctcgaaaccgcaactcgttacgacgatccccgcgccccgaaacccccgccgcgcctcgccccgaaaccccctaccctacaacgacgacaacgcgaaacgaacctaaacccctctcccaaaaaccgcgacgaaaaaaacgcccccgaaaccaccgcgaaaaaaaccgcgccccgaatccccatcccgtactccacccgctcccccgcgcccgaccccgcgccacccactcgatcccccaacgacgcgatccccgcgtccgccctcgcccgaccccccgcgcctccccctcccgaaccgatcgcccacccatcgaaatcccaaataccccgcgccgcctaccgcgcccgaaataccgccgccgccgctactctccaaaaccgaaaaaactcgaacgcccgaaccgcgcccgccgcaaaaaacgaaatcgcctcctccccgcgaccccgaccccgacgccgacgcctaaaacctaattcctactacgaacgcgcaaactacccgaacgcgacttctatacgaaaaaaaaaaaacaaccgacgactttaaaataaaaaaaaaaaaaaaaacgccgataaacgaaaccgtccctaccccgccccgccccgccccgcccccgacctcgaacgcacgaaccactcaacactacaaaaaaaaccgaaaacgcgaaacgcgaaacgcgaaacgcgtcaacccgacgctaattcgaccgccccctccgcccccttaatccgcaaccctctcccgaaccgccgccctaatattaccgacccgaaactcgaatccctccgaaaacgtctttaaaaaacgcgtaacgcaaaacctaaattacaaccgtaaaaaactaaaataaaaacgaaaatcttacgaaaaaaaaaaatcttcgcgaaaaataaaattatcccaaaaaccccgaacaaaacctcgccgacctcctctaaaatacccaacgaaaacgaataaacaaccgccgaaaatccaa

SEQ ID NO: 17945 - DNA, 627 bp, Artificial Sequence
  chemically treated genomic DNA (Homo sapiens) CpG-island No: 17945
ttagtcgagcgtagtcgtttagtcggatttcggagttatttcggttttttatggcgatacgttattaattgttttttgagaaatagttcgggtgttatcggagttttcggtttttaaggaataagtatttaacgttgttttattttcgtggtgggacgtttgaatattaggtttcgtagagtttttttatcgtttaggtttggcgtcgcggatttcgcgtattttttcggatttcggcggttttaggggtttattacgcgttagcgttagtattggtttttcgcggtttagagtttcgtcgtagcgttttaggcgtcgtttttgtttttttagtttagttcggttttcgcgtgtgatttttgtattttttttttaatttcgggagatcgtcgcggtttatagtttttcgttcggtcgtcgttaataggttaacgatcgttgcgtcgtttttattttgcgggagacgcgagcgggaggcggggcgggcgcgattggttttggtagttgcgcgttgcgatttcggggttcgttcgtttcggggtcgagaatgtgttatcgtaggtaatgtgtttttcgaggtttattttcgaaatattttagattattattttagttttttatatttgt

SEQ ID NO: 17946 - DNA, 627 bp, Artificial Sequence
  chemically treated genomic DNA (Homo sapiens) CpG-island No: 17946
acaaatataaaaaactaaaataataatctaaaatatttcgaaaataaacctcgaaaaacacattacctacgataacacattctcgaccccgaaacgaacgaaccccgaaatcgcaacgcgcaactaccaaaaccaatcgcgcccgccccgcctcccgctcgcgtctcccgcaaaataaaaacgacgcaacgatcgttaacctattaacgacgaccgaacgaaaaactataaaccgcgacgatctcccgaaattaaaaaaaaaatacaaaaatcacacgcgaaaaccgaactaaactaaaaaaacaaaaacgacgcctaaaacgctacgacgaaactctaaaccgcgaaaaaccaatactaacgctaacgcgtaataaacccctaaaaccgccgaaatccgaaaaaatacgcgaaatccgcgacgccaaacctaaacgataaaaaaactctacgaaacctaatattcaaacgtcccaccacgaaaataaaacaacgttaaatacttattccttaaaaaccgaaaactccgataacacccgaactatttctcaaaaaacaattaataacgtatcgccataaaaaaccgaaataactccgaaatccgactaaacgactacgctcgactaa

SEQ ID NO: 17947 - DNA, 627 bp, Artificial Sequence
  chemically treated genomic DNA (Homo sapiens) CpG-island No: 17947
gtaagtgtggaaaattgaaatagtgatttgaggtgtttcgaaaataaatttcggaaagtatattgtttacggtgatatattttcggtttcggggcgggcgagtttcggggtcgtagcgcgtagttgttagaattagtcgcgttcgtttcgtttttcgttcgcgtttttcgtaaggtggaggcggcgtagcggtcgttgatttgttggcggcggtcgggcgggaggttgtgggtcgcggcggtttttcggggttgaggggaggatgtaggagttatacgcggaggtcggattggattaagggggtaggagcggcgtttggggcgttgcggcggggttttagatcgcgggaagttagtgttagcgttggcgcgtggtgggtttttgaggtcgtcggagttcggagaggtacgcggaattcgcggcgttaggtttgagcggtgggagggttttgcggggtttggtgtttaggcgttttattacgagggtggagtagcgttggatatttgttttttagggatcgaaggtttcggtggtattcgggttattttttagaggataattagtaacgtgtcgttatgaggagtcggagtaatttcggggttcggttggacggttacgttcgattgg

SEQ ID NO: 17948 - DNA, 627 bp, Artificial Sequence
  chemically treated genomic DNA (Homo sapiens) CpG-island No: 17948
ccaatcgaacgtaaccgtccaaccgaaccccgaaattactccgactcctcataacgacacgttactaattatcctctaaaaaataacccgaataccaccgaaaccttcgatccctaaaaaacaaatatccaacgctactccaccctcgtaataaaacgcctaaacaccaaaccccgcaaaaccctcccaccgctcaaacctaacgccgcgaattccgcgtacctctccgaactccgacgacctcaaaaacccaccacgcgccaacgctaacactaacttcccgcgatctaaaaccccgccgcaacgccccaaacgccgctcctacccccttaatccaatccgacctccgcgtataactcctacatcctcccctcaaccccgaaaaaccgccgcgacccacaacctcccgcccgaccgccgccaacaaatcaacgaccgctacgccgcctccaccttacgaaaaacgcgaacgaaaaacgaaacgaacgcgactaattctaacaactacgcgctacgaccccgaaactcgcccgccccgaaaccgaaaatatatcaccgtaaacaatatactttccgaaatttattttcgaaacacctcaaatcactatttcaattttccacacttac

SEQ ID NO: 17949 - DNA, 551 bp, Artificial Sequence
  chemically treated genomic DNA (Homo sapiens) CpG-island No: 17949
cgcggcgagagggggtcgacggtttcgggtttatttatttcggataggtcgtttcggtttttcgtgttttgttcgtttagtattttttttagtttgtttattgcggtttagtttttattagttttagttttttagcggtagtttgttgcgttcgttaagttgacggttttttcgggtgttaggtagtcgtttagtcgtttaggcgttaatcgcggcgcgtttcgtttaggtatttgtttatcggggggttttcggtatgtttcgcgcgttcgcgttcgttttcgtttgttttggtttcggggggcgcggcgggtcggaggggttgggattgaagattattaggcgttgttaaatattaattcggcgtttagagtagttttaaatcggaacgggtcgcgttttttcgttttatttgatttagttaacgaatgtcgagtatttattacgtgtaaggtttcggagatataaagacgggggagaagttttgtgtagacgggaataaaggttgtggtttatttatattgcgatcgtgtttatataggaaaagattt

SEQ ID NO: 17950 - DNA, 551 bp, Artificial Sequence
  chemically treated genomic DNA (Homo sapiens) CpG-island No: 17950
aaatcttttcctatataaacacgatcgcaatataaataaaccacaacctttattcccgtctacacaaaacttctcccccgtctttatatctccgaaaccttacacgtaataaatactcgacattcgttaactaaatcaaataaaacgaaaaaacgcgacccgttccgatttaaaactactctaaacgccgaattaatatttaacaacgcctaataatcttcaatcccaacccctccgacccgccgcgccccccgaaaccaaaacaaacgaaaacgaacgcgaacgcgcgaaacataccgaaaaccccccgataaacaaatacctaaacgaaacgcgccgcgattaacgcctaaacgactaaacgactacctaacacccgaaaaaaccgtcaacttaacgaacgcaacaaactaccgctaaaaaactaaaactaataaaaactaaaccgcaataaacaaactaaaaaaaatactaaacgaacaaaacacgaaaaaccgaaacgacctatccgaaataaataaacccgaaaccgtcgaccccctctcgccgcg

SEQ ID NO: 17951 - DNA, 551 bp, Artificial Sequence
  chemically treated genomic DNA (Homo sapiens) CpG-island No: 17951
aaatttttttttgtgtaggtacgatcgtaatatggatgaattatagtttttgttttcgtttgtataaggtttttttttcgtttttgtgttttcggagttttgtacgtggtaggtgttcggtattcgttgattggattaagtagggcgagggagcgcggttcgtttcggtttgaaattgttttggacgtcgaattagtgtttggtagcgtttggtggtttttaattttagttttttcggttcgtcgcgtttttcgggattaaaataagcggaggcgagcgcgggcgcgcggggtatgtcgggagtttttcggtgggtaggtgtttgggcggggcgcgtcgcggttggcgtttgggcggttgggcggttgtttagtattcggaagagtcgttaatttagcgagcgtaataggttgtcgttgaggagttggagttggtggggattgggtcgtaatggataagttgaagaaggtgttgagcgggtaggatacggaggatcggagcggtttgttcgaggtgagtgagttcggggtcgtcggttttttttcgtcgcg

SEQ ID NO: 17952 - DNA, 551 bp, Artificial Sequence
  chemically treated genomic DNA (Homo sapiens) CpG-island No: 17952
cgcgacgaaaaaaaaccgacgaccccgaactcactcacctcgaacaaaccgctccgatcctccgtatcctacccgctcaacaccttcttcaacttatccattacgacccaatccccaccaactccaactcctcaacgacaacctattacgctcgctaaattaacgactcttccgaatactaaacaaccgcccaaccgcccaaacgccaaccgcgacgcgccccgcccaaacacctacccaccgaaaaactcccgacataccccgcgcgcccgcgctcgcctccgcttattttaatcccgaaaaacgcgacgaaccgaaaaaactaaaattaaaaaccaccaaacgctaccaaacactaattcgacgtccaaaacaatttcaaaccgaaacgaaccgcgctccctcgccctacttaatccaatcaacgaataccgaacacctaccacgtacaaaactccgaaaacacaaaaacgaaaaaaaaaccttatacaaacgaaaacaaaaactataattcatccatattacgatcgtacctacacaaaaaaaaattt

SEQ ID NO: 17953 - DNA, 1287 bp, Artificial Sequence
  chemically treated genomic DNA (Homo sapiens) CpG-island No: 17953
tttgttcgcgttttttatcgaaattttttcgtttcgttagcgaggaaggcgcgatcgttttcggaatatagacgggagatcggaggttcggggatcgtcggacgatcgcggtcgggcggttttttatattattcgggcggttttttcgacggcgcgcggcgtttatttttaggcggtcgatgcggtttcgtagggcgcgtacggcgttttttagttttagaatgagcgtaggcgagttttagggttcgtcggttatggtgtcgcggcggggttcggcgttttggaggtcgcgcggtaggtcgttttcgtagcggtttagtttgtcggtgagtttacggatggtgttttggtcggcgcggatgcgcgttttttgttgtagcgtcgtttggcgtagttgttcggtcgtgttttgtagtagtagtagtttttcgcgttcgttcggcgtagcgttcgtcgcgtttttttgttgggttttcgacgggtaggtagtagttagcggcgtgtataggaagcggttgaataggggttcgggcggtagcgggtgcgcgttggtcgcgggtgtttcgggtagcgcggggggttcggttgaatcgttcgcgtcgtgtagcgcgtttaggtttcgttgcgggttcggggacgcggcggcgttcgaggcgatcgaagtattgtcggcgtcgtcgggtagcgttcgcgtcgggttggtcgttaggggtacgttggcgatgatgtagatgacggtatcgaggaacgttagtatgttcgcggttagtagtacggttaggaattttagcgtgaggcgggcggcgggggcgttcgaggttttcggtaggcgcggcggcggggtcggggcgcggagttcgggcgcgttgggtcgagcggggtaggcgcgggagtcggagtcggagtcggagtcggagtcggagttggagttgtcgtcgcggtcgttgttgtcgtcgttttgagttcgggcggcgggaggaggagaagacggtaggcggcggggagggggagcgggcgcggcggtttcgttttattcgttttttcgggtcggttttggtttcggtttagtttcgtattcgtttagtgtcgggcgttcggttgggggcgtcgtcggggatgcggcgaggagcgagggtagcgtttgggattttatttcgtcgcggttatagcgtaggggtcggcgattcgagggtcgcgcggcggggtttttgggtgatttttattttagttttttcgtgttcgggttttttttttaagtcggttatgtttatatttattcgggaggga

SEQ ID NO: 17954 - DNA, 1287 bp, Artificial Sequence
  chemically treated genomic DNA (Homo sapiens) CpG-island No: 17954
tccctcccgaataaatataaacataaccgacttaaaaaaaaaacccgaacacgaaaaaactaaaataaaaatcacccaaaaaccccgccgcgcgaccctcgaatcgccgacccctacgctataaccgcgacgaaataaaatcccaaacgctaccctcgctcctcgccgcatccccgacgacgcccccaaccgaacgcccgacactaaacgaatacgaaactaaaccgaaaccaaaaccgacccgaaaaaacgaataaaacgaaaccgccgcgcccgctccccctccccgccgcctaccgtcttctcctcctcccgccgcccgaactcaaaacgacgacaacaacgaccgcgacgacaactccaactccgactccgactccgactccgactccgactcccgcgcctaccccgctcgacccaacgcgcccgaactccgcgccccgaccccgccgccgcgcctaccgaaaacctcgaacgcccccgccgcccgcctcacgctaaaattcctaaccgtactactaaccgcgaacatactaacgttcctcgataccgtcatctacatcatcgccaacgtacccctaacgaccaacccgacgcgaacgctacccgacgacgccgacaatacttcgatcgcctcgaacgccgccgcgtccccgaacccgcaacgaaacctaaacgcgctacacgacgcgaacgattcaaccgaaccccccgcgctacccgaaacacccgcgaccaacgcgcacccgctaccgcccgaacccctattcaaccgcttcctatacacgccgctaactactacctacccgtcgaaaacccaacaaaaaaacgcgacgaacgctacgccgaacgaacgcgaaaaactactactactacaaaacacgaccgaacaactacgccaaacgacgctacaacaaaaaacgcgcatccgcgccgaccaaaacaccatccgtaaactcaccgacaaactaaaccgctacgaaaacgacctaccgcgcgacctccaaaacgccgaaccccgccgcgacaccataaccgacgaaccctaaaactcgcctacgctcattctaaaactaaaaaacgccgtacgcgccctacgaaaccgcatcgaccgcctaaaaataaacgccgcgcgccgtcgaaaaaaccgcccgaataatataaaaaaccgcccgaccgcgatcgtccgacgatccccgaacctccgatctcccgtctatattccgaaaacgatcgcgccttcctcgctaacgaaacgaaaaaatttcgataaaaaacgcgaacaaa

SEQ ID NO: 17955 - DNA, 1287 bp, Artificial Sequence
  chemically treated genomic DNA (Homo sapiens) CpG-island No: 17955
tttttttcgggtggatgtgaatataatcggtttggggagggggttcgagtacgggagggttgggatgggggttatttaggagtttcgtcgcgcggttttcgggtcgtcggtttttgcgttgtgatcgcggcgagataaggttttaggcgttgttttcgtttttcgtcgtattttcggcggcgtttttagtcgggcgttcggtattgaacgggtgcggggttgggtcggggttagggtcggttcggggaagcgagtggggcggggtcgtcgcgttcgtttttttttttcgtcgtttgtcgttttttttttttttcgtcgttcgggtttagagcggcggtagtagcggtcgcggcgatagttttagtttcggtttcggtttcggtttcggtttcggttttcgcgtttgtttcgttcggtttagcgcgttcgggtttcgcgtttcgatttcgtcgtcgcgtttgtcgggggtttcgggcgttttcgtcgttcgttttacgttgaagtttttggtcgtgttgttggtcgcgggtatgttggcgtttttcggtgtcgttatttgtattatcgttagcgtgtttttggcggttagttcggcgcgggcgttgttcggcggcgtcgataatgtttcggtcgtttcgggcgtcgtcgcgttttcgggttcgtagcggagtttgagcgcgttgtacggcgcgggcggtttagtcgggtttttcgcgttgttcggggtattcgcggttagcgcgtattcgttgtcgttcgggtttttgtttagtcgttttttgtgtacgtcgttggttgttgtttgttcgtcgggggtttagtagggggacgcggcgggcgttgcgtcgggcgagcgcgaagagttgttgttgttgtagagtacggtcgagtagttgcgttagacggcgttgtagtaggaggcgcgtattcgcgtcgattaggatattattcgtgagtttatcggtaagttgggtcgttgcgagagcggtttgtcgcgcggtttttagggcgtcgggtttcgtcgcgatattatggtcgacgggttttgggattcgtttgcgtttattttggagttggaggacgtcgtgcgcgttttgcgggatcgtatcgatcgtttggaggtgagcgtcgcgcgtcgtcgggggagtcgttcgggtggtgtgaggggtcgttcggtcgcggtcgttcggcggttttcgagttttcggtttttcgtttgtgtttcggggacgatcgcgtttttttcgttggcgaggcggggggatttcgatagggaacgcgggtagg

SEQ ID NO: 17956 - DNA, 1287 bp, Artificial Sequence
  chemically treated genomic DNA (Homo sapiens) CpG-island No: 17956
cctacccgcgttccctatcgaaatccccccgcctcgccaacgaaaaaaacgcgatcgtccccgaaacacaaacgaaaaaccgaaaactcgaaaaccgccgaacgaccgcgaccgaacgacccctcacaccacccgaacgactcccccgacgacgcgcgacgctcacctccaaacgatcgatacgatcccgcaaaacgcgcacgacgtcctccaactccaaaataaacgcaaacgaatcccaaaacccgtcgaccataatatcgcgacgaaacccgacgccctaaaaaccgcgcgacaaaccgctctcgcaacgacccaacttaccgataaactcacgaataatatcctaatcgacgcgaatacgcgcctcctactacaacgccgtctaacgcaactactcgaccgtactctacaacaacaacaactcttcgcgctcgcccgacgcaacgcccgccgcgtccccctactaaacccccgacgaacaaacaacaaccaacgacgtacacaaaaaacgactaaacaaaaacccgaacgacaacgaatacgcgctaaccgcgaataccccgaacaacgcgaaaaacccgactaaaccgcccgcgccgtacaacgcgctcaaactccgctacgaacccgaaaacgcgacgacgcccgaaacgaccgaaacattatcgacgccgccgaacaacgcccgcgccgaactaaccgccaaaaacacgctaacgataatacaaataacgacaccgaaaaacgccaacatacccgcgaccaacaacacgaccaaaaacttcaacgtaaaacgaacgacgaaaacgcccgaaacccccgacaaacgcgacgacgaaatcgaaacgcgaaacccgaacgcgctaaaccgaacgaaacaaacgcgaaaaccgaaaccgaaaccgaaaccgaaaccgaaactaaaactatcgccgcgaccgctactaccgccgctctaaacccgaacgacgaaaaaaaaaaaaaacgacaaacgacgaaaaaaaaaaacgaacgcgacgaccccgccccactcgcttccccgaaccgaccctaaccccgacccaaccccgcacccgttcaataccgaacgcccgactaaaaacgccgccgaaaatacgacgaaaaacgaaaacaacgcctaaaaccttatctcgccgcgatcacaacgcaaaaaccgacgacccgaaaaccgcgcgacgaaactcctaaataacccccatcccaaccctcccgtactcgaaccccctccccaaaccgattatattcacatccacccgaaaaaaa

SEQ ID NO: 17957 - DNA, 978 bp, Artificial Sequence
  chemically treated genomic DNA (Homo sapiens) CpG-island No: 17957
gagttataaacgtataaaattaggatgaagattagagagggataggtacgcggcgagagtaagagcgcgtatttttattttaggtttcggtgttcgttgttttttttttcgcgacgttttcggatttcgcgatatttatttgatcgtttattttttttattttattaggtattcgatgcgtttttgaaaaatagaggggagaaaaacgggggtgggggtggggaggatgcggggacgcgaggaggcggcggcgcggggttgggcgagggagtcgggttagcgggatcgtttcgtttcgagggttttcggtttcggtttcggttgcggatagcggcggttcgtttcgggcggcggtttatttttcggattcgtcgtttgatgatggattcggtcgcgaagattcgttcgtttattgtagatagttttattttgtttagcggtatttatagtttataatattttttgcgttcgcggtcggtgcggtatcgttcgcgtacgcgtcgtagcgtttaggtttcggcgggcgggagcgcggcggggcgcgcgttcgcgttttagttgcgggtcgttacgtgattttcgcggttggcgcgcggttgttaggatttttttttttttcggggcggttgttagggaaagtcggcgttcgcggggcgggggcgcgcgttggtttttaaaggggtcgcgcgggcggagggagtaattgtcggtcgattcgatgggtgttcggtttgtgggtacgttgcggttttacgtttattatttttttttatattttgtcggcgttcgatcgttgatattttttttttgttttttaatttttacgcgagtttcgttaggtttcgggcggagaagggttgtggagttcgagtttcgtcgttatcgcgtatttttcgtagtagtttgtaaatagttaaatatgatgtagtagaaatgtagttgttgttgttttgttaggttttgcgggaatttttttaa

SEQ ID NO: 17958 - DNA, 978 bp, Artificial Sequence
  chemically treated genomic DNA (Homo sapiens) CpG-island No: 17958
ttaaaaaaattcccgcaaaacctaacaaaacaacaacaactacatttctactacatcatatttaactatttacaaactactacgaaaaatacgcgataacgacgaaactcgaactccacaacccttctccgcccgaaacctaacgaaactcgcgtaaaaattaaaaaacaaaaaaaaaatatcaacgatcgaacgccgacaaaatataaaaaaaaataataaacgtaaaaccgcaacgtacccacaaaccgaacacccatcgaatcgaccgacaattactccctccgcccgcgcgacccctttaaaaaccaacgcgcgcccccgccccgcgaacgccgactttccctaacaaccgccccgaaaaaaaaaaaaatcctaacaaccgcgcgccaaccgcgaaaatcacgtaacgacccgcaactaaaacgcgaacgcgcgccccgccgcgctcccgcccgccgaaacctaaacgctacgacgcgtacgcgaacgataccgcaccgaccgcgaacgcaaaaaatattataaactataaataccgctaaacaaaataaaactatctacaataaacgaacgaatcttcgcgaccgaatccatcatcaaacgacgaatccgaaaaataaaccgccgcccgaaacgaaccgccgctatccgcaaccgaaaccgaaaccgaaaaccctcgaaacgaaacgatcccgctaacccgactccctcgcccaaccccgcgccgccgcctcctcgcgtccccgcatcctccccacccccacccccgtttttctcccctctatttttcaaaaacgcatcgaatacctaataaaataaaaaaaataaacgatcaaataaatatcgcgaaatccgaaaacgtcgcgaaaaaaaaaacaacgaacaccgaaacctaaaataaaaatacgcgctcttactctcgccgcgtacctatccctctctaatcttcatcctaattttatacgtttataactc

SEQ ID NO: 17959 - DNA, 978 bp, Artificial Sequence
  chemically treated genomic DNA (Homo sapiens) CpG-island No: 17959
ttaaagaaattttcgtaaggtttggtaaggtaatagtaattgtatttttgttgtattatatttaattgtttgtaggttgttgcgggagatgcgcggtggcggcgagattcgggttttatagttttttttcgttcggggtttggcgagattcgcgtggggattaagaggtaaggagagggtgttagcgatcgggcgtcggtaagatgtgagggggggtgataagcgtaaggtcgtagcgtgtttataagtcgggtatttatcgggtcggtcggtaattgtttttttcgttcgcgcggtttttttaagagttagcgcgcgttttcgtttcgcgagcgtcgattttttttagtaatcgtttcgggggagggggaggttttggtaatcgcgcgttagtcgcgaggattacgtgacggttcgtagttggaacgcgagcgcgcgtttcgtcgcgttttcgttcgtcggggtttgggcgttgcggcgcgtgcgcgagcggtgtcgtatcggtcgcgggcgtagggagtattatgggttgtgggtgtcgttgagtaagatggagttgtttgtagtgggcgagcgggttttcgcggtcgaatttattattaaacggcggattcgaaaggtgagtcgtcgttcggggcgggtcgtcgttgttcgtagtcggggtcggggtcgggggttttcggggcgaagcggtttcgttagttcggttttttcgtttagtttcgcgtcgtcgttttttcgcgttttcgtattttttttatttttattttcgttttttttttttttgttttttagggacgtatcgagtatttggtgaaatggaaggggtgggcgattaagtgagtgtcgcggggttcgggggcgtcgcgggaggggaggtagcgggtatcggggtttggggtgggggtgcgcgtttttgttttcgtcgcgtgtttgtttttttttggtttttattttgattttgtgcgtttgtgattt

SEQ ID NO: 17960 - DNA, 978 bp, Artificial Sequence
  chemically treated genomic DNA (Homo sapiens) CpG-island No: 17960
aaatcacaaacgcacaaaatcaaaataaaaaccaaaaaaaaacaaacacgcgacgaaaacaaaaacgcgcacccccaccccaaaccccgatacccgctacctcccctcccgcgacgcccccgaaccccgcgacactcacttaatcgcccaccccttccatttcaccaaatactcgatacgtccctaaaaaacaaaaaaaaaaaaaacgaaaataaaaataaaaaaaatacgaaaacgcgaaaaaacgacgacgcgaaactaaacgaaaaaaccgaactaacgaaaccgcttcgccccgaaaacccccgaccccgaccccgactacgaacaacgacgacccgccccgaacgacgactcacctttcgaatccgccgtttaataataaattcgaccgcgaaaacccgctcgcccactacaaacaactccatcttactcaacgacacccacaacccataatactccctacgcccgcgaccgatacgacaccgctcgcgcacgcgccgcaacgcccaaaccccgacgaacgaaaacgcgacgaaacgcgcgctcgcgttccaactacgaaccgtcacgtaatcctcgcgactaacgcgcgattaccaaaacctccccctcccccgaaacgattactaaaaaaaatcgacgctcgcgaaacgaaaacgcgcgctaactcttaaaaaaaccgcgcgaacgaaaaaaacaattaccgaccgacccgataaatacccgacttataaacacgctacgaccttacgcttatcaccccccctcacatcttaccgacgcccgatcgctaacaccctctccttacctcttaatccccacgcgaatctcgccaaaccccgaacgaaaaaaaactataaaacccgaatctcgccgccaccgcgcatctcccgcaacaacctacaaacaattaaatataatacaacaaaaatacaattactattaccttaccaaaccttacgaaaatttctttaa

SEQ ID NO: 17961 - DNA, 1479 bp, Artificial Sequence
  chemically treated genomic DNA (Homo sapiens) CpG-island No: 17961
cgttatcgaatttttatttatttgttttttatttcgagtttaaacggttgttgtagttttttttttttcgtatcgttttcgtatttgcgtttttatagggtagacgatgtttggttgcgcggcgcggcgcggggcgaagaggcgaggattttgttcggcgtgtgggtgcgggggtgatgtgtggacgcgcgtgattgtgttagcggttcgagttggtcggtttcggagagggtgcgcgggggagttcgcgtgtgttagtcgcgggcgtgtgttaggcgcgggcgtgcgcgtgagggtgtgtgtacggtcgaggcggagcgttcgggcgggcggcggcggcggcggcggcggtaacggcggcggcgttaggattcgggggatatcgtttttcgtttttcgcgtttcgttttcgtttagtttttcgttttagttcgcgtcgcgtttcggtttggaacgtaggagcgtcggtttcgggagttcgagcggagttagtcgcgcgtatagttagcggtcgcgtcggcgatgcggggttatttcgcgttcgttttagtttcggtttcggttttcgcgggaaggggttgagttgttcgtcgtcgttcggatggcgagtttcgtcgcgttcgtttttagtttgtttttgaggttgtagttgtcgttattgttcggcgttcgggtttagagcgtcgtaggtgagtgcgttcgttcggtttttttgggtttttcgtttttttttggatgcgcgcgggtttttagtcgcggggttttcggaggagaaagttgtgtgggttcgcgggggcgcgggtttttatggtcggaattcgggttttagtttgtaggcgcgggaagtagtgttttcgcgcgtttcggttagcgagttcggtttttcgcgtttttcggtagttcgcgtttggcgaagtttttcgttttagttttttgtcggtttttcgggttggagtaatttttcgcggttgttgcgaatatttttatttgttgttttttatttgtcggaatttgttatttgagtgtttggggcggcgagacgaggagcggtatcgacgttcggggtggagcgttttttttcgggtagtttttcgggtagcgcgcgtttttagtggggaggataggtttttagtaggtcgaggttgtcggggcggcggtttttttttttttttcggagatataggaagttttttatttgttttgaatacgttgtttttttaagtaggtcgttgtaggtattcgaggggatgtttgcgttgatgatcgagagtaatattttcgttttattcgttggttttttttcgaggtagttgggcgttcgtgttaaggtttttggaggggagtggatttgattcgtgagcgcgttcgtttttgaaaagttcggggaatttatatttgggtttggttacgggaaggcggtgagtagaggtagttttttagagtagggggagcgggggcgggggggtggtgtttgtcgtg

SEQ ID NO: 17962 - DNA, 1479 bp, Artificial Sequence
  chemically treated genomic DNA (Homo sapiens) CpG-island No: 17962
cacgacaaacaccacccccccgcccccgctccccctactctaaaaaactacctctactcaccgccttcccgtaaccaaacccaaatataaattccccgaacttttcaaaaacgaacgcgctcacgaatcaaatccactcccctccaaaaaccttaacacgaacgcccaactacctcgaaaaaaaaccaacgaataaaacgaaaatattactctcgatcatcaacgcaaacatcccctcgaatacctacaacgacctacttaaaaaaacaacgtattcaaaacaaataaaaaacttcctatatctccgaaaaaaaaaaaaaaaccgccgccccgacaacctcgacctactaaaaacctatcctccccactaaaaacgcgcgctacccgaaaaactacccgaaaaaaaacgctccaccccgaacgtcgataccgctcctcgtctcgccgccccaaacactcaaataacaaattccgacaaataaaaaacaacaaataaaaatattcgcaacaaccgcgaaaaattactccaacccgaaaaaccgacaaaaaactaaaacgaaaaacttcgccaaacgcgaactaccgaaaaacgcgaaaaaccgaactcgctaaccgaaacgcgcgaaaacactacttcccgcgcctacaaactaaaacccgaattccgaccataaaaacccgcgcccccgcgaacccacacaactttctcctccgaaaaccccgcgactaaaaacccgcgcgcatccaaaaaaaaacgaaaaacccaaaaaaaccgaacgaacgcactcacctacgacgctctaaacccgaacgccgaacaataacgacaactacaacctcaaaaacaaactaaaaacgaacgcgacgaaactcgccatccgaacgacgacgaacaactcaaccccttcccgcgaaaaccgaaaccgaaactaaaacgaacgcgaaataaccccgcatcgccgacgcgaccgctaactatacgcgcgactaactccgctcgaactcccgaaaccgacgctcctacgttccaaaccgaaacgcgacgcgaactaaaacgaaaaactaaacgaaaacgaaacgcgaaaaacgaaaaacgatatcccccgaatcctaacgccgccgccgttaccgccgccgccgccgccgccgcccgcccgaacgctccgcctcgaccgtacacacaccctcacgcgcacgcccgcgcctaacacacgcccgcgactaacacacgcgaactcccccgcgcaccctctccgaaaccgaccaactcgaaccgctaacacaatcacgcgcgtccacacatcacccccgcacccacacgccgaacaaaatcctcgcctcttcgccccgcgccgcgccgcgcaaccaaacatcgtctaccctataaaaacgcaaatacgaaaacgatacgaaaaaaaaaaaactacaacaaccgtttaaactcgaaataaaaaacaaataaataaaaattcgataacg

SEQ ID NO: 17963 - DNA, 1479 bp, Artificial Sequence
  chemically treated genomic DNA (Homo sapiens) CpG-island No: 17963
tacggtaggtattattttttcgttttcgttttttttattttggggaattatttttgtttatcgttttttcgtggttaaatttaaatatgagtttttcgaattttttaggagcggacgcgtttacgggttaaatttatttttttttaagggttttaatacgggcgtttagttatttcggagaaaagttagcgggtagggcggaggtattgttttcggttattaacgtaaatattttttcgggtgtttatagcggtttgtttaggggagtagcgtgtttagagtaaatggagagttttttgtattttcgaggaaaaaagaaaagtcgtcgtttcggtagtttcggtttgttggggatttgttttttttattaaaagcgcgcgttgttcgaggagttgttcgggagagaacgttttatttcgggcgtcggtgtcgtttttcgtttcgtcgttttaaatatttaagtggtagatttcgataagtgggaggtagtaagtggaaatattcgtaataatcgcggaaagttattttagttcggggggtcggtaggaaattgaagcggggaatttcgttaaacgcgggttgtcgagggacgcgaggggtcgggttcgttggtcggggcgcgcggggatattgtttttcgcgtttgtaagttgagattcgggtttcggttatggggattcgcgttttcgcgagtttatataattttttttttcgagggtttcgcggttgggggttcgcgcgtatttaggagggagcggggagtttaggggagtcgggcgggcgtatttatttgcggcgttttgagttcgggcgtcgggtagtggcggtagttgtagttttaggagtaggttgagggcgagcgcggcgaggttcgttattcgggcggcggcgggtagtttagttttttttcgcgggggtcggggtcgggattggggcgggcgcggggtggtttcgtatcgtcggcgcggtcgttggttgtgcgcgcggttggtttcgttcgggttttcggagtcggcgtttttgcgttttaagtcgaggcgcggcgcgaattgaggcgggaggttgggcgggggcgggacgcggggggcggggggcggtgtttttcgagttttaacgtcgtcgtcgttgtcgtcgtcgtcgtcgtcgtcgttcgttcgggcgtttcgtttcggtcgtgtatatatttttacgcgtacgttcgcgtttggtatacgttcgcggttggtatacgcgggttttttcgcgtatttttttcggggtcgattagttcgggtcgttggtatagttacgcgcgtttatatattattttcgtatttatacgtcgggtagggttttcgttttttcgtttcgcgtcgcgtcgcgtagttaagtatcgtttgttttgtgggggcgtaggtacgggggcggtgcggggaggaggaagttgtagtagtcgtttgaattcggggtggggaataggtgaatgggggttcggtggcg

SEQ ID NO: 17964 - DNA, 1479 bp, Artificial Sequence
  chemically treated genomic DNA (Homo sapiens) CpG-island No: 17964
cgccaccgaacccccattcacctattccccaccccgaattcaaacgactactacaacttcctcctccccgcaccgcccccgtacctacgcccccacaaaacaaacgatacttaactacgcgacgcgacgcgaaacgaaaaaacgaaaaccctacccgacgtataaatacgaaaataatatataaacgcgcgtaactataccaacgacccgaactaatcgaccccgaaaaaaatacgcgaaaaaacccgcgtataccaaccgcgaacgtataccaaacgcgaacgtacgcgtaaaaatatatacacgaccgaaacgaaacgcccgaacgaacgacgacgacgacgacgacgacaacgacgacgacgttaaaactcgaaaaacaccgccccccgccccccgcgtcccgcccccgcccaacctcccgcctcaattcgcgccgcgcctcgacttaaaacgcaaaaacgccgactccgaaaacccgaacgaaaccaaccgcgcgcacaaccaacgaccgcgccgacgatacgaaaccaccccgcgcccgccccaatcccgaccccgacccccgcgaaaaaaaactaaactacccgccgccgcccgaataacgaacctcgccgcgctcgccctcaacctactcctaaaactacaactaccgccactacccgacgcccgaactcaaaacgccgcaaataaatacgcccgcccgactcccctaaactccccgctccctcctaaatacgcgcgaacccccaaccgcgaaaccctcgaaaaaaaaaattatataaactcgcgaaaacgcgaatccccataaccgaaacccgaatctcaacttacaaacgcgaaaaacaatatccccgcgcgccccgaccaacgaacccgacccctcgcgtccctcgacaacccgcgtttaacgaaattccccgcttcaatttcctaccgaccccccgaactaaaataactttccgcgattattacgaatatttccacttactacctcccacttatcgaaatctaccacttaaatatttaaaacgacgaaacgaaaaacgacaccgacgcccgaaataaaacgttctctcccgaacaactcctcgaacaacgcgcgcttttaataaaaaaaacaaatccccaacaaaccgaaactaccgaaacgacgacttttcttttttcctcgaaaatacaaaaaactctccatttactctaaacacgctactcccctaaacaaaccgctataaacacccgaaaaaatatttacgttaataaccgaaaacaatacctccgccctacccgctaacttttctccgaaataactaaacgcccgtattaaaacccttaaaaaaaaataaatttaacccgtaaacgcgtccgctcctaaaaaattcgaaaaactcatatttaaatttaaccacgaaaaaacgataaacaaaaataattccccaaaataaaaaaaacgaaaacgaaaaaataatacctaccgta

SEQ ID NO: 17965 - DNA, 594 bp, Artificial Sequence
  chemically treated genomic DNA (Homo sapiens) CpG-island No: 17965
tcgtagcgttcgtagtttggaagaggggaaagtggtcggagcgttatttttttttaagaatttagaaggggcggcggttaaattggaaggcggcgagttttatttttcgggtagtgaagttcgggtcggtttgttaatttagtaacgttttgaatgtagttttcggtttttttttttttttacgttttaatatcgttaggtacgcgggttggtttttgtttagcgtttcgggttggagcgtagaattcggtttttcgtttcggggtcggtttttttttcgttttgtcggtttagttcgttcgtttttaattaagcggtaggatcgtagcgagtcgtcgggacgtgttgtaatatgatgaattgtttttgtgcggatgttatcgaaagcgtttttgataaggcgaagttacgaaggattaaaagggcggtcgcggttcgttcgttttttatttttttttagtcgttgttcggttttgagtattcgttttttcggttcgtgttttttcgcgggttgtttttaggtttcgttggtttttttgattcgtttgttttagggttagtttttcggtgattttgtatttttttgtttttttt

SEQ ID NO: 17966 - DNA, 594 bp, Artificial Sequence
  chemically treated genomic DNA (Homo sapiens) CpG-island No: 17966
aaaaaaaacaaaaaaatacaaaatcaccgaaaaactaaccctaaaacaaacgaatcaaaaaaaccaacgaaacctaaaaacaacccgcgaaaaaacacgaaccgaaaaaacgaatactcaaaaccgaacaacgactaaaaaaaaataaaaaacgaacgaaccgcgaccgcccttttaatccttcgtaacttcgccttatcaaaaacgctttcgataacatccgcacaaaaacaattcatcatattacaacacgtcccgacgactcgctacgatcctaccgcttaattaaaaacgaacgaactaaaccgacaaaacgaaaaaaaaaccgaccccgaaacgaaaaaccgaattctacgctccaacccgaaacgctaaacaaaaaccaacccgcgtacctaacgatattaaaacgtaaaaaaaaaaaaaaaccgaaaactacattcaaaacgttactaaattaacaaaccgacccgaacttcactacccgaaaaataaaactcgccgccttccaatttaaccgccgccccttctaaattcttaaaaaaaaataacgctccgaccactttcccctcttccaaactacgaacgctacga

SEQ ID NO: 17967 - DNA, 594 bp, Artificial Sequence
  chemically treated genomic DNA (Homo sapiens) CpG-island No: 17967
aagaaagataaagagatgtagaattatcgagagattggttttgggataggcggattaggagagttagcgggatttagagatagttcgcgggagagtacgggtcgagagggcgagtgtttaaagtcgggtagcggttaggggaagataggaggcgggcgagtcgcggtcgtttttttgatttttcgtggtttcgttttattagaagcgttttcggtgatattcgtataaaggtagtttattatattatagtacgtttcggcggttcgttgcgattttgtcgtttaattagaggcgagcgagttgggtcggtagggcgggagggaggtcgatttcgaggcgggaggtcgggttttgcgttttaattcggggcgttgggtaggggttagttcgcgtgtttggcggtgttgggacgtggagagagggagaggtcgggaattgtatttagagcgttgttaaattaataggtcggttcgggttttattgttcggagagtgaagttcgtcgttttttaatttagtcgtcgttttttttaagtttttgggaagggatggcgtttcggttattttttttttttttaggttgcgaacgttgcgg

SEQ ID NO: 17968 - DNA, 594 bp, Artificial Sequence
  chemically treated genomic DNA (Homo sapiens) CpG-island No: 17968
ccgcaacgttcgcaacctaaaaaaaaaaaaaataaccgaaacgccatcccttcccaaaaacttaaaaaaaacgacgactaaattaaaaaacgacgaacttcactctccgaacaataaaacccgaaccgacctattaatttaacaacgctctaaatacaattcccgacctctccctctctccacgtcccaacaccgccaaacacgcgaactaacccctacccaacgccccgaattaaaacgcaaaacccgacctcccgcctcgaaatcgacctccctcccgccctaccgacccaactcgctcgcctctaattaaacgacaaaatcgcaacgaaccgccgaaacgtactataatataataaactacctttatacgaatatcaccgaaaacgcttctaataaaacgaaaccacgaaaaatcaaaaaaacgaccgcgactcgcccgcctcctatcttcccctaaccgctacccgactttaaacactcgccctctcgacccgtactctcccgcgaactatctctaaatcccgctaactctcctaatccgcctatcccaaaaccaatctctcgataattctacatctctttatctttctt

SEQ ID NO: 17969 - DNA, 511 bp, Artificial Sequence
  chemically treated genomic DNA (Homo sapiens) CpG-island No: 17969
ttataaataattgatcgacgtcgagagtagtagttaaaacgttagttcgggaggacgtatttttcgtagtattggggtagattaggcgcgtagtttcgtagtcgggttttttcgggatttataggtcgttcgtgttcggtttttatagcgtaaagaaggcgcgggtttcgtatttagtcggtattcggggtgcgtatcgagggggcgttgtcggtaaagtttgagcggtttttagttgtttcgtagtatgagagttttttcgttggagttttggtcgtttgtttcggcggcgggagcgaattattggttcgtatatcggagcgtgggaaaattcgggttggggtttcgtagtttagggaagttttttatttttgtcgtttaggatgtcgtcgatgttgtgtttggtttttttttcgtcgtcgtttttttttttgttcgttttatttttttttttttttttttcgaatttgattttgagtacgcggttaatcgaatttattaaattttagaa

SEQ ID NO: 17970 - DNA, 511 bp, Artificial Sequence
  chemically treated genomic DNA (Homo sapiens) CpG-island No: 17970
ttctaaaatttaataaattcgattaaccgcgtactcaaaatcaaattcgaaaaaaaaaaaaaaaaaaataaaacgaacaaaaaaaaaaacgacgacgaaaaaaaaaccaaacacaacatcgacgacatcctaaacgacaaaaataaaaaacttccctaaactacgaaaccccaacccgaattttcccacgctccgatatacgaaccaataattcgctcccgccgccgaaacaaacgaccaaaactccaacgaaaaaactctcatactacgaaacaactaaaaaccgctcaaactttaccgacaacgccccctcgatacgcaccccgaataccgactaaatacgaaacccgcgccttctttacgctataaaaaccgaacacgaacgacctataaatcccgaaaaaacccgactacgaaactacgcgcctaatctaccccaatactacgaaaaatacgtcctcccgaactaacgttttaactactactctcgacgtcgatcaattatttataa

SEQ ID NO: 17971 - DNA, 511 bp, Artificial Sequence
  chemically treated genomic DNA (Homo sapiens) CpG-island No: 17971
ttttgaggtttagtgagttcgattagtcgcgtgtttagaattaagttcgggaagaaagaggaggaggatgaagcggataagaaggaggacgacggcgaaaagaaggttaaatatagtatcgacggtattttgggcgataaaggtagggaatttttttgggttgcgaggttttagttcgggtttttttacgtttcggtgtgcgggttagtggttcgttttcgtcgtcggagtaggcgattagaattttagcggagaaatttttatgttgcggggtagttgggagtcgtttaggttttgtcgatagcgttttttcggtgcgtatttcggatgtcggttagatgcgaagttcgcgttttttttgcgttatggaggtcgggtacggacggtttgtgagtttcgggagagttcggttgcggggttgcgcgtttggtttattttaatattgcggggagtgcgttttttcgggttggcgttttggttgttattttcggcgtcgattaattatttatag

SEQ ID NO: 17972 - DNA, 511 bp, Artificial Sequence
  chemically treated genomic DNA (Homo sapiens) CpG-island No: 17972
ctataaataattaatcgacgccgaaaataacaaccaaaacgccaacccgaaaaaacgcactccccgcaatattaaaataaaccaaacgcgcaaccccgcaaccgaactctcccgaaactcacaaaccgtccgtacccgacctccataacgcaaaaaaaacgcgaacttcgcatctaaccgacatccgaaatacgcaccgaaaaaacgctatcgacaaaacctaaacgactcccaactaccccgcaacataaaaatttctccgctaaaattctaatcgcctactccgacgacgaaaacgaaccactaacccgcacaccgaaacgtaaaaaaacccgaactaaaacctcgcaacccaaaaaaattccctacctttatcgcccaaaataccgtcgatactatatttaaccttcttttcgccgtcgtcctccttcttatccgcttcatcctcctcctctttcttcccgaacttaattctaaacacgcgactaatcgaactcactaaacctcaaaa

SEQ ID NO: 17973 - DNA, 687 bp, Artificial Sequence
  chemically treated genomic DNA (Homo sapiens) CpG-island No: 17973
tacgaaggcgaagggtacgaggtcgtgtcggtttttgagttcgatttcgcggatgcggtcgtatttgtagaataggttttttaagtttttttcgcgtacgtcggtcggaaggttttttacgtagatgcgttcgtcgttttcgtcgtcgcgttcgttcgtttagttcgatattcgtatcgttcgacgtcgcgggttcgtcgtagtttacgtcgtcgtcgtcgttttagtacgggttttttcgtagcgttttcgcgggtttcgaggcgtttagtcgtattgtattgtgggaacgcggagcggaagcgaaggggtcggcggaggtaaaaggagtttttttaaagagaacgcggttgcgattattgcgcgtgcgcgtaggtcggcgttttttggaggtgcgaagggttttcgggcgttgatagggagagtttggggtcgggtcgtgtggatgttattttcgagcgcggttcgcgttcggttgaggcgttggataagtggtttgggttttcgcgttttagtttttttttgtggcgtcgtttattttatagatttgtgagtatttattgacgtgggtagcgtttagggtttgcggggcgtaggagagttggagttaggcggagatcgtaggttgatttcgtagcggtcgggttgtcgcggtttttattttaggttagtaggttttcgggttat

SEQ ID NO: 17974 - DNA, 687 bp, Artificial Sequence
  chemically treated genomic DNA (Homo sapiens) CpG-island No: 17974
ataacccgaaaacctactaacctaaaataaaaaccgcgacaacccgaccgctacgaaatcaacctacgatctccgcctaactccaactctcctacgccccgcaaaccctaaacgctacccacgtcaataaatactcacaaatctataaaataaacgacgccacaaaaaaaaactaaaacgcgaaaacccaaaccacttatccaacgcctcaaccgaacgcgaaccgcgctcgaaaataacatccacacgacccgaccccaaactctccctatcaacgcccgaaaacccttcgcacctccaaaaaacgccgacctacgcgcacgcgcaataatcgcaaccgcgttctctttaaaaaaactccttttacctccgccgaccccttcgcttccgctccgcgttcccacaatacaatacgactaaacgcctcgaaacccgcgaaaacgctacgaaaaaacccgtactaaaacgacgacgacgacgtaaactacgacgaacccgcgacgtcgaacgatacgaatatcgaactaaacgaacgaacgcgacgacgaaaacgacgaacgcatctacgtaaaaaaccttccgaccgacgtacgcgaaaaaaacttaaaaaacctattctacaaatacgaccgcatccgcgaaatcgaactcaaaaaccgacacgacctcgtacccttcgccttcgta

SEQ ID NO: 17975 - DNA, 687 bp, Artificial Sequence
  chemically treated genomic DNA (Homo sapiens) CpG-island No: 17975
gtggttcgggggtttattgatttgaggtgggggtcgcgatagttcggtcgttgcggggttagtttgcggttttcgtttgattttagtttttttgcgtttcgtaggttttgggcgttatttacgttagtgagtgtttataagtttgtgaggtaggcggcgttatagagagaaattgaggcgcgggagtttaagttatttgtttagcgttttagtcgagcgcgaatcgcgttcggggatggtatttatacggttcggttttaggttttttttgttagcgttcgaaggtttttcgtatttttagggggcgtcggtttgcgcgtacgcgtaatggtcgtagtcgcgttttttttaagaggattttttttgttttcgtcgattttttcgttttcgtttcgcgtttttataatgtagtgcggttgagcgtttcggagttcgcggggacgttgcggggggattcgtgttgaggcggcggcggcgacgtgggttgcggcgggttcgcggcgtcgggcggtgcggatgtcgggttgggcggacgagcgcggcggcgagggcgacgggcgtatttacgtggggaatttttcgatcgacgtgcgcgagaaggatttggaggatttgttttataagtacggtcgtattcgcgagatcgagtttaagaatcggtacggtttcgtgtttttcgttttcgtg

SEQ ID NO: 17976 - DNA, 687 bp, Artificial Sequence
  chemically treated genomic DNA (Homo sapiens) CpG-island No: 17976
cacgaaaacgaaaaacacgaaaccgtaccgattcttaaactcgatctcgcgaatacgaccgtacttataaaacaaatcctccaaatccttctcgcgcacgtcgatcgaaaaattccccacgtaaatacgcccgtcgccctcgccgccgcgctcgtccgcccaacccgacatccgcaccgcccgacgccgcgaacccgccgcaacccacgtcgccgccgccgcctcaacacgaatccccccgcaacgtccccgcgaactccgaaacgctcaaccgcactacattataaaaacgcgaaacgaaaacgaaaaaatcgacgaaaacaaaaaaaatcctcttaaaaaaaacgcgactacgaccattacgcgtacgcgcaaaccgacgccccctaaaaatacgaaaaaccttcgaacgctaacaaaaaaaacctaaaaccgaaccgtataaataccatccccgaacgcgattcgcgctcgactaaaacgctaaacaaataacttaaactcccgcgcctcaatttctctctataacgccgcctacctcacaaacttataaacactcactaacgtaaataacgcccaaaacctacgaaacgcaaaaaaactaaaatcaaacgaaaaccgcaaactaaccccgcaacgaccgaactatcgcgacccccacctcaaatcaataaacccccgaaccac

SEQ ID NO: 17977 - DNA, 736 bp, Artificial Sequence
  chemically treated genomic DNA (Homo sapiens) CpG-island No: 17977
gaggcgtcggcggaggacggggggagggcgtttttttaaggtcgtttttttcgtgtttcggtttttttcgcggtttatcgcggtatttgcgtttatcgtcgtcggagtttttatttgtagcgttggcgttttttttgatttagttcgttcgttttagcgaggtcgcggcgggggcgtgggagcgagtcgcgtcggtcggggtggggttgcgtttttagggttttcgggggatcgacgggttttgggagtcgggaacgaggaagaggcgggaggcggaagtgggggaggggcggtggcgggtttattcgttcgtagttcgttcggcggtcggaggtagtttttgcgagcgcggttattggtatttttaaggcggttaaaaagttattcgtatttatttttttttttttcgtttagtcggatttttttgtattattttcgttatcgacgtcggtgcgttagttttcgttcgttcggatgtatttgttgcgttttcgtttcgcgtagattcgcggcgggcgttcgcgtcggttttgtttacgtatatttgatgttttgcgttttttgggtagcgtttacgtaacgattacgtattcgaattttgttttcggtatttttggttatattcgttatatttatacgcgcgtatttttttagaggacgtacgatgggaaagagagagttgggattcgtaggagggggtagggtattgattcggtgtcgtttagtagggtaggtg

SEQ ID NO: 17978 - DNA, 736 bp, Artificial Sequence
  chemically treated genomic DNA (Homo sapiens) CpG-island No: 17978
cacctaccctactaaacgacaccgaatcaataccctaccccctcctacgaatcccaactctctctttcccatcgtacgtcctctaaaaaaatacgcgcgtataaatataacgaatataaccaaaaataccgaaaacaaaattcgaatacgtaatcgttacgtaaacgctacccaaaaaacgcaaaacatcaaatatacgtaaacaaaaccgacgcgaacgcccgccgcgaatctacgcgaaacgaaaacgcaacaaatacatccgaacgaacgaaaactaacgcaccgacgtcgataacgaaaataatacaaaaaaatccgactaaacgaaaaaaaaaaaaataaatacgaataactttttaaccgccttaaaaataccaataaccgcgctcgcaaaaactacctccgaccgccgaacgaactacgaacgaataaacccgccaccgcccctcccccacttccgcctcccgcctcttcctcgttcccgactcccaaaacccgtcgatcccccgaaaaccctaaaaacgcaaccccaccccgaccgacgcgactcgctcccacgcccccgccgcgacctcgctaaaacgaacgaactaaatcaaaaaaaacgccaacgctacaaataaaaactccgacgacgataaacgcaaataccgcgataaaccgcgaaaaaaaccgaaacacgaaaaaaacgaccttaaaaaaacgccctccccccgtcctccgccgacgcctc

SEQ ID NO: 17979 - DNA, 736 bp, Artificial Sequence
  chemically treated genomic DNA (Homo sapiens) CpG-island No: 17979
tatttgttttgttgggcggtatcgggttagtgttttgtttttttttgcgggttttaatttttttttttttatcgtgcgttttttggagaagtgcgcgcgtgtaagtgtggcgagtgtggttaagggtgtcggaggtagggttcgggtgcgtagtcgttgcgtgggcgttgtttaaaaggcgtagagtattaagtgtgcgtgggtagaatcggcgcgggcgttcgtcgcgggtttgcgcggggcgggggcgtagtaagtgtattcgagcgagcggagattagcgtatcggcgtcggtggcgagggtggtgtagaggagttcggttgggcggagggaggaaggatgggtgcgggtaattttttgatcgttttggaagtattagtagtcgcgttcgtaggggttgttttcgatcgtcgggcgagttgcgagcgagtgagttcgttatcgttttttttttattttcgtttttcgtttttttttcgttttcggtttttagggttcgtcggtttttcgggagttttggaggcgtagttttatttcggtcggcgcggttcgtttttacgttttcgtcgcggtttcgttggagcggacggattgagttagagggggcgttagcgttgtaggtaggggtttcggcggcggtgggcgtaggtgtcgcggtggatcgcggaggggatcggagtacgaggggaacggttttgggggagcgtttttttttcgtttttcgtcgacgtttt

SEQ ID NO: 17980 - DNA, 736 bp, Artificial Sequence
  chemically treated genomic DNA (Homo sapiens) CpG-island No: 17980
aaaacgtcgacgaaaaacgaaaaaaaaacgctcccccaaaaccgttcccctcgtactccgatcccctccgcgatccaccgcgacacctacgcccaccgccgccgaaacccctacctacaacgctaacgccccctctaactcaatccgtccgctccaacgaaaccgcgacgaaaacgtaaaaacgaaccgcgccgaccgaaataaaactacgcctccaaaactcccgaaaaaccgacgaaccctaaaaaccgaaaacgaaaaaaaaacgaaaaacgaaaataaaaaaaaaacgataacgaactcactcgctcgcaactcgcccgacgatcgaaaacaacccctacgaacgcgactactaatacttccaaaacgatcaaaaaattacccgcacccatccttcctccctccgcccaaccgaactcctctacaccaccctcgccaccgacgccgatacgctaatctccgctcgctcgaatacacttactacgcccccgccccgcgcaaacccgcgacgaacgcccgcgccgattctacccacgcacacttaatactctacgccttttaaacaacgcccacgcaacgactacgcacccgaaccctacctccgacacccttaaccacactcgccacacttacacgcgcgcacttctccaaaaaacgcacgataaaaaaaaaaaaattaaaacccgcaaaaaaaaacaaaacactaacccgataccgcccaacaaaacaaata

SEQ ID NO: 17981 - DNA, 596 bp, Artificial Sequence
  chemically treated genomic DNA (Homo sapiens) CpG-island No: 17981
ttggggtttttaatttcgcgggcgggcgtagtgtttcgtaggtttcgtttttattggggaatttcgggcggggtgcgggcggcggggcgggggcgggtcggggcggggtcggtaggtcgtttataagatgggtggcgcgttcgttcggggttattcgtcgtagtttgcgcgttttttttagttcgcggtgttatggttttcgttcgtttgttcgcgttgttgttgtttttcgtaggcggagtcgtcgagtcggtgggtgtttggaggttttcgggttgggggcgaagcgggggcgtaggtcggtgttttttttgttcgtcggagcgtgggatgggggggggtagatcgggggtacgttatttttaatcggatatcgaggttcgggaaattttgttggaaattttgtttcggggttacgggttagttttcgggatggttttacgcgtcgtgcgtttttcgtttgttgtttttttcgttttttcgggttttagtttcgtcgcgggttacgggttcgttagtgattaagtcggtgttaattttttaatttttatattttcgttttttttttggtgattttggggtaggtttggagcgtt

SEQ ID NO: 17982 - DNA, 596 bp, Artificial Sequence
  chemically treated genomic DNA (Homo sapiens) CpG-island No: 17982
aacgctccaaacctaccccaaaatcaccaaaaaaaaaacgaaaatataaaaattaaaaaattaacaccgacttaatcactaacgaacccgtaacccgcgacgaaactaaaacccgaaaaaacgaaaaaaacaacaaacgaaaaacgcacgacgcgtaaaaccatcccgaaaactaacccgtaaccccgaaacaaaatttccaacaaaatttcccgaacctcgatatccgattaaaaataacgtacccccgatctacccccccccatcccacgctccgacgaacaaaaaaaacaccgacctacgcccccgcttcgcccccaacccgaaaacctccaaacacccaccgactcgacgactccgcctacgaaaaacaacaacaacgcgaacaaacgaacgaaaaccataacaccgcgaactaaaaaaaacgcgcaaactacgacgaataaccccgaacgaacgcgccacccatcttataaacgacctaccgaccccgccccgacccgcccccgccccgccgcccgcaccccgcccgaaattccccaataaaaacgaaacctacgaaacactacgcccgcccgcgaaattaaaaaccccaa

SEQ ID NO: 17983 - DNA, 596 bp, Artificial Sequence
  chemically treated genomic DNA (Homo sapiens) CpG-island No: 17983
agcgttttaagtttgttttagggttattagggaagggacgagggtgtgggagttgaagagttgatatcggtttagttattaacgagttcgtagttcgcggcggggttgaggttcggggaggcgggaagagtaataggcgaggggcgtacggcgcgtgaagttatttcggaggttggttcgtgatttcggagtaaagtttttaataaagtttttcgggtttcggtgttcggttgggggtagcgtattttcgatttgtttttttttattttacgtttcgacgaataaaggaggtatcggtttgcgttttcgtttcgtttttagttcgggaatttttaagtatttatcgattcggcgatttcgtttacgaagaatagtagtagcgcgaatagacgggcgggggttatggtatcgcggattggagaaggcgcgtaggttgcggcgagtggtttcgggcgggcgcgttatttattttataggcggtttatcggtttcgtttcggttcgttttcgtttcgtcgttcgtatttcgttcggaattttttagtggaagcgaggtttgcggggtattgcgttcgttcgcggagttggaaattttaa

SEQ ID NO: 17984 - DNA, 596 bp, Artificial Sequence
  chemically treated genomic DNA (Homo sapiens) CpG-island No: 17984
ttaaaatttccaactccgcgaacgaacgcaataccccgcaaacctcgcttccactaaaaaattccgaacgaaatacgaacgacgaaacgaaaacgaaccgaaacgaaaccgataaaccgcctataaaataaataacgcgcccgcccgaaaccactcgccgcaacctacgcgccttctccaatccgcgataccataacccccgcccgtctattcgcgctactactattcttcgtaaacgaaatcgccgaatcgataaatacttaaaaattcccgaactaaaaacgaaacgaaaacgcaaaccgatacctcctttattcgtcgaaacgtaaaataaaaaaaaacaaatcgaaaatacgctacccccaaccgaacaccgaaacccgaaaaactttattaaaaactttactccgaaatcacgaaccaacctccgaaataacttcacgcgccgtacgcccctcgcctattactcttcccgcctccccgaacctcaaccccgccgcgaactacgaactcgttaataactaaaccgatatcaactcttcaactcccacaccctcgtcccttccctaataaccctaaaacaaacttaaaacgct

SEQ ID NO: 17985 - DNA, 547 bp, Artificial Sequence
  chemically treated genomic DNA (Homo sapiens) CpG-island No: 17985
tcgagttcgagattatgcggtagttttttatgggtttttttcgaggtttgaacgtgggttttaacgttacgcgcgttggcgtgatttagtattcgagttaagtgtagagcgtttttttttttcgcgcgttttttcgtcgcgaggatatggagcgcgttattcgcgatttggtgtttttggcgtaaggtattatgacgggattggtaatttagtacgttatgaacgtggtttttagtgtggtcgagggcgcgcgatcgttagaggagcgcgtgtcgcgtgtcgttgttatcgtgatagacgggcggttttaggatcgcgtggtcgaggtggcggtataggcgcgcgttcgcggtattgaaatttacgcggtgggggtgtagcgcgcggacgtgggttttttgcgcgttatggtatcgttttcgttagacgagtacgtttttttcgtagagtttttcgattttatttaggagttcggtttgtagttttagagtcggttgtgtggtgagttaggagggcgttggagtgaagttcgaatttttaatttaaa

SEQ ID NO: 17986 - DNA, 547 bp, Artificial Sequence
  chemically treated genomic DNA (Homo sapiens) CpG-island No: 17986
tttaaattaaaaattcgaacttcactccaacgccctcctaactcaccacacaaccgactctaaaactacaaaccgaactcctaaataaaatcgaaaaactctacgaaaaaaacgtactcgtctaacgaaaacgataccataacgcgcaaaaaacccacgtccgcgcgctacacccccaccgcgtaaatttcaataccgcgaacgcgcgcctataccgccacctcgaccacgcgatcctaaaaccgcccgtctatcacgataacaacgacacgcgacacgcgctcctctaacgatcgcgcgccctcgaccacactaaaaaccacgttcataacgtactaaattaccaatcccgtcataataccttacgccaaaaacaccaaatcgcgaataacgcgctccatatcctcgcgacgaaaaaacgcgcgaaaaaaaaaaacgctctacacttaactcgaatactaaatcacgccaacgcgcgtaacgttaaaacccacgttcaaacctcgaaaaaaacccataaaaaactaccgcataatctcgaactcga

SEQ ID NO: 17987 - DNA, 547 bp, Artificial Sequence
  chemically treated genomic DNA (Homo sapiens) CpG-island No: 17987
tttggattgagagttcgagttttattttagcgtttttttaatttattatatagtcggttttggaattgtaggtcgaatttttggatgaggtcgaaggattttacgaggaagacgtgttcgtttagcgggggcgatgttatggcgcgtagggagtttacgttcgcgcgttgtatttttatcgcgtaaattttaatgtcgcgggcgcgcgtttgtgtcgttatttcggttacgcggttttggggtcgttcgtttgttacgatgatagcgatacgcggtacgcgtttttttggcggtcgcgcgttttcggttatattgaaggttacgtttatggcgtattggattgttagtttcgttatggtgttttgcgttagaggtattaggtcgcggatggcgcgttttatgttttcgcggcgagagaacgcgcggagagggaagacgttttgtatttgattcgaatattggattacgttaacgcgcgtggcgttgggatttacgtttaggtttcggaggaggtttatgaggaattgtcgtatggtttcgaattcga

SEQ ID NO: 17988 - DNA, 547 bp, Artificial Sequence
  chemically treated genomic DNA (Homo sapiens) CpG-island No: 17988
tcgaattcgaaaccatacgacaattcctcataaacctcctccgaaacctaaacgtaaatcccaacgccacgcgcgttaacgtaatccaatattcgaatcaaatacaaaacgtcttccctctccgcgcgttctctcgccgcgaaaacataaaacgcgccatccgcgacctaatacctctaacgcaaaacaccataacgaaactaacaatccaatacgccataaacgtaaccttcaatataaccgaaaacgcgcgaccgccaaaaaaacgcgtaccgcgtatcgctatcatcgtaacaaacgaacgaccccaaaaccgcgtaaccgaaataacgacacaaacgcgcgcccgcgacattaaaatttacgcgataaaaatacaacgcgcgaacgtaaactccctacgcgccataacatcgcccccgctaaacgaacacgtcttcctcgtaaaatccttcgacctcatccaaaaattcgacctacaattccaaaaccgactatataataaattaaaaaaacgctaaaataaaactcgaactctcaatccaaa

SEQ ID NO: 17989 - DNA, 561 bp, Artificial Sequence
  chemically treated genomic DNA (Homo sapiens) CpG-island No: 17989
taggttggcgttgggaattttcgcgtcggttattttttttttcggtggtagaggtcgggcggggtagcgtatgcgcgtggcgggtaggcggtaggaggcgggtgggttaaggtaattttgggttatagagtttttgttgggggttcggggagcgtttggatttcggtttttgggacgcgttaggtacgttttcgagttcggcgtcgtcggttagcgttgtttgggtttattcgggggttcgagttgagtaggacgttcgggtttcgtttggagagaggttttaggagggtttggggaaggggacggaggtcgggcgatttcgggcggtggtcgtttttttttgtgtgttttcgcggttgtgaattggggcggtaattttttttcgtaggtcgtcgtgaagatgattgtatgagatcgtgcgtgtgaacgtttgttgatagttgttatttgagttcgatagttttgggggtcgtgtatttgcgtaatatggttatttttgaattttttgggggatacgtatatttttgagaattcgatgaaaattagagatttcgtttttgt

SEQ ID NO: 17990 - DNA, 561 bp, Artificial Sequence
  chemically treated genomic DNA (Homo sapiens) CpG-island No: 17990
acaaaaacgaaatctctaattttcatcgaattctcaaaaatatacgtatcccccaaaaaattcaaaaataaccatattacgcaaatacacgacccccaaaactatcgaactcaaataacaactatcaacaaacgttcacacgcacgatctcatacaatcatcttcacgacgacctacgaaaaaaaattaccgccccaattcacaaccgcgaaaacacacaaaaaaaaacgaccaccgcccgaaatcgcccgacctccgtccccttccccaaaccctcctaaaacctctctccaaacgaaacccgaacgtcctactcaactcgaacccccgaataaacccaaacaacgctaaccgacgacgccgaactcgaaaacgtacctaacgcgtcccaaaaaccgaaatccaaacgctccccgaacccccaacaaaaactctataacccaaaattaccttaacccacccgcctcctaccgcctacccgccacgcgcatacgctaccccgcccgacctctaccaccgaaaaaaaaaataaccgacgcgaaaattcccaacgccaaccta

SEQ ID NO: 17991 - DNA, 561 bp, Artificial Sequence
  chemically treated genomic DNA (Homo sapiens) CpG-island No: 17991
ataagggcggaatttttggtttttatcggatttttaaagatatacgtgttttttaaggagtttagaggtagttatgttacgtagatgtacggtttttagggttgtcggatttaagtaatagttgttaataaacgtttatacgtacgattttatgtaattatttttacggcgatttacggggaggaattatcgttttaatttataatcgcggagatatatagaggagggcggttatcgttcggggtcgttcggttttcgtttttttttttaggtttttttgaagtttttttttaggcgaggttcggacgttttatttagttcgggttttcgagtgaatttaggtagcgttggtcggcgacgtcggattcggagacgtatttgacgcgttttagaagtcggggtttaagcgtttttcgaatttttagtaaggattttgtagtttagagttattttgatttattcgttttttgtcgtttgttcgttacgcgtatgcgttgtttcgttcggtttttattatcgaggaaaggggtaatcggcgcgggggtttttagcgttagtttg

SEQ ID NO: 17992 - DNA, 561 bp, Artificial Sequence
  chemically treated genomic DNA (Homo sapiens) CpG-island No: 17992
caaactaacgctaaaaacccccgcgccgattacccctttcctcgataataaaaaccgaacgaaacaacgcatacgcgtaacgaacaaacgacaaaaaacgaataaatcaaaataactctaaactacaaaatccttactaaaaattcgaaaaacgcttaaaccccgacttctaaaacgcgtcaaatacgtctccgaatccgacgtcgccgaccaacgctacctaaattcactcgaaaacccgaactaaataaaacgtccgaacctcgcctaaaaaaaaacttcaaaaaaacctaaaaaaaaaaacgaaaaccgaacgaccccgaacgataaccgccctcctctatatatctccgcgattataaattaaaacgataattcctccccgtaaatcgccgtaaaaataattacataaaatcgtacgtataaacgtttattaacaactattacttaaatccgacaaccctaaaaaccgtacatctacgtaacataactacctctaaactccttaaaaaacacgtatatctttaaaaatccgataaaaaccaaaaattccgcccttat

SEQ ID NO: 17993 - DNA, 1141 bp, Artificial Sequence
  chemically treated genomic DNA (Homo sapiens) CpG-island No: 17993
cgagtcgagtagttagcgcgggtcggtaggcgtgggatcgcgagtcgcgcgggggtttcgggggtagttttttattttttcgggtacggtggggttcgtagggcgcggttttttcggaaggcgcggattttagttttttggtcgcggttttgcggaggaggagataatttcggttagcggcgagcgggcgcgggaagtgagcggcggggtcggtttttgttcgagggaaggtttcgcgcggcgaagggttggttcgcgaggggtggggtcggatagttagtttcgcgttttcgggttcgcgtttattcggttcgtagtttttatataaattttttcgttcgttacgtgagcgtaggtttagacgttttttcgtcgcgttttcggtcgtagattttagggtcgtcgggattgttcgtcgttggcggtttttttatcgtagtcggtcgttatttggagtgcgcgtcgttaattgggtcgtgcgggcgggcgcgcgtatttgagttcgacgttagcggttttcgttcggcgcgtgtttcggaaacgttttttcgcgtcgtttttattttttttagtcgtggcgttacgtttgacgtaagtttgacgttatcggtatcggtttgggagtcgtagacgtcgggcgtgtaggggcgtagtttaacggttggggtgttgtaaaggtcgtgggtgtggggttgcgggttgcgtatttcggcggcggtcggtagggttggggtttagtcgtttcgttcggcgcggtttttggcggggcggtttgagggagttttatttggacgttagtttgtttttttttcgggcgtgggcgttgtttcggggcggtagttaggttagcggttgtagttcgcggtttttagtattttttttttttttgtgtcgggtttttcggtcgaacgttttcgttttttttgcgttgattgttttatgtgtggttaacgcgcggtttattaggggggattttgaagtatttgattcggtcgggcgtaaattgttttggttagtgggttcgatcgtgtcgtattgtttagggagcgttaagggtaggtgtttcgttgggagttatattttaagtggaaaggagaattttgttgtagttttttggtgtcgtatttcggtttattatata

SEQ ID NO: 17994 - DNA, 1141 bp, Artificial Sequence
  chemically treated genomic DNA (Homo sapiens) CpG-island No: 17994
tatataataaaccgaaatacgacaccaaaaaactacaacaaaattctcctttccacttaaaatataactcccaacgaaacacctacccttaacgctccctaaacaatacgacacgatcgaacccactaaccaaaacaatttacgcccgaccgaatcaaatacttcaaaatcccccctaataaaccgcgcgttaaccacacataaaacaatcaacgcaaaaaaaacgaaaacgttcgaccgaaaaacccgacacaaaaaaaaaaaaaatactaaaaaccgcgaactacaaccgctaacctaactaccgccccgaaacaacgcccacgcccgaaaaaaaaacaaactaacgtccaaataaaactccctcaaaccgccccgccaaaaaccgcgccgaacgaaacgactaaaccccaaccctaccgaccgccgccgaaatacgcaacccgcaaccccacacccacgacctttacaacaccccaaccgttaaactacgcccctacacgcccgacgtctacgactcccaaaccgataccgataacgtcaaacttacgtcaaacgtaacgccacgactaaaaaaaataaaaacgacgcgaaaaaacgtttccgaaacacgcgccgaacgaaaaccgctaacgtcgaactcaaatacgcgcgcccgcccgcacgacccaattaacgacgcgcactccaaataacgaccgactacgataaaaaaaccgccaacgacgaacaatcccgacgaccctaaaatctacgaccgaaaacgcgacgaaaaaacgtctaaacctacgctcacgtaacgaacgaaaaaatttatataaaaactacgaaccgaataaacgcgaacccgaaaacgcgaaactaactatccgaccccacccctcgcgaaccaacccttcgccgcgcgaaaccttccctcgaacaaaaaccgaccccgccgctcacttcccgcgcccgctcgccgctaaccgaaattatctcctcctccgcaaaaccgcgaccaaaaaactaaaatccgcgccttccgaaaaaaccgcgccctacgaaccccaccgtacccgaaaaaataaaaaactacccccgaaacccccgcgcgactcgcgatcccacgcctaccgacccgcgctaactactcgactcg

SEQ ID NO: 17995 - DNA, 1141 bp, Artificial Sequence
  chemically treated genomic DNA (Homo sapiens) CpG-island No: 17995
tgtgtagtgaatcgaaatgcgatattaaggaattgtaataggatttttttttttatttgaaatgtgatttttagcgagatatttatttttgacgttttttggatagtgcggtacggtcgggtttattaattaaggtaatttgcgttcgatcgaattaggtgttttaaaattttttttggtgagtcgcgcgttaattatatataaaatagttaacgtagaaggagcgagaacgttcggtcgaaaagttcggtatagagaagggaggggtgttgaaagtcgcggattgtagtcgttggtttggttgtcgtttcgaaataacgtttacgttcgggagaagggtaggttggcgtttaggtaggatttttttaggtcgtttcgttaggggtcgcgtcgagcggagcggttggattttaattttgtcggtcgtcgtcgaggtgcgtagttcgtagttttatatttacggtttttgtaatattttaatcgttgaattgcgtttttatacgttcggcgtttgcggtttttaggtcggtgtcgatgacgttagatttacgttaggcgtgacgttacggttgggaggagtgaggacggcgcgggagggcgttttcggagtacgcgtcgggcgggggtcgttgacgtcgggtttaggtgcgcgcgttcgttcgtacggtttagttggcggcgcgtattttaggtggcggtcggttgcggtgaggggatcgttagcggcgagtagtttcggcggttttggggtttgcggtcgggggcgcggcgggagggcgtttgggtttgcgtttacgtgacgggcggggaggtttgtgtaggggttgcgagtcgggtgggcgcgggttcgggagcgcgaggttgattgttcggttttatttttcgcgggttagtttttcgtcgcgcggaattttttttcgggtaggggtcggtttcgtcgtttatttttcgcgttcgttcgtcgttgatcggagttgttttttttttcgtagggtcgcggttagagggttagaattcgcgtttttcgagggagtcgcgttttgcgggttttatcgtattcgaggggatggagggttgttttcgaggttttcgcgcggttcgcggttttacgtttgtcggttcgcgttagttattcgattcg

SEQ ID NO: 17996 - DNA, 1141 bp, Artificial Sequence
  chemically treated genomic DNA (Homo sapiens) CpG-island No: 17996
cgaatcgaataactaacgcgaaccgacaaacgtaaaaccgcgaaccgcgcgaaaacctcgaaaacaaccctccatcccctcgaatacgataaaacccgcaaaacgcgactccctcgaaaaacgcgaattctaaccctctaaccgcgaccctacgaaaaaaaaaacaactccgatcaacgacgaacgaacgcgaaaaataaacgacgaaaccgacccctacccgaaaaaaaattccgcgcgacgaaaaactaacccgcgaaaaataaaaccgaacaatcaacctcgcgctcccgaacccgcgcccacccgactcgcaacccctacacaaacctccccgcccgtcacgtaaacgcaaacccaaacgccctcccgccgcgcccccgaccgcaaaccccaaaaccgccgaaactactcgccgctaacgatcccctcaccgcaaccgaccgccacctaaaatacgcgccgccaactaaaccgtacgaacgaacgcgcgcacctaaacccgacgtcaacgacccccgcccgacgcgtactccgaaaacgccctcccgcgccgtcctcactcctcccaaccgtaacgtcacgcctaacgtaaatctaacgtcatcgacaccgacctaaaaaccgcaaacgccgaacgtataaaaacgcaattcaacgattaaaatattacaaaaaccgtaaatataaaactacgaactacgcacctcgacgacgaccgacaaaattaaaatccaaccgctccgctcgacgcgacccctaacgaaacgacctaaaaaaatcctacctaaacgccaacctacccttctcccgaacgtaaacgttatttcgaaacgacaaccaaaccaacgactacaatccgcgactttcaacacccctcccttctctataccgaacttttcgaccgaacgttctcgctccttctacgttaactattttatatataattaacgcgcgactcaccaaaaaaaattttaaaacacctaattcgatcgaacgcaaattaccttaattaataaacccgaccgtaccgcactatccaaaaaacgtcaaaaataaatatctcgctaaaaatcacatttcaaataaaaaaaaaaatcctattacaattccttaatatcgcatttcgattcactacaca

SEQ ID NO: 17997 - DNA, 811 bp, Artificial Sequence
  chemically treated genomic DNA (Homo sapiens) CpG-island No: 17997
aaagatggcgacggagcgtagtcgtttcgcgatggattcgtcggtttcggtttttatgttcgttttcgagtttagtttttcgggggcggttagggtcgcggcggtcgtcgttcgattttacggcggttttgattcggattgtagcgaggacggcgaggcgtttaacggcgagttagagttggattttattagtaaggtaggttcgggcggcggcggcgggcgttgaggggagcgggcggttggtcgagtagtttttcgggcgacggcggggttagcggtcgttttgttcgcggggagcgcggaacgggaagaaggggtcgagttcgtttatttgttagttttcgggacgtgcgggggttcgcggcgcgaggggtcgtttttatggttttcgtatttattttggttttttcgcgtcgttaatttagtttttcgttttttcgtttttcgtcgagatcgtaatttttcggttttgttacgtggaacgggggcgttcgatgttagttgcgtttcgcgcgttttttgttttcgtttagtgttttttttcgtttttcgggtttttatttgaggggattcggagatcgagagttttttttttttggatcgcgcgggatagtagaggggcgagggggttcgggtagggggtcgagacgtttatgaagataggtagtcggaggttagggtagggtggtcgtcgcgtttttttttagattcgggaaaggaaatagaaagtagtcgtttagttggggaggagtatgttcgagaatgtttatttttcgaggttattcgaaataaaatggaaagatggttaggt

SEQ ID NO: 17998 - DNA, 811 bp, Artificial Sequence
  chemically treated genomic DNA (Homo sapiens) CpG-island No: 17998
acctaaccatctttccattttatttcgaataacctcgaaaaataaacattctcgaacatactcctccccaactaaacgactactttctatttcctttcccgaatctaaaaaaaaacgcgacgaccaccctaccctaacctccgactacctatcttcataaacgtctcgaccccctacccgaaccccctcgcccctctactatcccgcgcgatccaaaaaaaaaaaactctcgatctccgaatcccctcaaataaaaacccgaaaaacgaaaaaaaacactaaacgaaaacaaaaaacgcgcgaaacgcaactaacatcgaacgcccccgttccacgtaacaaaaccgaaaaattacgatctcgacgaaaaacgaaaaaacgaaaaactaaattaacgacgcgaaaaaaccaaaataaatacgaaaaccataaaaacgacccctcgcgccgcgaacccccgcacgtcccgaaaactaacaaataaacgaactcgaccccttcttcccgttccgcgctccccgcgaacaaaacgaccgctaaccccgccgtcgcccgaaaaactactcgaccaaccgcccgctcccctcaacgcccgccgccgccgcccgaacctaccttactaataaaatccaactctaactcgccgttaaacgcctcgccgtcctcgctacaatccgaatcaaaaccgccgtaaaatcgaacgacgaccgccgcgaccctaaccgcccccgaaaaactaaactcgaaaacgaacataaaaaccgaaaccgacgaatccatcgcgaaacgactacgctccgtcgccatcttt

SEQ ID NO: 17999 - DNA, 811 bp, Artificial Sequence
  chemically treated genomic DNA (Homo sapiens) CpG-island No: 17999
gtttgattatttttttattttgtttcgggtggtttcgaaaagtagatattttcggatatgtttttttttagttgagcgattattttttgttttttttttcgagtttgggaagagacgcggcggttattttgttttggttttcgattatttgtttttatgagcgtttcggttttttgttcgggttttttcgtttttttgttgtttcgcgcggtttagggagaggagattttcggttttcgaatttttttaagtggggattcgaagaacggggaggggtattgagcggggatagggaacgcgcggagcgtagttggtatcgggcgttttcgttttacgtggtagagtcgaggggttacgatttcggcgggagacgggagggcgggaggttgggttggcgacgcgggggagttaaggtgggtgcggggattatggggacggtttttcgcgtcgcgaattttcgtacgtttcggagattagtaggtgggcgggttcggtttttttttttcgtttcgcgtttttcgcggatagggcggtcgttggtttcgtcgtcgttcgggagattgttcggttagtcgttcgttttttttagcgttcgtcgtcgtcgttcgggtttattttgttggtgaggtttagttttggttcgtcgttgagcgtttcgtcgttttcgttgtagttcgagttaaagtcgtcgtggagtcgggcggcggtcgtcgcggttttggtcgttttcggggagttgggttcgggggcgaatatagaggtcgggatcggcgagtttatcgcggagcgattgcgtttcgtcgttattttt

SEQ ID NO: 18000 - DNA, 811 bp, Artificial Sequence
  chemically treated genomic DNA (Homo sapiens) CpG-island No: 18000
aaaaataacgacgaaacgcaatcgctccgcgataaactcgccgatcccgacctctatattcgcccccgaacccaactccccgaaaacgaccaaaaccgcgacgaccgccgcccgactccacgacgactttaactcgaactacaacgaaaacgacgaaacgctcaacgacgaaccaaaactaaacctcaccaacaaaataaacccgaacgacgacgacgaacgctaaaaaaaacgaacgactaaccgaacaatctcccgaacgacgacgaaaccaacgaccgccctatccgcgaaaaacgcgaaacgaaaaaaaaaaaccgaacccgcccacctactaatctccgaaacgtacgaaaattcgcgacgcgaaaaaccgtccccataatccccgcacccaccttaactcccccgcgtcgccaacccaacctcccgccctcccgtctcccgccgaaatcgtaacccctcgactctaccacgtaaaacgaaaacgcccgataccaactacgctccgcgcgttccctatccccgctcaatacccctccccgttcttcgaatccccacttaaaaaaattcgaaaaccgaaaatctcctctccctaaaccgcgcgaaacaacaaaaaaacgaaaaaacccgaacaaaaaaccgaaacgctcataaaaacaaataatcgaaaaccaaaacaaaataaccgccgcgtctcttcccaaactcgaaaaaaaaaacaaaaaataatcgctcaactaaaaaaaaacatatccgaaaatatctacttttcgaaaccacccgaaacaaaataaaaaaataatcaaac

SEQ ID NO: 18001 - DNA, 812 bp, Artificial Sequence
  chemically treated genomic DNA (Homo sapiens) CpG-island No: 18001
ttcgggaagtttcgttcgtagatatcgttttttcggttgattagtggcgcggtaggcggggcgggggttaggaggtgagttagggcgcgggtcgcggattcgggtggaggttggattcggtttagtacgtttcggagaggaggaagtaggtttggcggcgcggtttcgttcgagtggttcgacggtgattcggggttaggtcgggtcgcggttttttaatttttttttgagttcgttcgtatttatttgttgtcgcggcggtttttagttcggtcgggggcgttcgaggttaggtcgtcgtcggggcgcgtttttttttcgcgtggggatttcgcgggcggcgtttcgtttagggcgatatagcggtcgggttcggggcgcgcgggtacgcgaagagcggcgacgcgggataaggcgggcgggcggataatgcggtcggcggaggttcgcgttgcgcgagtggggtcgggcggcgcgcgtgtggtcgattttgtatgtgtgcgtttgttagttaacgttgataggtcgtagtttattggttaggtttcgtcggtcgttatcgtttatcgtcgttatttattggtcggtttgaatataaagtttcggttcgtttcgttttcgcgtgggtttcgttgttttgcgcgtttagtttaggagttcgcgcgtgggaggcgttgggcgggcggggatttcgggttgcgggaggacgcgacgggagtttgtgttggggttcgggtttagtagggtattggattttcgatttggcggtttagaatatttgagatagttttgagcgtttttacgcgcgtttg

SEQ ID NO: 18002 - DNA, 812 bp, Artificial Sequence
  chemically treated genomic DNA (Homo sapiens) CpG-island No: 18002
caaacgcgcgtaaaaacgctcaaaactatctcaaatattctaaaccgccaaatcgaaaatccaataccctactaaacccgaaccccaacacaaactcccgtcgcgtcctcccgcaacccgaaatccccgcccgcccaacgcctcccacgcgcgaactcctaaactaaacgcgcaaaacaacgaaacccacgcgaaaacgaaacgaaccgaaactttatattcaaaccgaccaataaataacgacgataaacgataacgaccgacgaaacctaaccaataaactacgacctatcaacgttaactaacaaacgcacacatacaaaatcgaccacacgcgcgccgcccgaccccactcgcgcaacgcgaacctccgccgaccgcattatccgcccgcccgccttatcccgcgtcgccgctcttcgcgtacccgcgcgccccgaacccgaccgctatatcgccctaaacgaaacgccgcccgcgaaatccccacgcgaaaaaaaaacgcgccccgacgacgacctaacctcgaacgcccccgaccgaactaaaaaccgccgcgacaacaaataaatacgaacgaactcaaaaaaaaattaaaaaaccgcgacccgacctaaccccgaatcaccgtcgaaccactcgaacgaaaccgcgccgccaaacctacttcctcctctccgaaacgtactaaaccgaatccaacctccacccgaatccgcgacccgcgccctaactcacctcctaacccccgccccgcctaccgcgccactaatcaaccgaaaaaacgatatctacgaacgaaacttcccgaa

SEQ ID NO: 18003 - DNA, 812 bp, Artificial Sequence
  chemically treated genomic DNA (Homo sapiens) CpG-island No: 18003
taggcgcgcgtgggagcgtttagagttgttttaggtgttttgagtcgttagatcgggagtttagtgttttgttgagttcgagttttagtataggttttcgtcgcgttttttcgtagttcggggttttcgttcgtttagcgttttttacgcgcggatttttaggttgagcgcgtagggtagcggggtttacgcgagggcggggcgagtcggggttttgtgtttaaatcggttaatgggtggcggcggtgggcggtgacggtcggcggggtttgattaatgggttgcggtttgttagcgttgattgataggcgtatatatatagagtcggttatacgcgcgtcgttcggttttattcgcgtagcgcgggttttcgtcggtcgtattgttcgttcgttcgttttgtttcgcgtcgtcgtttttcgcgtgttcgcgcgtttcgggttcggtcgttgtgtcgttttgagcggagcgtcgttcgcgggatttttacgcggaaagggggcgcgtttcggcggcggtttggtttcggacgttttcggtcgggttagaagtcgtcgcggtagtaggtgagtgcgggcgagtttaggagagggttggggggtcgcggttcggtttgatttcgggttatcgtcgggttattcgggcggggtcgcgtcgttaggtttgttttttttttttcgggacgtgttgggtcggatttagtttttattcgggttcgcggttcgcgttttgatttattttttggttttcgtttcgtttgtcgcgttattggttagtcgggagggcggtgtttgcgggcgggatttttcggg

SEQ ID NO: 18004 - DNA, 812 bp, Artificial Sequence
  chemically treated genomic DNA (Homo sapiens) CpG-island No: 18004
cccgaaaaatcccgcccgcaaacaccgccctcccgactaaccaataacgcgacaaacgaaacgaaaaccaaaaaataaatcaaaacgcgaaccgcgaacccgaataaaaactaaatccgacccaacacgtcccgaaaaaaaaaaaacaaacctaacgacgcgaccccgcccgaataacccgacgataacccgaaatcaaaccgaaccgcgaccccccaaccctctcctaaactcgcccgcactcacctactaccgcgacgacttctaacccgaccgaaaacgtccgaaaccaaaccgccgccgaaacgcgccccctttccgcgtaaaaatcccgcgaacgacgctccgctcaaaacgacacaacgaccgaacccgaaacgcgcgaacacgcgaaaaacgacgacgcgaaacaaaacgaacgaacgaacaatacgaccgacgaaaacccgcgctacgcgaataaaaccgaacgacgcgcgtataaccgactctatatatatacgcctatcaatcaacgctaacaaaccgcaacccattaatcaaaccccgccgaccgtcaccgcccaccgccgccacccattaaccgatttaaacacaaaaccccgactcgccccgccctcgcgtaaaccccgctaccctacgcgctcaacctaaaaatccgcgcgtaaaaaacgctaaacgaacgaaaaccccgaactacgaaaaaacgcgacgaaaacctatactaaaactcgaactcaacaaaacactaaactcccgatctaacgactcaaaacacctaaaacaactctaaacgctcccacgcgcgccta

SEQ ID NO: 18005 - DNA, 643 bp, Artificial Sequence
  chemically treated genomic DNA (Homo sapiens) CpG-island No: 18005
cgttttacggtagcgggtttcgttttcgtgcgttatcgagggcgggaaggaggcgtgcggtacgagttagttagttcgcgttattatttttggttttgcgttttgttattggtcgagagtcgggcggcgcggcgcggtcgtaaggcgtggtcgggtgtcgtgaggcgggttttcgggttggttcgtcgtcggttgtcggggggttggtcggggtgttattggttttgggaagcggtagtagaggtagggattattcggggtttggtgtcggtatagttatggcgggcgcgttggtgcggaaagcggcggattatgttcgaagtaaggattttcgggattattttatgaggtgacgagcgtcgtaggtcgaatttcgtaattcggaggggttttcgggaggttgcgattcgtgtagttcgcgacgagggcggtcgcgaggacgcggtggtttcgggtagcgggtgggtcggggtttaggcgagagggtgcgtttgttaggggggttttattcggatttttttcggatcgttatatttcgaagcggacggcgtagagagtcggtgatagtgggcgttttttagggcgggggtgatagtgggcgttttttagggcgggggtgatagtgggtgttttttttcggtag

SEQ ID NO: 18006 - DNA, 643 bp, Artificial Sequence
  chemically treated genomic DNA (Homo sapiens) CpG-island No: 18006
ctaccgaaaaaaaacacccactatcacccccgccctaaaaaacgcccactatcacccccgccctaaaaaacgcccactatcaccgactctctacgccgtccgcttcgaaatataacgatccgaaaaaaatccgaataaaacccccctaacaaacgcaccctctcgcctaaaccccgacccacccgctacccgaaaccaccgcgtcctcgcgaccgccctcgtcgcgaactacacgaatcgcaacctcccgaaaacccctccgaattacgaaattcgacctacgacgctcgtcacctcataaaataatcccgaaaatccttacttcgaacataatccgccgctttccgcaccaacgcgcccgccataactataccgacaccaaaccccgaataatccctacctctactaccgcttcccaaaaccaataacaccccgaccaaccccccgacaaccgacgacgaaccaacccgaaaacccgcctcacgacacccgaccacgccttacgaccgcgccgcgccgcccgactctcgaccaataacaaaacgcaaaaccaaaaataataacgcgaactaactaactcgtaccgcacgcctccttcccgccctcgataacgcacgaaaacgaaacccgctaccgtaaaacg

SEQ ID NO: 18007 - DNA, 643 bp, Artificial Sequence
  chemically treated genomic DNA (Homo sapiens) CpG-island No: 18007
ttgtcgggagaggatatttattgttattttcgttttgaggggcgtttattgttattttcgttttgaaaggcgtttattgttatcggttttttacgtcgttcgtttcggggtgtggcggttcgggagggattcgggtggggtttttttgataagcgtattttttcgtttgggtttcggtttattcgttgttcggggttatcgcgttttcgcggtcgttttcgtcgcggattgtacgggtcgtagtttttcgggagttttttcgggttgcggggttcggtttgcggcgttcgttattttatgaggtagtttcggaaatttttgtttcggatatagttcgtcgtttttcgtattaacgcgttcgttatggttgtgtcgatattagatttcgagtggtttttgtttttgttgtcgttttttagagttaatgatatttcggttaatttttcggtagtcgacggcgagttagttcgaaggttcgttttacgatattcggttacgttttacggtcgcgtcgcgtcgttcggttttcggttaatgatagggcgtagggttagagatggtggcgcggattggttggttcgtgtcgtacgtttttttttcgttttcggtggcgtacgggggcggggttcgttgtcgtaaaacg

SEQ ID NO: 18008 - DNA, 643 bp, Artificial Sequence
  chemically treated genomic DNA (Homo sapiens) CpG-island No: 18008
cgttttacgacaacgaaccccgcccccgtacgccaccgaaaacgaaaaaaaaacgtacgacacgaaccaaccaatccgcgccaccatctctaaccctacgccctatcattaaccgaaaaccgaacgacgcgacgcgaccgtaaaacgtaaccgaatatcgtaaaacgaaccttcgaactaactcgccgtcgactaccgaaaaattaaccgaaatatcattaactctaaaaaacgacaacaaaaacaaaaaccactcgaaatctaatatcgacacaaccataacgaacgcgttaatacgaaaaacgacgaactatatccgaaacaaaaatttccgaaactacctcataaaataacgaacgccgcaaaccgaaccccgcaacccgaaaaaactcccgaaaaactacgacccgtacaatccgcgacgaaaacgaccgcgaaaacgcgataaccccgaacaacgaataaaccgaaacccaaacgaaaaaatacgcttatcaaaaaaaccccacccgaatccctcccgaaccgccacaccccgaaacgaacgacgtaaaaaaccgataacaataaacgcctttcaaaacgaaaataacaataaacgcccctcaaaacgaaaataacaataaatatcctctcccgacaa

SEQ ID NO: 18009 - DNA, 557 bp, Artificial Sequence
  chemically treated genomic DNA (Homo sapiens) CpG-island No: 18009
acgtttatcgtttgtgttatttaatttttataaggacgtttattcgtggttttatgattttacggtttcgtaaattttcgttatttttttcgtttttttttttttcgattaaaattattattattttattttttcgtttattttattgtcgatagtttgaaattttaggggcggatgataatagttagtgtgaacgaagcgttatttttcgggttagtcgagtattttcgttttttatagttttttgggaacgtgaagttaaagtaatgcgtacgcgtagtggttttgaaggcggggtaataaagtttgtggtcgatgtggcgtttttcggttcgcgttttagtggttatgatagtgttcgttttaaggggagaaggaatgtgtgattatttttaacggtaagtcgtataaaaggttcggggaggcgtatttgggcggcgagaggcgagagaatttcgcgcgggttttttagtgtttaggtttttgtcggtttcgaagtcgaaatttttttttttatttcgtttttttgtagtggacgtggggtgtttttatttttt

SEQ ID NO: 18010 - DNA, 557 bp, Artificial Sequence
  chemically treated genomic DNA (Homo sapiens) CpG-island No: 18010
aaaaaataaaaacaccccacgtccactacaaaaaaacgaaataaaaaaaaaaatttcgacttcgaaaccgacaaaaacctaaacactaaaaaacccgcgcgaaattctctcgcctctcgccgcccaaatacgcctccccgaaccttttatacgacttaccgttaaaaataatcacacattccttctccccttaaaacgaacactatcataaccactaaaacgcgaaccgaaaaacgccacatcgaccacaaactttattaccccgccttcaaaaccactacgcgtacgcattactttaacttcacgttcccaaaaaactataaaaaacgaaaatactcgactaacccgaaaaataacgcttcgttcacactaactattatcatccgcccctaaaatttcaaactatcgacaataaaataaacgaaaaaataaaataataataattttaatcgaaaaaaaaaaaaacgaaaaaaataacgaaaatttacgaaaccgtaaaatcataaaaccacgaataaacgtccttataaaaattaaataacacaaacgataaacgt

SEQ ID NO: 18011 - DNA, 557 bp, Artificial Sequence
  chemically treated genomic DNA (Homo sapiens) CpG-island No: 18011
gaggggtgggaatattttacgtttattgtaagagaacgaagtggaagaagggatttcggtttcggagtcggtaggggtttgggtattggaaagttcgcgcggagttttttcgtttttcgtcgtttaggtacgttttttcggattttttgtacgatttatcgttggaaatggttatatattttttttttttttagagcgaatattgttataattattgaagcgcgggtcgaggagcgttatatcggttataggttttgttgtttcgtttttaaagttattgcgcgtgcgtattgttttgattttacgtttttagggggttgtgggaagcggaaatgttcggttgattcggagggtggcgtttcgtttatattggttgttgttattcgtttttgaggttttaggttgtcggtagtgaagtaagcgggagggtgaggtggtgatggttttgatcgggggaaggggggacgggaggaatgacgggagtttacggggtcgtggggttatggggttacgggtgagcgtttttgtggggattgagtgatataggcggtgggcgt

SEQ ID NO: 18012 - DNA, 557 bp, Artificial Sequence
  chemically treated genomic DNA (Homo sapiens) CpG-island No: 18012
acgcccaccgcctatatcactcaatccccacaaaaacgctcacccgtaaccccataaccccacgaccccgtaaactcccgtcattcctcccgtccccccttcccccgatcaaaaccatcaccacctcaccctcccgcttacttcactaccgacaacctaaaacctcaaaaacgaataacaacaaccaatataaacgaaacgccaccctccgaatcaaccgaacatttccgcttcccacaaccccctaaaaacgtaaaatcaaaacaatacgcacgcgcaataactttaaaaacgaaacaacaaaacctataaccgatataacgctcctcgacccgcgcttcaataattataacaatattcgctctaaaaaaaaaaaaaatatataaccatttccaacgataaatcgtacaaaaaatccgaaaaaacgtacctaaacgacgaaaaacgaaaaaactccgcgcgaactttccaatacccaaacccctaccgactccgaaaccgaaatcccttcttccacttcgttctcttacaataaacgtaaaatattcccacccctc

SEQ ID NO: 18013 - DNA, 1791 bp, Artificial Sequence
  chemically treated genomic DNA (Homo sapiens) CpG-island No: 18013
aggcggggcgggcggttgttaagtcggttaataggcggtttttcggttgttaagtcgagagggtaggggcgtcgttagtagtattatcgttttttaagtttttttttgtggatgcgcggtttcgcggttttgtttttttcggcgtagaggggtcgggagaggttataggagcggatttggtacgggatttttgaggaacgggagaagattggcgttcgattcgttttggagggtcggtgaacgatgaagggtcggcggcggcgacgtcgagagtattgtaagttcgcgttgttgttggtgttgtatacgttggtgttgttgttcgtttttttcgtattggacggcggtcgcgacggggataagggcgtcgagtattgtttcggtttgtagcgtagtttgggagtgtggagtttggaggcggcggcggtcggcgaacgcgagtagggagcggaggcgcgggtcgtcgaggaagggggcgcgaattagttttttcggtttttaagtaattttagcggcgttgtcggggaggtagtgtttcgcgagaagtagtatatttacgtgtatgttatttggcgtatcggttcgttttttttgggcgaattttttaattagtattcggacgttttttatttgtatgagtttatgtggtatttatggtaggcgttgtattcgggcgacgtcgagagtttgtagggcgcgttgcgcgatatgttgcgttcgttttttcgttgcgattttttcgtgttgcggttgtacgcgtcgtcgggggatttcgttgcgcgcgtttcggatacggttaattttattacggtcgttttttttcgttggcggattaataaggttatttgttcgtcgttattgtgttttggcgtatttcgtgttcgggtcgaggtgggtttcgtcgaggatatcgtttgcgagcgtagttgtttattcgtggcgatacgcgttttggaggtcgagtgtcgaaagtattcggtggtggttattaaggacgtgcgtttgttcgatttgggcgtgttggtgtttttgttgcgtgatttaggttttaatttgaaggtggtgtagttttttcgcgattcgagggcggtgtataattcgcgttttaagtttaggtagggattgttgcgcgagagtatttaggtgttgcgtattcgttagaggggcgatcgtttttatcgtgtgttgttggcgtacggcgtgggtgttcgtttcgggggttagtttcgcgcgttgttcgtcgcgtcgcgcgtcgatttttttttgatcggtgcgttcgaggtgatttgcgaagtttggttgcgcgatttgtttttcgcgcgcggcgcgttcgtttggttgcggcgtcgttatttgaggttgcgttatgaggatttggtgcggtagttacgcgtttagttgcgtcgtttgttgcgttttttcgggttacgcgcgttcgtagcgttcgatgttttcgcgtttaatatgattcgcggcgcggtttacggcgtcgatcggtttttttatttgttagcgcgcgacgttcgggaggcggtgtacgtttggcgcgagcgtttgagtcgagagtaggtgcgttaggtggaggtcgtttgcgttttagttatgcgtttgttcgtttattttcgtagcggagaggagggcgacgcggagtagtttagggaaggggagacgtcgttggagatggatgtcgacggcgttacgtagttttttatttttgttttcggtacggattcgggtaaggtggttcggggtaaggtagggatcgggattggtttttcgggagtttggaat

SEQ ID NO: 18014 - DNA, 1791 bp, Artificial Sequence
  chemically treated genomic DNA (Homo sapiens) CpG-island No: 18014
attccaaactcccgaaaaaccaatcccgatccctaccttaccccgaaccaccttacccgaatccgtaccgaaaacaaaaataaaaaactacgtaacgccgtcgacatccatctccaacgacgtctccccttccctaaactactccgcgtcgccctcctctccgctacgaaaataaacgaacaaacgcataactaaaacgcaaacgacctccacctaacgcacctactctcgactcaaacgctcgcgccaaacgtacaccgcctcccgaacgtcgcgcgctaacaaataaaaaaaccgatcgacgccgtaaaccgcgccgcgaatcatattaaacgcgaaaacatcgaacgctacgaacgcgcgtaacccgaaaaaacgcaacaaacgacgcaactaaacgcgtaactaccgcaccaaatcctcataacgcaacctcaaataacgacgccgcaaccaaacgaacgcgccgcgcgcgaaaaacaaatcgcgcaaccaaacttcgcaaatcacctcgaacgcaccgatcaaaaaaaaatcgacgcgcgacgcgacgaacaacgcgcgaaactaacccccgaaacgaacacccacgccgtacgccaacaacacacgataaaaacgatcgcccctctaacgaatacgcaacacctaaatactctcgcgcaacaatccctacctaaacttaaaacgcgaattatacaccgccctcgaatcgcgaaaaaactacaccaccttcaaattaaaacctaaatcacgcaacaaaaacaccaacacgcccaaatcgaacaaacgcacgtccttaataaccaccaccgaatactttcgacactcgacctccaaaacgcgtatcgccacgaataaacaactacgctcgcaaacgatatcctcgacgaaacccacctcgacccgaacacgaaatacgccaaaacacaataacgacgaacaaataaccttattaatccgccaacgaaaaaaaacgaccgtaataaaattaaccgtatccgaaacgcgcgcaacgaaatcccccgacgacgcgtacaaccgcaacacgaaaaaatcgcaacgaaaaaacgaacgcaacatatcgcgcaacgcgccctacaaactctcgacgtcgcccgaatacaacgcctaccataaataccacataaactcatacaaataaaaaacgtccgaatactaattaaaaaattcgcccaaaaaaaacgaaccgatacgccaaataacatacacgtaaatatactacttctcgcgaaacactacctccccgacaacgccgctaaaattacttaaaaaccgaaaaaactaattcgcgcccccttcctcgacgacccgcgcctccgctccctactcgcgttcgccgaccgccgccgcctccaaactccacactcccaaactacgctacaaaccgaaacaatactcgacgcccttatccccgtcgcgaccgccgtccaatacgaaaaaaacgaacaacaacaccaacgtatacaacaccaacaacaacgcgaacttacaatactctcgacgtcgccgccgccgacccttcatcgttcaccgaccctccaaaacgaatcgaacgccaatcttctcccgttcctcaaaaatcccgtaccaaatccgctcctataacctctcccgacccctctacgccgaaaaaaacaaaaccgcgaaaccgcgcatccacaaaaaaaaacttaaaaaacgataatactactaacgacgcccctaccctctcgacttaacaaccgaaaaaccgcctattaaccgacttaacaaccgcccgccccgcct

SEQ ID NO: 18015 - DNA, 1791 bp, Artificial Sequence
  chemically treated genomic DNA (Homo sapiens) CpG-island No: 18015
attttaggttttcggaagattagtttcggtttttgttttgtttcgggttattttattcggattcgtgtcggggatagggatgggaggttacgtggcgtcgtcggtatttatttttagcggcgtttttttttttttgggttgtttcgcgtcgttttttttttcgttgcgagggtaggcgagtagacgtatggttggagcgtaggcggtttttatttggcgtatttgttttcggtttaggcgttcgcgttaggcgtgtatcgtttttcgggcgtcgcgcgttgataggtggaagggtcggtcggcgtcgtaggtcgcgtcgcgagttatgttgagcgcgaaggtatcgagcgttgcgagcgcgcgtagttcggagaagcgtagtaggcggcgtagttgggcgcgtggttgtcgtattaggtttttatagcgtagttttaggtagcggcgtcgtagttaggcgggcgcgtcgcgcgcgaaaagtagatcgcgtagttaggtttcgtagattatttcgagcgtatcggttaggaagaaatcggcgcgcggcgcggcgggtagcgcgcgagattggttttcggggcgagtatttacgtcgtgcgttagtagtatacggtggaagcggtcgtttttttggcgggtgcgtagtatttggatgttttcgcgtagtagtttttgtttagatttgaggcgcgagttgtgtatcgttttcgggtcgcggaaaagttgtattatttttaggttgaggtttggattacgtaataggggtattagtacgtttagatcgagtaggcgtacgtttttgatgattattatcgggtattttcggtattcggtttttagggcgcgtatcgttacgggtgggtagttgcgttcgtaggcggtgttttcgacgaggtttatttcggttcgggtacggggtgcgttaggatatagtggcggcgagtagatgattttgttagttcgttagcggaagagggcggtcgtggtaagattggtcgtgttcggggcgcgcgtagcggggtttttcggcggcgcgtatagtcgtagtacggagaagtcgtagcggaagagcgaacgtagtatgtcgcgtagcgcgttttgtaagttttcggcgtcgttcggatatagcgtttgttatagatgttatatgggtttatataagtagaaaacgttcgggtgttggttaaagagttcgtttaggaaggacgagtcggtgcgttaggtggtatgtacgtagatgtgttgtttttcgcgagatattgttttttcgatagcgtcgttgaggttgtttgggaatcgaggagattggttcgcgttttttttttcggcggttcgcgttttcgttttttgttcgcgttcgtcggtcgtcgtcgtttttaggttttatatttttaggttgcgttgtaggtcggggtagtgttcggcgtttttgttttcgtcgcggtcgtcgtttaatacggaggggacgagtaatagtattagcgtgtatagtattaatagtagcgcgaatttgtagtattttcggcgtcgtcgtcgtcggttttttatcgtttatcgattttttagagcgggtcgggcgttagttttttttcgttttttagaaatttcgtgttaggttcgtttttgtggtttttttcggtttttttgcgtcgggaggagtagagtcgcggggtcgcgtatttataaggggaaatttggaaggcggtggtgttattgacggcgtttttgttttttcggtttagtagtcggagagtcgtttattggtcggtttggtagtcgttcgtttcgttt

SEQ ID NO: 18016 - DNA, 1791 bp, Artificial Sequence
  chemically treated genomic DNA (Homo sapiens) CpG-island No: 18016
aaacgaaacgaacgactaccaaaccgaccaataaacgactctccgactactaaaccgaaaaaacaaaaacgccgtcaataacaccaccgccttccaaatttccccttataaatacgcgaccccgcgactctactcctcccgacgcaaaaaaaccgaaaaaaaccacaaaaacgaacctaacacgaaatttctaaaaaacgaaaaaaaactaacgcccgacccgctctaaaaaatcgataaacgataaaaaaccgacgacgacgacgccgaaaatactacaaattcgcgctactattaatactatacacgctaatactattactcgtcccctccgtattaaacgacgaccgcgacgaaaacaaaaacgccgaacactaccccgacctacaacgcaacctaaaaatataaaacctaaaaacgacgacgaccgacgaacgcgaacaaaaaacgaaaacgcgaaccgccgaaaaaaaaaacgcgaaccaatctcctcgattcccaaacaacctcaacgacgctatcgaaaaaacaatatctcgcgaaaaacaacacatctacgtacataccacctaacgcaccgactcgtccttcctaaacgaactctttaaccaacacccgaacgttttctacttatataaacccatataacatctataacaaacgctatatccgaacgacgccgaaaacttacaaaacgcgctacgcgacatactacgttcgctcttccgctacgacttctccgtactacgactatacgcgccgccgaaaaaccccgctacgcgcgccccgaacacgaccaatcttaccacgaccgccctcttccgctaacgaactaacaaaatcatctactcgccgccactatatcctaacgcaccccgtacccgaaccgaaataaacctcgtcgaaaacaccgcctacgaacgcaactacccacccgtaacgatacgcgccctaaaaaccgaataccgaaaatacccgataataatcatcaaaaacgtacgcctactcgatctaaacgtactaatacccctattacgtaatccaaacctcaacctaaaaataatacaacttttccgcgacccgaaaacgatacacaactcgcgcctcaaatctaaacaaaaactactacgcgaaaacatccaaatactacgcacccgccaaaaaaacgaccgcttccaccgtatactactaacgcacgacgtaaatactcgccccgaaaaccaatctcgcgcgctacccgccgcgccgcgcgccgatttcttcctaaccgatacgctcgaaataatctacgaaacctaactacgcgatctacttttcgcgcgcgacgcgcccgcctaactacgacgccgctacctaaaactacgctataaaaacctaatacgacaaccacgcgcccaactacgccgcctactacgcttctccgaactacgcgcgctcgcaacgctcgataccttcgcgctcaacataactcgcgacgcgacctacgacgccgaccgacccttccacctatcaacgcgcgacgcccgaaaaacgatacacgcctaacgcgaacgcctaaaccgaaaacaaatacgccaaataaaaaccgcctacgctccaaccatacgtctactcgcctaccctcgcaacgaaaaaaaaaacgacgcgaaacaacccaaaaaaaaaaaaacgccgctaaaaataaataccgacgacgccacgtaacctcccatccctatccccgacacgaatccgaataaaataacccgaaacaaaacaaaaaccgaaactaatcttccgaaaacctaaaat

SEQ ID NO: 18017 - DNA, 882 bp, Artificial Sequence
  chemically treated genomic DNA (Homo sapiens) CpG-island No: 18017
gttgtatacgtttgattcggttatttgtttattcgattattaagcgaaatatcgtatcgagcgagtacgtattcggatggaagtcggttttgtcgattaggatgatttggacgaagagtattaggggttcgcgttagtcgaattgttcgttaggtttaaggcgcgtatgttcgacggcgaggatttcgtcgtgatttatggcgatgtttgtttgtcgaatattatggtggaaaatggtcgtttttttggatttatcgattgtggtcggttgggtgtggcggatcgttattaggatatagcgttggttattcgtgatattgttgaagagtttggcggcgaatgggttgatcgttttttcgtgttttacggtatcgtcgttttcgaattttaatttaaagttaataaaagtttgtatgacgatagttttatattagaatattttcgttcgaaatgatcgattatgcgacgtttaatttgttattacgagatttcgattttatcgtcgttttttatgaaaggttgggtttcggaatcgtttttcgggacgtcggttggatgattttttagcgcggggattttatgttggagtttttcgtttaatttaggttcgattttttcgcgagttggtttatttgttgtttgaggttggacgatttcgcggagttttatcggtagtgtaaattcgtcggtatttaggaaattagtagcggttattcgcgtatttatgttttcgaattgtaggagtggggaggtacgatggtcgttttggtcggattaattcgcgcgatcgatcgattcgggtaacgttgttgttattgttgtaggggggggggggggggggggggggggggatttttattgtttattttacggataaaaata

SEQ ID NO: 18018 - DNA, 882 bp, Artificial Sequence
  chemically treated genomic DNA (Homo sapiens) CpG-island No: 18018
tatttttatccgtaaaataaacaataaaaatcccccccccccccccccccccccccccctacaacaataacaacaacgttacccgaatcgatcgatcgcgcgaattaatccgaccaaaacgaccatcgtacctccccactcctacaattcgaaaacataaatacgcgaataaccgctactaatttcctaaataccgacgaatttacactaccgataaaactccgcgaaatcgtccaacctcaaacaacaaataaaccaactcgcgaaaaaatcgaacctaaattaaacgaaaaactccaacataaaatccccgcgctaaaaaatcatccaaccgacgtcccgaaaaacgattccgaaacccaacctttcataaaaaacgacgataaaatcgaaatctcgtaataacaaattaaacgtcgcataatcgatcatttcgaacgaaaatattctaatataaaactatcgtcatacaaacttttattaactttaaattaaaattcgaaaacgacgataccgtaaaacacgaaaaaacgatcaacccattcgccgccaaactcttcaacaatatcacgaataaccaacgctatatcctaataacgatccgccacacccaaccgaccacaatcgataaatccaaaaaaacgaccattttccaccataatattcgacaaacaaacatcgccataaatcacgacgaaatcctcgccgtcgaacatacgcgccttaaacctaacgaacaattcgactaacgcgaacccctaatactcttcgtccaaatcatcctaatcgacaaaaccgacttccatccgaatacgtactcgctcgatacgatatttcgcttaataatcgaataaacaaataaccgaatcaaacgtatacaac

SEQ ID NO: 18019 - DNA, 882 bp, Artificial Sequence
  chemically treated genomic DNA (Homo sapiens) CpG-island No: 18019
tgtttttgttcgtggaatgaataatggaagttttttttttttttttttttttttttttttgtagtaatggtaataacgttgttcggatcgatcggtcgcgcgaattgattcgattaaagcggttatcgtgtttttttatttttgtagttcgggggtatggatgcgcggatagtcgttgttggttttttggatgtcgacggatttgtattgtcggtagaatttcgcgaggtcgtttagttttaggtagtagatgaattaattcgcgaggggatcgagtttgggttgggcgaagaattttagtatgagattttcgcgttggaggattatttagtcggcgtttcggaaaacgatttcgaagtttaattttttatagaaggcggcggtggaatcgaaatttcgtgatggtaggttgggcgtcgtatggtcggttatttcgaacgggggtgttttggtgtggagttgtcgttatgtaggtttttgttggttttgggttggggttcgggagcggcgatatcgtaaagtacgaggaagcggttagtttattcgtcgttaagttttttagtaatattacgggtagttaacgttatgttttgatagcggttcgttatatttagtcggttatagtcgatgaatttagaaaagcggttattttttattatgatattcggtaagtaggtatcgttatgggttacgacgagattttcgtcgtcgggtatgcgcgttttgagtttggcgaatagttcggttggcgcgagtttttgatgtttttcgtttagattattttgatcgataagatcggtttttattcgagtacgtgttcgttcgatgcgatgtttcgtttggtggtcgaatgggtaggtagtcggattaagcgtatgtagt

SEQ ID NO: 18020 - DNA, 882 bp, Artificial Sequence
  chemically treated genomic DNA (Homo sapiens) CpG-island No: 18020
actacatacgcttaatccgactacctacccattcgaccaccaaacgaaacatcgcatcgaacgaacacgtactcgaataaaaaccgatcttatcgatcaaaataatctaaacgaaaaacatcaaaaactcgcgccaaccgaactattcgccaaactcaaaacgcgcatacccgacgacgaaaatctcgtcgtaacccataacgatacctacttaccgaatatcataataaaaaataaccgcttttctaaattcatcgactataaccgactaaatataacgaaccgctatcaaaacataacgttaactacccgtaatattactaaaaaacttaacgacgaataaactaaccgcttcctcgtactttacgatatcgccgctcccgaaccccaacccaaaaccaacaaaaacctacataacgacaactccacaccaaaacacccccgttcgaaataaccgaccatacgacgcccaacctaccatcacgaaatttcgattccaccgccgccttctataaaaaattaaacttcgaaatcgttttccgaaacgccgactaaataatcctccaacgcgaaaatctcatactaaaattcttcgcccaacccaaactcgatcccctcgcgaattaattcatctactacctaaaactaaacgacctcgcgaaattctaccgacaatacaaatccgtcgacatccaaaaaaccaacaacgactatccgcgcatccatacccccgaactacaaaaataaaaaaacacgataaccgctttaatcgaatcaattcgcgcgaccgatcgatccgaacaacgttattaccattactacaaaaaaaaaaaaaaaaaaaaaaaaaaaaaacttccattattcattccacgaacaaaaaca

SEQ ID NO: 18021 - DNA, 1027 bp, Artificial Sequence
  chemically treated genomic DNA (Homo sapiens) CpG-island No: 18021
cgttcggggtgcgagaggtcgttttcggggaggggcgggattcgggcggggcgggaggggcggggcgttcgggtttattaggtttcgcgtcggtagtcgggtcgtagatacgaagtttttcgggtggtttatagacgttgttagtatcgtcgtcgttaggtgagtgttttcgattttgttgtcgttcgttgtttcgtttagttcgagttcggcggttagcgtttaggtcgcggttcgggtgtcgagcggttggaagtgtggggagtcgtgtttaggttttatcgttttagtaagtcgttggcggggcgacgtttcgggatttcggtttcgaaacgtattttttttgttcggggttttaggttttcgacgggcgatcgtgttaggcgcggtttttgcgggttttagttttcgcgtttgtgtaatggggtggtttttttgcgtttcgtcgcgacggttggacgttttatcgtcgtcgtatagttttttagtgcggttttcgggtattcggtttcgaattttggggtcgtgcggattcggttagatcgtagcgcggtaacgttagtttacggtcgcggtcgtatagtttcggtgtttttaaaagagggaagatggcgtcgtgttcggtgtcgtcgggatcggttttcggaggcgttgcgtatttgaggaagggtcgaggaaaggtttcgtaacgggacgtttagaaagttcggaataggaacgtgtatacggagcggcgcgtagtcgttcgttttcgtttgtttacgcgttttgtataggtgcgttttagattgggcggggattagagttcggttggggtatgcgattttgtttggtaaattggaggtgcgtttttgcgggtgattcgcgagggggtttttcgtttgcggggcgcggttacgataaggtttgtggggttcggagttggtcgtcgtttgggttttggttttttaaatgcgatcgtttttaagttttttattgttaattttgttagaatgagttattcgtggggtaggacgtggttgttgat

SEQ ID NO: 18022 - DNA, 1027 bp, Artificial Sequence
  chemically treated genomic DNA (Homo sapiens) CpG-island No: 18022
atcaacaaccacgtcctaccccacgaataactcattctaacaaaattaacaataaaaaacttaaaaacgatcgcatttaaaaaaccaaaacccaaacgacgaccaactccgaaccccacaaaccttatcgtaaccgcgccccgcaaacgaaaaaccccctcgcgaatcacccgcaaaaacgcacctccaatttaccaaacaaaatcgcataccccaaccgaactctaatccccgcccaatctaaaacgcacctatacaaaacgcgtaaacaaacgaaaacgaacgactacgcgccgctccgtatacacgttcctattccgaactttctaaacgtcccgttacgaaacctttcctcgacccttcctcaaatacgcaacgcctccgaaaaccgatcccgacgacaccgaacacgacgccatcttccctcttttaaaaacaccgaaactatacgaccgcgaccgtaaactaacgttaccgcgctacgatctaaccgaatccgcacgaccccaaaattcgaaaccgaatacccgaaaaccgcactaaaaaactatacgacgacgataaaacgtccaaccgtcgcgacgaaacgcaaaaaaaccaccccattacacaaacgcgaaaactaaaacccgcaaaaaccgcgcctaacacgatcgcccgtcgaaaacctaaaaccccgaacaaaaaaaatacgtttcgaaaccgaaatcccgaaacgtcgccccgccaacgacttactaaaacgataaaacctaaacacgactccccacacttccaaccgctcgacacccgaaccgcgacctaaacgctaaccgccgaactcgaactaaacgaaacaacgaacgacaacaaaatcgaaaacactcacctaacgacgacgatactaacaacgtctataaaccacccgaaaaacttcgtatctacgacccgactaccgacgcgaaacctaataaacccgaacgccccgcccctcccgccccgcccgaatcccgcccctccccgaaaacgacctctcgcaccccgaacg

SEQ ID NO: 18023 - DNA, 1027 bp, Artificial Sequence
  chemically treated genomic DNA (Homo sapiens) CpG-island No: 18023
attaataattacgttttattttacgagtggtttattttagtaaaattgataatgaagggtttgaaagcgatcgtatttaggaggttagagtttagacgacgattagtttcgaattttataagttttgtcgtgatcgcgtttcgtaggcggggggttttttcgcgggttattcgtaggggcgtatttttaatttattaaataaggtcgtatgttttagtcgggttttagttttcgtttagtttggggcgtatttgtgtagggcgcgtgggtaagcgagggcgggcggttgcgcgtcgtttcgtgtgtacgtttttgtttcggattttttgggcgtttcgttacgaagttttttttcggtttttttttaggtgcgtagcgttttcgggagtcggtttcggcggtatcgggtacgacgttatttttttttttttaagggtatcggggttgtgcggtcgcggtcgtgggttggcgttgtcgcgttacggtttggtcgggttcgtacgattttagagttcggagtcgggtgttcggaagtcgtattggaggattgtgcggcggcgatggggcgtttagtcgtcgcggcgagacgtagagggattattttattgtataggcgcggagattgaggttcgtaggggtcgcgtttggtacgatcgttcgtcggggatttggagtttcggatagagagggtacgtttcggagtcggagtttcgagacgtcgtttcgttagcgatttgttggagcggtaaaatttgggtacggttttttatatttttagtcgttcggtattcgggtcgcggtttgggcgttaatcgtcgggttcgagttgggcggagtagcgggcggtagtagggtcgggggtatttatttggcggcggcgatgttggtagcgtttgtaagttattcgggaggtttcgtgtttgcggttcggttgtcggcgcgggatttaataggttcgggcgtttcgtttttttcgtttcgttcgggtttcgttttttttcgggagcggtttttcgtatttcgagcg

SEQ ID NO: 18024 - DNA, 1027 bp, Artificial Sequence
  chemically treated genomic DNA (Homo sapiens) CpG-island No: 18024
cgctcgaaatacgaaaaaccgctcccgaaaaaaaacgaaacccgaacgaaacgaaaaaaacgaaacgcccgaacctattaaatcccgcgccgacaaccgaaccgcaaacacgaaacctcccgaataacttacaaacgctaccaacatcgccgccgccaaataaatacccccgaccctactaccgcccgctactccgcccaactcgaacccgacgattaacgcccaaaccgcgacccgaataccgaacgactaaaaatataaaaaaccgtacccaaattttaccgctccaacaaatcgctaacgaaacgacgtctcgaaactccgactccgaaacgtaccctctctatccgaaactccaaatccccgacgaacgatcgtaccaaacgcgacccctacgaacctcaatctccgcgcctatacaataaaataatccctctacgtctcgccgcgacgactaaacgccccatcgccgccgcacaatcctccaatacgacttccgaacacccgactccgaactctaaaatcgtacgaacccgaccaaaccgtaacgcgacaacgccaacccacgaccgcgaccgcacaaccccgatacccttaaaaaaaaaaaaataacgtcgtacccgataccgccgaaaccgactcccgaaaacgctacgcacctaaaaaaaaaccgaaaaaaaacttcgtaacgaaacgcccaaaaaatccgaaacaaaaacgtacacacgaaacgacgcgcaaccgcccgccctcgcttacccacgcgccctacacaaatacgccccaaactaaacgaaaactaaaacccgactaaaacatacgaccttatttaataaattaaaaatacgcccctacgaataacccgcgaaaaaaccccccgcctacgaaacgcgatcacgacaaaacttataaaattcgaaactaatcgtcgtctaaactctaacctcctaaatacgatcgctttcaaacccttcattatcaattttactaaaataaaccactcgtaaaataaaacgtaattattaat

SEQ ID NO: 18025 - DNA, 589 bp, Artificial Sequence
  chemically treated genomic DNA (Homo sapiens) CpG-island No: 18025
gttacgaagatcgcgggttgatagtgtacggtgcggtttagggttttttgcggttcgtgtaggtttagttttagtaggtcgtagtttagtacgcggcgggcggcggcgtagagttcgcggacgcgcgggtagttgagtagatcgcggtttatgtttattatttggttgttttggttcgggaagagtagtacggagtattggttcggtattcgtcgtttcgtcgtcgtttagggcgttttttttttcgtttcggtcgtatttcgtagtagtttcgttatattttgggcgttcggcggaggtatcgggaagttcgaggcgtcgcggcggtagttggcgtttaagtttttgatttacgttattcgtgcgattcggacgtttatggtcggatatttgttcgcgcgcgttatcgtggcgatcgaggttcgattgcggcggcgcggcgtagcgtggtttttgacgtattttttgtcggggttttcggggtatcgggagcgggaagaaaggtttcgtagacgttggtttcgtttcggttttgaggtttttcgggttgcgttttggggttttggagggatttatgcgtttatttaaa

SEQ ID NO: 18026 - DNA, 589 bp, Artificial Sequence
  chemically treated genomic DNA (Homo sapiens) CpG-island No: 18026
tttaaataaacgcataaatccctccaaaaccccaaaacgcaacccgaaaaacctcaaaaccgaaacgaaaccaacgtctacgaaacctttcttcccgctcccgataccccgaaaaccccgacaaaaaatacgtcaaaaaccacgctacgccgcgccgccgcaatcgaacctcgatcgccacgataacgcgcgcgaacaaatatccgaccataaacgtccgaatcgcacgaataacgtaaatcaaaaacttaaacgccaactaccgccgcgacgcctcgaacttcccgatacctccgccgaacgcccaaaatataacgaaactactacgaaatacgaccgaaacgaaaaaaaaaacgccctaaacgacgacgaaacgacgaataccgaaccaatactccgtactactcttcccgaaccaaaacaaccaaataataaacataaaccgcgatctactcaactacccgcgcgtccgcgaactctacgccgccgcccgccgcgtactaaactacgacctactaaaactaaacctacacgaaccgcaaaaaaccctaaaccgcaccgtacactatcaacccgcgatcttcgtaac

SEQ ID NO: 18027 - DNA, 589 bp, Artificial Sequence
  chemically treated genomic DNA (Homo sapiens) CpG-island No: 18027
tttaagtaaacgtatgagtttttttaggattttagaacgtagttcgaagggttttagagtcggggcggaattagcgtttgcggaattttttttttcgttttcggtgtttcggaagtttcggtaggaaatgcgttagggattacgttgcgtcgcgtcgtcgtagtcgggtttcggtcgttacggtaacgcgcgcgggtaggtgttcgattatgagcgttcgggtcgtacgggtagcgtgggttaggggtttgggcgttagttatcgtcgcggcgtttcgagtttttcggtgttttcgtcgggcgtttagggtgtagcggagttgttgcgagatgcgatcggggcggaggaggaggcgttttgggcggcgacggagcggcgaatgtcgggttagtgtttcgtgttgtttttttcgggttagggtagttaggtggtgggtatgggtcgcggtttgtttaattattcgcgcgttcgcgaattttacgtcgtcgttcgtcgcgtgttgggttacgatttgttggaattgagtttgtacgggtcgtaggagattttggatcgtatcgtgtattgttagttcgcgattttcgtggt

SEQ ID NO: 18028 - DNA, 589 bp, Artificial Sequence
  chemically treated genomic DNA (Homo sapiens) CpG-island No: 18028
accacgaaaatcgcgaactaacaatacacgatacgatccaaaatctcctacgacccgtacaaactcaattccaacaaatcgtaacccaacacgcgacgaacgacgacgtaaaattcgcgaacgcgcgaataattaaacaaaccgcgacccatacccaccacctaactaccctaacccgaaaaaaacaacacgaaacactaacccgacattcgccgctccgtcgccgcccaaaacgcctcctcctccgccccgatcgcatctcgcaacaactccgctacaccctaaacgcccgacgaaaacaccgaaaaactcgaaacgccgcgacgataactaacgcccaaacccctaacccacgctacccgtacgacccgaacgctcataatcgaacacctacccgcgcgcgttaccgtaacgaccgaaacccgactacgacgacgcgacgcaacgtaatccctaacgcatttcctaccgaaacttccgaaacaccgaaaacgaaaaaaaaaattccgcaaacgctaattccgccccgactctaaaacccttcgaactacgttctaaaatcctaaaaaaactcatacgtttacttaaa

SEQ ID NO: 18029 - DNA, 589 bp, Artificial Sequence
  chemically treated genomic DNA (Homo sapiens) CpG-island No: 18029
acgcgtttcgtttagtgggcgggaacgattatagtttttagtatgattcgcggtcgtttatgttacgtttcgttacgcgtgcgtttaggcgtcgttgagcgttgattgggtgcgagtggggaagttgttaattcgattcggattggcgttgaggtggttcgtggggtaggtgagtgcggggcgggagttagcggagatttatcggcgtttataagttttttttaggcgggggttgcggggcggttgtggtcggattgttcgatcgagggtcgtatgggtcgaaggcgtttacgagagaagtatcgtttcgggtcggagagtcgtcgggtcgattttgttcgcgtcgtcgttggaatgggggtcggggacgcggcggggcggggaggtcggttgcgtttttcggtgcggtcgtttttagacggtcgaggttattttaggtgttcggggcgttagtcggaatttatcgcgttggtagtcgggagcggttttacgaaaatcgcgtttgaggcggggggttttttaaaaagagtttggttggttttggtatcgggatagttgtagatttttttttaggtttaatttgcggttt

SEQ ID NO: 18030 - DNA, 589 bp, Artificial Sequence
  chemically treated genomic DNA (Homo sapiens) CpG-island No: 18030
aaaccgcaaattaaacctaaaaaaaaatctacaactatcccgataccaaaaccaaccaaactctttttaaaaaaccccccgcctcaaacgcgattttcgtaaaaccgctcccgactaccaacgcgataaattccgactaacgccccgaacacctaaaataacctcgaccgtctaaaaacgaccgcaccgaaaaacgcaaccgacctccccgccccgccgcgtccccgacccccattccaacgacgacgcgaacaaaatcgacccgacgactctccgacccgaaacgatacttctctcgtaaacgccttcgacccatacgaccctcgatcgaacaatccgaccacaaccgccccgcaacccccgcctaaaaaaaacttataaacgccgataaatctccgctaactcccgccccgcactcacctaccccacgaaccacctcaacgccaatccgaatcgaattaacaacttccccactcgcacccaatcaacgctcaacgacgcctaaacgcacgcgtaacgaaacgtaacataaacgaccgcgaatcatactaaaaactataatcgttcccgcccactaaacgaaacgcgt

SEQ ID NO: 18031 - DNA, 589 bp, Artificial Sequence
  chemically treated genomic DNA (Homo sapiens) CpG-island No: 18031
aaatcgtaagttaaatttgaggaggagtttgtagttgtttcggtgttagagttagttaggttttttttagaaagtttttcgttttaggcgcggttttcgtaaaatcgttttcggttgttagcgcggtggatttcggttggcgtttcgaatatttgaggtggtttcggtcgtttaggggcggtcgtatcggaggacgtagtcgattttttcgtttcgtcgcgttttcggtttttattttaacggcgacgcgagtaaggtcggttcggcggtttttcggttcgaggcggtgtttttttcgtgggcgttttcggtttatacgattttcggtcggatagttcgattatagtcgtttcgtagttttcgtttgaggggaatttgtaggcgtcggtgggttttcgttgattttcgtttcgtatttatttgttttacgggttattttagcgttaattcgggtcgggttagtagtttttttattcgtatttagttagcgtttagcggcgtttaagcgtacgcgtggcggggcgtggtatgggcggtcgcgggttatgttgggggttgtagtcgttttcgtttattaggcggggcgcgt

SEQ ID NO: 18032 - DNA, 589 bp, Artificial Sequence
  chemically treated genomic DNA (Homo sapiens) CpG-island No: 18032
acgcgccccgcctaataaacgaaaacgactacaacccccaacataacccgcgaccgcccataccacgccccgccacgcgtacgcttaaacgccgctaaacgctaactaaatacgaataaaaaaactactaacccgacccgaattaacgctaaaataacccgtaaaacaaataaatacgaaacgaaaatcaacgaaaacccaccgacgcctacaaattcccctcaaacgaaaactacgaaacgactataatcgaactatccgaccgaaaatcgtataaaccgaaaacgcccacgaaaaaaacaccgcctcgaaccgaaaaaccgccgaaccgaccttactcgcgtcgccgttaaaataaaaaccgaaaacgcgacgaaacgaaaaaatcgactacgtcctccgatacgaccgcccctaaacgaccgaaaccacctcaaatattcgaaacgccaaccgaaatccaccgcgctaacaaccgaaaacgattttacgaaaaccgcgcctaaaacgaaaaactttctaaaaaaaacctaactaactctaacaccgaaacaactacaaactcctcctcaaatttaacttacgattt

SEQ ID NO: 18033 - DNA, 651 bp, Artificial Sequence
  chemically treated genomic DNA (Homo sapiens) CpG-island No: 18033
cgtttcgcgtttgtagtttttttcgaagatatttggtgttagtataaggacggttttttttcgtacgtagcgcggttcggtttcgtcgtcgtcgtacgttttcgtatcgttaggcgttcgggttttttcgtagttttcgtcgcgcgtagatttcgcgtttcgagttttgagtcggaggcgcgagtagagtcgaggtaggcgagagatcggttttagtttcgcgtttttcgtcgcgttggtttttttcgggtatttgtttcgttgttcggttttcgtagtattcgcgttttcgtttcggttcggagcgtcgcgttttcgttcgtcgttcgtttagagtttcgtcgtttttttagttcgtcgttttttttttttttcgttatggttcgggttttcgggttcgtcgtttttcgttcgtcgtttttcgcgtttcgggggtttagttgattttgaattggcggggggtcggttggcggggttgggggtttttttcgatcgtcggtttcgggtggggacgcgttgttttcgcgtttttaatttggacgatttttcgcggtcgggttacgtttatgttaaggtaggtgggggttgggtgggtggggggaaggaagggagggtttcgtttcgatgttagttttttggcgcgttggtttt

SEQ ID NO: 18034 - DNA, 651 bp, Artificial Sequence
  chemically treated genomic DNA (Homo sapiens) CpG-island No: 18034
aaaaccaacgcgccaaaaaactaacatcgaaacgaaaccctcccttccttccccccacccacccaacccccacctaccttaacataaacgtaacccgaccgcgaaaaatcgtccaaattaaaaacgcgaaaacaacgcgtccccacccgaaaccgacgatcgaaaaaaacccccaaccccgccaaccgaccccccgccaattcaaaatcaactaaacccccgaaacgcgaaaaacgacgaacgaaaaacgacgaacccgaaaacccgaaccataacgaaaaaaaaaaaaaacgacgaactaaaaaaacgacgaaactctaaacgaacgacgaacgaaaacgcgacgctccgaaccgaaacgaaaacgcgaatactacgaaaaccgaacaacgaaacaaatacccgaaaaaaaccaacgcgacgaaaaacgcgaaactaaaaccgatctctcgcctacctcgactctactcgcgcctccgactcaaaactcgaaacgcgaaatctacgcgcgacgaaaactacgaaaaaacccgaacgcctaacgatacgaaaacgtacgacgacgacgaaaccgaaccgcgctacgtacgaaaaaaaaccgtccttatactaacaccaaatatcttcgaaaaaaactacaaacgcgaaacg

SEQ ID NO: 18035 - DNA, 651 bp, Artificial Sequence
  chemically treated genomic DNA (Homo sapiens) CpG-island No: 18035
gaagttaacgcgttaagaaattggtatcgaagcgaagtttttttttttttttttttatttatttagtttttatttattttggtatggacgtggttcggtcgcggggggtcgtttaggttagagacgcggggataacgcgtttttattcgaagtcggcgatcgagagggatttttagtttcgttagtcgatttttcgttaatttaggattagttgagttttcggggcgcggggggcggcgggcggggggcggcgggttcgggggttcgggttatggcgggaggaggaggaggcggcgggttggagggacggcgaggttttgggcgggcggcgggcgggagcgcggcgtttcgggtcggggcgggggcgcgggtgttgcggggatcgagtagcggggtaagtgttcgggagagattagcgcggcggggagcgcggggttgaggtcggtttttcgtttgtttcggttttgttcgcgttttcggtttagggttcgaagcgcggggtttgcgcgcggcgggggttgcggaggagttcgagcgtttggcggtgcggggacgtgcggcggcggcgagatcgagtcgcgttgcgtgcgaggaaaagtcgtttttatattgatattaaatgttttcggggaaagttgtaggcgcgggacg

SEQ ID NO: 18036 - DNA, 651 bp, Artificial Sequence
  chemically treated genomic DNA (Homo sapiens) CpG-island No: 18036
cgtcccgcgcctacaactttccccgaaaacatttaatatcaatataaaaacgacttttcctcgcacgcaacgcgactcgatctcgccgccgccgcacgtccccgcaccgccaaacgctcgaactcctccgcaacccccgccgcgcgcaaaccccgcgcttcgaaccctaaaccgaaaacgcgaacaaaaccgaaacaaacgaaaaaccgacctcaaccccgcgctccccgccgcgctaatctctcccgaacacttaccccgctactcgatccccgcaacacccgcgcccccgccccgacccgaaacgccgcgctcccgcccgccgcccgcccaaaacctcgccgtccctccaacccgccgcctcctcctcctcccgccataacccgaacccccgaacccgccgccccccgcccgccgccccccgcgccccgaaaactcaactaatcctaaattaacgaaaaatcgactaacgaaactaaaaatccctctcgatcgccgacttcgaataaaaacgcgttatccccgcgtctctaacctaaacgaccccccgcgaccgaaccacgtccataccaaaataaataaaaactaaataaataaaaaaaaaaaaaaaaaaacttcgcttcgataccaatttcttaacgcgttaacttc

SEQ ID NO: 18037 - DNA, 642 bp, Artificial Sequence
  chemically treated genomic DNA (Homo sapiens) CpG-island No: 18037
ggggcgggatcgggggcgggagtagcgcggggcgggattttattcgcggtttacgcggagttaggaggcgcggattatagttttcggtttgtttcgcgtgcggttttcgttcgtttttagcgttcgggaggaggatgtagacgtcgcggtcggcgatgaggatggaggtcggggaggtagcgtcgtcggcgggggcgggcggtcgcgtcgtaggcggttggggtaagtgggtgcggtttaacgtggggggtacggtgtttttgattattcggtagacgttgtgtcgcgagtagaagtttttttttagtcgtttgtgttagggggaagagttgtagtcggatcgggtgaggttttcggggtgggcggcgagcgggcggtgggtttttcgttcgttcgacgcggggttgtcgggtttggttcgttcgttaggttggggattcggtcgggtttattttcgaggaattggaggcgggaagaagcggtaggaggaggggagggggaggtgggtttggtagtgagggatgtatttattgtcgtggtaacgggacgacgtaggtcgcggttattagaagttttttagtcgtttcggatcggggttttttttttttttttggggttgtggatagggagagatttgggatt

SEQ ID NO: 18038 - DNA, 642 bp, Artificial Sequence
  chemically treated genomic DNA (Homo sapiens) CpG-island No: 18038
aatcccaaatctctccctatccacaaccccaaaaaaaaaaaaaaaaccccgatccgaaacgactaaaaaacttctaataaccgcgacctacgtcgtcccgttaccacgacaataaatacatccctcactaccaaacccacctccccctcccctcctcctaccgcttcttcccgcctccaattcctcgaaaataaacccgaccgaatccccaacctaacgaacgaaccaaacccgacaaccccgcgtcgaacgaacgaaaaacccaccgcccgctcgccgcccaccccgaaaacctcacccgatccgactacaactcttccccctaacacaaacgactaaaaaaaaacttctactcgcgacacaacgtctaccgaataatcaaaaacaccgtaccccccacgttaaaccgcacccacttaccccaaccgcctacgacgcgaccgcccgcccccgccgacgacgctacctccccgacctccatcctcatcgccgaccgcgacgtctacatcctcctcccgaacgctaaaaacgaacgaaaaccgcacgcgaaacaaaccgaaaactataatccgcgcctcctaactccgcgtaaaccgcgaataaaatcccgccccgcgctactcccgcccccgatcccgcccc

SEQ ID NO: 18039 - DNA, 642 bp, Artificial Sequence
  chemically treated genomic DNA (Homo sapiens) CpG-island No: 18039
ggttttaggtttttttttgtttatagttttaaaggagaaggagaggtttcgattcggggcggttggagagtttttaatggtcgcggtttgcgtcgtttcgttgttacggtaatgggtatattttttattattagatttattttttttttttttttttttgtcgttttttttcgtttttagtttttcggaaatgaattcggtcgggtttttagtttggcgggcgagttaggttcgatagtttcgcgtcgggcgagcggaggatttatcgttcgttcgtcgtttatttcgggggttttattcggttcgattgtagtttttttttttggtataggcggttgaggaaggatttttgttcgcggtatagcgtttgtcgggtggttaggaatatcgtgttttttacgttgagtcgtatttatttgttttagtcgtttgcggcgcggtcgttcgttttcgtcggcggcgttgttttttcggtttttatttttatcgtcggtcgcggcgtttgtatttttttttcgggcgttgggggcgggcggggatcgtacgcggggtaggtcgggagttgtagttcgcgttttttggtttcgcgtgggtcgcgggtagggtttcgtttcgcgttgttttcgttttcggtttcgtttt

SEQ ID NO: 18040 - DNA, 642 bp, Artificial Sequence
  chemically treated genomic DNA (Homo sapiens) CpG-island No: 18040
aaaacgaaaccgaaaacgaaaacaacgcgaaacgaaaccctacccgcgacccacgcgaaaccaaaaaacgcgaactacaactcccgacctaccccgcgtacgatccccgcccgcccccaacgcccgaaaaaaaaatacaaacgccgcgaccgacgataaaaataaaaaccgaaaaaacaacgccgccgacgaaaacgaacgaccgcgccgcaaacgactaaaacaaataaatacgactcaacgtaaaaaacacgatattcctaaccacccgacaaacgctataccgcgaacaaaaatccttcctcaaccgcctataccaaaaaaaaaaactacaatcgaaccgaataaaacccccgaaataaacgacgaacgaacgataaatcctccgctcgcccgacgcgaaactatcgaacctaactcgcccgccaaactaaaaacccgaccgaattcatttccgaaaaactaaaaacgaaaaaaaacgacaaaaaaaaaaaaaaaaaaaataaatctaataataaaaaatatacccattaccgtaacaacgaaacgacgcaaaccgcgaccattaaaaactctccaaccgccccgaatcgaaacctctccttctcctttaaaactataaacaaaaaaaaacctaaaacc

SEQ ID NO: 18041 - DNA, 913 bp, Artificial Sequence
  chemically treated genomic DNA (Homo sapiens) CpG-island No: 18041
tgcgagcgcgttttgagtttcgggtcgtagtacgcgcgttttcgcgttcgaggtcgcgcgttgtttagtttttcgttcgcgtttcgcgagttgcgttcgtcgcgtacgacgttttttcgcgggagttttgggtcgtcggtcgcgcgcgtaggggagggggcgggggcgtcgcgtacgcgtacgggtcggcggcgcgcgtcgagcggggggtatcgcgcgggtgtagttacgatggaagggggtgcgtacggagcgggtaaagtcgggggcgttttcgatttttatattttggttcggtagtcgtatattattttgcgcgtcgtgttttgggtaaggacggattggtcgacggttttgttaggtcggggtggtgggggtgtgagtaaaggcggcgcgttcggatcgatttcgatttcgattttaacgggttttcggcggcggcgcggcggcgggcgaggagttgttttgtttgcggggttcgttgtcgtcgtttttttttttcgggttcggggcgggcgggatttttggtgttcgcgggagacgtcgtttcggttttcggagttttggttttttggggttttcggttcgtgcgttttttttttcgtttcgattgttgtgatttttaggtcgcggttatgtcgcgaaaggttcggattgtgcgcggtcgttagggcggattggggatcgtggggacggagttagggtttaaggtggttttttttggggggtggattagggcgtggattatttcggtggggtgtatgtcgcgtttgcgatggacgttggaggaggagagggtcgggaatcgggttcgtattgtttagttcggttcgtgtggagcgatgagtcgggaattgagtattttttttttattcgggaattgtttttttttttttgcgtgattttgggttgg

SEQ ID NO: 18042 - DNA, 913 bp, Artificial Sequence
  chemically treated genomic DNA (Homo sapiens) CpG-island No: 18042
ccaacccaaaatcacgcaaaaaaaaaaaaacaattcccgaataaaaaaaaaatactcaattcccgactcatcgctccacacgaaccgaactaaacaatacgaacccgattcccgaccctctcctcctccaacgtccatcgcaaacgcgacatacaccccaccgaaataatccacgccctaatccaccccccaaaaaaaaccaccttaaaccctaactccgtccccacgatccccaatccgccctaacgaccgcgcacaatccgaacctttcgcgacataaccgcgacctaaaaatcacaacaatcgaaacgaaaaaaaaaacgcacgaaccgaaaaccccaaaaaaccaaaactccgaaaaccgaaacgacgtctcccgcgaacaccaaaaatcccgcccgccccgaacccgaaaaaaaaaaacgacgacaacgaaccccgcaaacaaaacaactcctcgcccgccgccgcgccgccgccgaaaacccgttaaaatcgaaatcgaaatcgatccgaacgcgccgcctttactcacacccccaccaccccgacctaacaaaaccgtcgaccaatccgtccttacccaaaacacgacgcgcaaaataatatacgactaccgaaccaaaatataaaaatcgaaaacgcccccgactttacccgctccgtacgcacccccttccatcgtaactacacccgcgcgataccccccgctcgacgcgcgccgccgacccgtacgcgtacgcgacgcccccgccccctcccctacgcgcgcgaccgacgacccaaaactcccgcgaaaaaacgtcgtacgcgacgaacgcaactcgcgaaacgcgaacgaaaaactaaacaacgcgcgacctcgaacgcgaaaacgcgcgtactacgacccgaaactcaaaacgcgctcgca

SEQ ID NO: 18043 - DNA, 913 bp, Artificial Sequence
  chemically treated genomic DNA (Homo sapiens) CpG-island No: 18043
ttagtttaaggttacgtagagaaggagaggtagttttcgggtggaagagaggtatttagttttcgatttatcgttttatacgggtcgggttaggtaatacgaattcggttttcggttttttttttttttaacgtttatcgtaggcgcggtatgtattttatcgagatggtttacgttttgatttattttttaaaaaaggttattttaaattttggtttcgtttttacggtttttagttcgttttggcggtcgcgtataattcgagtttttcgcggtatagtcgcggtttggaggttatagtaatcggggcgggaaggggggcgtacgaatcgggggttttaggaaattagggtttcgggagtcggagcggcgtttttcgcgagtattagggatttcgttcgtttcgggttcgggaaggaggagcggcggtagcgggtttcgtaggtaggatagtttttcgttcgtcgtcgcgtcgtcgtcgggggttcgttggggtcggggtcggggtcggttcgggcgcgtcgtttttgtttatatttttattatttcggtttggtagagtcgtcggttagttcgtttttatttaagatacgacgcgtaggatggtgtgcggttgtcggattagggtgtaggggtcgaaggcgttttcggttttgttcgtttcgtacgtatttttttttatcgtggttgtattcgcgcggtgtttttcgttcggcgcgcgtcgtcggttcgtgcgcgtgcgcggcgttttcgtttttttttttgcgcgcgcggtcggcggtttagggttttcgcgagggggcgtcgtgcgcggcgggcgtagttcgcggggcgcgggcggggggttgggtagcgcgcgatttcgggcgcgggggcgcgcgtgttgcggttcggggtttagggcgcgttcgta

SEQ ID NO: 18044 - DNA, 913 bp, Artificial Sequence
  chemically treated genomic DNA (Homo sapiens) CpG-island No: 18044
tacgaacgcgccctaaaccccgaaccgcaacacgcgcgcccccgcgcccgaaatcgcgcgctacccaaccccccgcccgcgccccgcgaactacgcccgccgcgcacgacgccccctcgcgaaaaccctaaaccgccgaccgcgcgcgcaaaaaaaaaaacgaaaacgccgcgcacgcgcacgaaccgacgacgcgcgccgaacgaaaaacaccgcgcgaatacaaccacgataaaaaaaaatacgtacgaaacgaacaaaaccgaaaacgccttcgacccctacaccctaatccgacaaccgcacaccatcctacgcgtcgtatcttaaataaaaacgaactaaccgacgactctaccaaaccgaaataataaaaatataaacaaaaacgacgcgcccgaaccgaccccgaccccgaccccaacgaacccccgacgacgacgcgacgacgaacgaaaaactatcctacctacgaaacccgctaccgccgctcctccttcccgaacccgaaacgaacgaaatccctaatactcgcgaaaaacgccgctccgactcccgaaaccctaatttcctaaaacccccgattcgtacgccccccttcccgccccgattactataacctccaaaccgcgactataccgcgaaaaactcgaattatacgcgaccgccaaaacgaactaaaaaccgtaaaaacgaaaccaaaatttaaaataaccttttttaaaaaataaatcaaaacgtaaaccatctcgataaaatacataccgcgcctacgataaacgttaaaaaaaaaaaaaaccgaaaaccgaattcgtattacctaacccgacccgtataaaacgataaatcgaaaactaaatacctctcttccacccgaaaactacctctccttctctacgtaaccttaaactaa

SEQ ID NO: 18045 - DNA, 811 bp, Artificial Sequence
  chemically treated genomic DNA (Homo sapiens) CpG-island No: 18045
ggcgatcgtagagatttggtcgggaggcgtcggtttagcgaggtcgttgggattgtgtattgaggggcgttgatcgttggacgcgcgtttttcgtagattttcgttgaaggagtagggggcggcgcgcgtgcgcggggcgtcgggcggcgcgcgagggggcggagcggggaggcgtgttgcgatttcggtcggttatagtttgcggcgcgcgtagagcgttagtggggcgcgcggcgcgcgcgcggggcgggggcgcgcggaggggggggttgtttcggggcggtttttttaggtcggggcgcggcgggcggcggcggcgggcgcgcgtttcgtttaggttcggagtaatcgtcgtcgtcgtcgttaaagttcgttaatatggcggatttggaggttgtgttggtcgatgttagttatttgatggttatggagaagagtaaggcgatttcggtcgttcgcgttagtaagaggatcgttttgtcggagtttaggtattagttgtttcggtcggcgtcggttttaagtcgtcgttttttgcggtcgttagttattttttgttttttggagggtcgggcgttgagttttcgttgtttcggggcgggtgatatagcggagcgggcgatgcggggtcggtttcgtcgttttagtttttgaaatggggtatcggagggtcggtggggggtatttcgggagagagcgttttaaagtgttcggcgcggcgttttgcgcgtagcgagcgttttagttagggtttggttatgatttggttggattagttttatttttgtcgttttttttttttagttttgt

SEQ ID NO: 18046 - DNA, 811 bp, Artificial Sequence
  chemically treated genomic DNA (Homo sapiens) CpG-island No: 18046
acaaaactaaaaaaaaaaaacgacaaaaataaaactaatccaaccaaatcataaccaaaccctaactaaaacgctcgctacgcgcaaaacgccgcgccgaacactttaaaacgctctctcccgaaataccccccaccgaccctccgataccccatttcaaaaactaaaacgacgaaaccgaccccgcatcgcccgctccgctatatcacccgccccgaaacaacgaaaactcaacgcccgaccctccaaaaaacaaaaaataactaacgaccgcaaaaaacgacgacttaaaaccgacgccgaccgaaacaactaatacctaaactccgacaaaacgatcctcttactaacgcgaacgaccgaaatcgccttactcttctccataaccatcaaataactaacatcgaccaacacaacctccaaatccgccatattaacgaactttaacgacgacgacgacgattactccgaacctaaacgaaacgcgcgcccgccgccgccgcccgccgcgccccgacctaaaaaaaccgccccgaaacaacccccccctccgcgcgcccccgccccgcgcgcgcgccgcgcgccccactaacgctctacgcgcgccgcaaactataaccgaccgaaatcgcaacacgcctccccgctccgccccctcgcgcgccgcccgacgccccgcgcacgcgcgccgccccctactccttcaacgaaaatctacgaaaaacgcgcgtccaacgatcaacgcccctcaatacacaatcccaacgacctcgctaaaccgacgcctcccgaccaaatctctacgatcgcc

SEQ ID NO: 18047 - DNA, 811 bp, Artificial Sequence
  chemically treated genomic DNA (Homo sapiens) CpG-island No: 18047
atagggttggggggagggggcgatagggatggagttggtttagttaagttataattagattttggttggggcgttcgttgcgcgtagggcgtcgcgtcgggtattttggagcgttttttttcggggtgttttttatcggtttttcgatgttttattttagagattggaacgacgaggtcggtttcgtatcgttcgtttcgttgtgttattcgtttcggggtagcggaggtttagcgttcgattttttaggaagtagggggtagttggcggtcgtagggggcggcggtttggggtcggcgtcggtcggggtagttggtatttgggtttcggtaggacgatttttttgttggcgcgggcggtcggggtcgttttgtttttttttatggttattaggtaattgatatcggttagtatagtttttaggttcgttatgttggcgagttttggcggcggcggcggcggttatttcggatttggacgggacgcgcgttcgtcgtcgtcgttcgtcgcgtttcgatttgggggggtcgtttcggggtagttttttttttcgcgcgttttcgtttcgcgcgcgcgtcgcgcgttttattagcgttttgcgcgcgtcgtaggttgtagtcggtcggggtcgtagtacgttttttcgtttcgttttttcgcgcgtcgttcggcgtttcgcgtacgcgcgtcgttttttgtttttttagcgagggtttgcggggagcgcgcgtttaacggttagcgttttttagtgtatagttttagcggtttcgttgggtcggcgtttttcgattaagtttttacggtcgtt

SEQ ID NO: 18048 - DNA, 811 bp, Artificial Sequence
  chemically treated genomic DNA (Homo sapiens) CpG-island No: 18048
aacgaccgtaaaaacttaatcgaaaaacgccgacccaacgaaaccgctaaaactatacactaaaaaacgctaaccgttaaacgcgcgctccccgcaaaccctcgctaaaaaaacaaaaaacgacgcgcgtacgcgaaacgccgaacgacgcgcgaaaaaacgaaacgaaaaaacgtactacgaccccgaccgactacaacctacgacgcgcgcaaaacgctaataaaacgcgcgacgcgcgcgcgaaacgaaaacgcgcgaaaaaaaaaactaccccgaaacgacccccccaaatcgaaacgcgacgaacgacgacgacgaacgcgcgtcccgtccaaatccgaaataaccgccgccgccgccgccaaaactcgccaacataacgaacctaaaaactatactaaccgatatcaattacctaataaccataaaaaaaaacaaaacgaccccgaccgcccgcgccaacaaaaaaatcgtcctaccgaaacccaaataccaactaccccgaccgacgccgaccccaaaccgccgccccctacgaccgccaactaccccctacttcctaaaaaatcgaacgctaaacctccgctaccccgaaacgaataacacaacgaaacgaacgatacgaaaccgacctcgtcgttccaatctctaaaataaaacatcgaaaaaccgataaaaaacaccccgaaaaaaaacgctccaaaatacccgacgcgacgccctacgcgcaacgaacgccccaaccaaaatctaattataacttaactaaaccaactccatccctatcgccccctccccccaaccctat

SEQ ID NO: 18049 - DNA, 982 bp, Artificial Sequence
  chemically treated genomic DNA (Homo sapiens) CpG-island No: 18049
  unsure (48, 56, 131, 165, 172, 177, 196, 223, 255, 286, 308, 312)
  unsure (332, 346, 403, 415, 431, 593, 625, 694, 737, 773, 815, 900)
  unsure (908, 920, 943, 953, 967)
tgagcggtggatttttcgttttttcgatcgcgatcgattttggtcgtngtagcgantgagcgttagagcgggtaggcggcgtacggacgtatacgcgttgagacgggatgttatggcgtggcgcgtgtggnagcgtagcgtacgtcgcgtgagcgtacgatagtnattggtnttagnagatacgttcgttcgcgtngttcgttgagtttcgagcgaagttgancgatagagaattgtaggggagggtatttgggntcgggcggttattgttcggtgatagtgcgtngagttttcgacgtgtattcgancgtngttgtaggcgcgaggagagnatatgtgcgttttngagatcgtggaggtacggtcgggagcgttcgggtaggtcgacggttggaggtttttntacggtagttgncgagtgcggagcgttnggtttcgtatatacgaggcgtaatcggtcgtttttgttagtattcgtagagagttataagcgaagggagagtacgcgaggcgcgagagcgagcgaagagggcgtagcgtcgttttacgttgggcgagcgtagttgcgtatgagcgcgcgtcgatttatcganttcgtcgtttttattagttttagcgtcggggntagtgcgtagttggagagcgataggtgagacgaggagagcgtggagttgacgatattcgtaggtagagntacgacggcgtcgttcgtgggagttatagtgttaatattaatncgacgtagtaaggagaggggaagcgacgtgagcggntagtcgcgtaggcgttagcgagcgagtgcgtgaagttagcgntttcgtgtattagcgttttgaggatcgttcgcgagggatgtttttgatgaggtcggtcgtagtgcgtaatttttgttagtgttgngttaggangagatcgttagncgaagttacgagatattgttcgntgcgatttantcgttcgtcggtgnagacgtgttcgggag

SEQ ID NO: 18050 - DNA, 982 bp, Artificial Sequence
  chemically treated genomic DNA (Homo sapiens) CpG-island No: 18050
  unsure (16, 30, 40, 63, 75, 83, 168, 210, 246, 289, 358, 390, 552)
  unsure (568, 580, 637, 651, 671, 675, 697, 728, 760, 787, 806, 811)
  unsure (818, 852, 927, 935)
ctcccgaacacgtctncaccgacgaacgantaaatcgcancgaacaatatctcgtaacttcgnctaacgatctcntcctaacncaacactaacaaaaattacgcactacgaccgacctcatcaaaaacatccctcgcgaacgatcctcaaaacgctaatacacgaaancgctaacttcacgcactcgctcgctaacgcctacgcgactanccgctcacgtcgcttcccctctccttactacgtcgnattaatattaacactataactcccacgaacgacgccgtcgtanctctacctacgaatatcgtcaactccacgctctcctcgtctcacctatcgctctccaactacgcactanccccgacgctaaaactaataaaaacgacgaantcgataaatcgacgcgcgctcatacgcaactacgctcgcccaacgtaaaacgacgctacgccctcttcgctcgctctcgcgcctcgcgtactctcccttcgcttataactctctacgaatactaacaaaaacgaccgattacgcctcgtatatacgaaaccnaacgctccgcactcgncaactaccgtanaaaaacctccaaccgtcgacctacccgaacgctcccgaccgtacctccacgatctcnaaaacgcacatatnctctcctcgcgcctacaacnacgntcgaatacacgtcgaaaactcnacgcactatcaccgaacaataaccgcccgancccaaataccctcccctacaattctctatcgntcaacttcgctcgaaactcaacgaacnacgcgaacgaacgtatctnctaanaccaatnactatcgtacgctcacgcgacgtacgctacgctnccacacgcgccacgccataacatcccgtctcaacgcgtatacgtccgtacgccgcctacccgctctaacgctcantcgctacnacgaccaaaatcgatcgcgatcgaaaaaacgaaaaatccaccgctca

SEQ ID NO: 18051 - DNA, 982 bp, Artificial Sequence
  chemically treated genomic DNA (Homo sapiens) CpG-island No: 18051
  unsure (16, 30, 40, 63, 75, 83, 168, 210, 246, 289, 358, 390, 552)
  unsure (568, 580, 637, 651, 671, 675, 697, 728, 760, 787, 806, 811)
  unsure (818, 852, 927, 935)
ttttcggatacgtttntatcgacgagcgantggatcgtancgagtagtgtttcgtggtttcgnttagcgattttnttttggtntagtattggtaggagttgcgtattacgatcgattttattagaggtatttttcgcgagcgatttttagagcgttaatgtacgaagncgttggttttacgtattcgttcgttagcgtttgcgcggttgntcgtttacgtcgttttttttttttttgttgcgtcgngttagtgttagtattgtagtttttacgagcgacgtcgtcgtgnttttgtttacgagtatcgttagttttacgtttttttcgttttatttatcgttttttagttgcgtattgntttcgacgttaggattggtaagagcgacgagntcgatgagtcggcgcgcgtttatacgtagttacgttcgtttagcgtagaacgacgttgcgtttttttcgttcgttttcgcgtttcgcgtgtttttttttcgtttgtggttttttgcgggtgttggtaggagcgatcggttgcgtttcgtgtgtgcgaggttnagcgtttcgtattcgntaattgtcgtgngagagtttttagtcgtcgatttgttcgagcgttttcgatcgtgtttttacggttttnagagcgtatatgtntttttttcgcgtttgtagtngcgntcgggtgtacgtcgagggtttngcgtattgttatcgagtagtggtcgttcgantttaagtgtttttttttatagttttttgtcgnttagtttcgttcgaggtttagcgagtnacgcgagcgagcgtgtttnttggngttagtngttgtcgtgcgtttacgcggcgtgcgttgcgttnttatacgcgttacgttatagtatttcgttttagcgcgtgtgcgttcgtgcgtcgtttgttcgttttgacgtttantcgttgtngcgattagggtcggtcgcggtcgaggagacgaggggtttatcgttta

SEQ ID NO: 18052 - DNA, 982 bp, Artificial Sequence
  chemically treated genomic DNA (Homo sapiens) CpG-island No: 18052
  unsure (48, 56, 131, 165, 172, 177, 196, 223, 255, 286, 308, 312)
  unsure (332, 346, 403, 415, 431, 593, 625, 694, 737, 773, 815, 900)
  unsure (908, 920, 943, 953, 967)
taaacgataaacccctcgtctcctcgaccgcgaccgaccctaatcgcnacaacgantaaacgtcaaaacgaacaaacgacgcacgaacgcacacgcgctaaaacgaaatactataacgtaacgcgtataanaacgcaacgcacgccgcgtaaacgcacgacaacnactaacnccaanaaacacgctcgctcgcgtnactcgctaaacctcgaacgaaactaancgacaaaaaactataaaaaaaaacacttaaantcgaacgaccactactcgataacaatacgcnaaaccctcgacgtacacccgancgcnactacaaacgcgaaaaaaanacatatacgctctnaaaaccgtaaaaacacgatcgaaaacgctcgaacaaatcgacgactaaaaactctcncacgacaattancgaatacgaaacgctnaacctcgcacacacgaaacgcaaccgatcgctcctaccaacacccgcaaaaaaccacaaacgaaaaaaaaacacgcgaaacgcgaaaacgaacgaaaaaaacgcaacgtcgttctacgctaaacgaacgtaactacgtataaacgcgcgccgactcatcganctcgtcgctcttaccaatcctaacgtcgaaancaatacgcaactaaaaaacgataaataaaacgaaaaaaacgtaaaactaacgatactcgtaaacaaaancacgacgacgtcgctcgtaaaaactacaatactaacactaacncgacgcaacaaaaaaaaaaaaaacgacgtaaacgancaaccgcgcaaacgctaacgaacgaatacgtaaaaccaacgncttcgtacattaacgctctaaaaatcgctcgcgaaaaatacctctaataaaatcgatcgtaatacgcaactcctaccaatactanaccaaaanaaaatcgctaancgaaaccacgaaacactactcgntacgatccantcgctcgtcgatanaaacgtatccgaaaa

SEQ ID NO: 18053 - DNA, 603 bp, Artificial Sequence
  chemically treated genomic DNA (Homo sapiens) CpG-island No: 18053
ggtcgacgggtcggcggttagaggaggcggttggtattttcggcgtcgtcgcggtttttttagtttattgttcgttcgttcgttttttttttttttgtattcgttcggtatagattcggttttagtttttttttttttttcgttcgttttacgttcgttcgttcgttcgtcggtttttttttattcgttcgttcgcgttcggcgtagttcggttagagcgatcgcggggttgagcgcgcgttcgtttagggggtttcggaagttgtttcggttcgcggttttttttttcgttttcgttttttttttttcgtttatcgtcgttttttttttttagttttttcgtcgttcgttcgttttatagttagcggtttcgcgttttttgtagttacgatgttcgcggttcggtcgttcgtcgcgggatttcgcgggatttcgttgtttttcgttttgtttttggggagttcggcggtagcgttggagcgaggtaagcgtttcgaggggcggggcgggtagggggtaaagttgtcgggagagcggggtagttaggggtcggggttgattagggcgatttaggtattattcgtcgggatgggaagcggtggt

SEQ ID NO: 18054 - DNA, 603 bp, Artificial Sequence
  chemically treated genomic DNA (Homo sapiens) CpG-island No: 18054
accaccgcttcccatcccgacgaataatacctaaatcgccctaatcaaccccgacccctaactaccccgctctcccgacaactttaccccctacccgccccgcccctcgaaacgcttacctcgctccaacgctaccgccgaactccccaaaaacaaaacgaaaaacaacgaaatcccgcgaaatcccgcgacgaacgaccgaaccgcgaacatcgtaactacaaaaaacgcgaaaccgctaactataaaacgaacgaacgacgaaaaaactaaaaaaaaaaaacgacgataaacgaaaaaaaaaaaacgaaaacgaaaaaaaaaaccgcgaaccgaaacaacttccgaaaccccctaaacgaacgcgcgctcaaccccgcgatcgctctaaccgaactacgccgaacgcgaacgaacgaataaaaaaaaaccgacgaacgaacgaacgaacgtaaaacgaacgaaaaaaaaaaaaaaactaaaaccgaatctataccgaacgaatacaaaaaaaaaaaaaacgaacgaacgaacaataaactaaaaaaaccgcgacgacgccgaaaataccaaccgcctcctctaaccgccgacccgtcgacc

SEQ ID NO: 18055 - DNA, 603 bp, Artificial Sequence
  chemically treated genomic DNA (Homo sapiens) CpG-island No: 18055
attatcgttttttatttcggcgggtggtgtttgagtcgttttggttagtttcgatttttggttgtttcgttttttcggtaattttgttttttgttcgtttcgtttttcggggcgtttatttcgttttagcgttgtcgtcgggttttttaggagtagagcgaggaatagcgagatttcgcggagtttcgcggcgggcggtcgggtcgcgggtatcgtggttgtagggggcgcggagtcgttggttgtggggcgggcggacggcgagggagttggggaaggagggcggcggtgagcgagaaaggggaagcgggagcgagggaggaggtcgcgggtcggggtagttttcggagttttttgggcggacgcgcgtttagtttcgcggtcgttttggtcgagttgcgtcgggcgcgggcgggcgagtgaggaggagtcggcgagcgagcgaacgagcgtggagcgagcgggaggagggagggggttggggtcgagtttgtgtcgagcgagtgtagggagggagggggcgggcgagcgggtagtgagttggaggggtcgcggcggcgtcgggggtgttagtcgttttttttggtcgtcggttcgtcggtt

SEQ ID NO: 18056 - DNA, 603 bp, Artificial Sequence
  chemically treated genomic DNA (Homo sapiens) CpG-island No: 18056
aaccgacgaaccgacgaccaaaaaaaacgactaacacccccgacgccgccgcgacccctccaactcactacccgctcgcccgccccctccctccctacactcgctcgacacaaactcgaccccaaccccctccctcctcccgctcgctccacgctcgttcgctcgctcgccgactcctcctcactcgcccgcccgcgcccgacgcaactcgaccaaaacgaccgcgaaactaaacgcgcgtccgcccaaaaaactccgaaaactaccccgacccgcgacctcctccctcgctcccgcttcccctttctcgctcaccgccgccctccttccccaactccctcgccgtccgcccgccccacaaccaacgactccgcgccccctacaaccacgatacccgcgacccgaccgcccgccgcgaaactccgcgaaatctcgctattcctcgctctactcctaaaaaacccgacgacaacgctaaaacgaaataaacgccccgaaaaacgaaacgaacaaaaaacaaaattaccgaaaaaacgaaacaaccaaaaatcgaaactaaccaaaacgactcaaacaccacccgccgaaataaaaaacgataat

SEQ ID NO: 18057 - DNA, 514 bp, Artificial Sequence
  chemically treated genomic DNA (Homo sapiens) CpG-island No: 18057
ttggcgtcgggtttagcgtaagggagttggcgattgtataggaggatttagttggcgggatcgcgagggtaagagtttcgcggtgttttttagtgtcggaggggaaggagcgggcgtgaaggacgcgagttggaggatagtttcgattcgggtttgagtcgtggaagtcgttggttttcgtgagtcgatgggggcgaggttttgtcggggcggggttggggagagggcggggttgggttggggttttttgttggttcgagtttagggcggggttgtcggaggggcggggttatatcggggcgggttcgagaggggaggcggggttggggggcgggatatgagtgtggattggcgggttggggcggggttagagcggggttgcggtaggggcggtaggggcggtaggggcggtaggggcggtagagggcggggcgggcggttttagtttgtagaattgggcggtttgcgggaggggtacgaataatgttttagggtttttttgtgatattggggt

SEQ ID NO: 18058 - DNA, 514 bp, Artificial Sequence
  chemically treated genomic DNA (Homo sapiens) CpG-island No: 18058
accccaatatcacaaaaaaaccctaaaacattattcgtacccctcccgcaaaccgcccaattctacaaactaaaaccgcccgccccgccctctaccgcccctaccgcccctaccgcccctaccgcccctaccgcaaccccgctctaaccccgccccaacccgccaatccacactcatatcccgccccccaaccccgcctcccctctcgaacccgccccgatataaccccgcccctccgacaaccccgccctaaactcgaaccaacaaaaaaccccaacccaaccccgccctctccccaaccccgccccgacaaaacctcgcccccatcgactcacgaaaaccaacgacttccacgactcaaacccgaatcgaaactatcctccaactcgcgtccttcacgcccgctccttcccctccgacactaaaaaacaccgcgaaactcttaccctcgcgatcccgccaactaaatcctcctatacaatcgccaactcccttacgctaaacccgacgccaa

SEQ ID NO: 18059 - DNA, 514 bp, Artificial Sequence
  chemically treated genomic DNA (Homo sapiens) CpG-island No: 18059
attttagtgttatagagaaattttggggtattattcgtgtttttttcgtagatcgtttagttttgtaggttgggatcgttcgtttcgttttttgtcgtttttgtcgtttttgtcgtttttgtcgtttttgtcgtaatttcgttttggtttcgttttaattcgttagtttatatttatgtttcgttttttagtttcgttttttttttcggattcgtttcgatatggtttcgttttttcggtaatttcgttttaaattcggattaatagggggttttagtttagtttcgttttttttttagtttcgtttcgatagggtttcgtttttatcggtttacgaaggttaacggtttttacggtttaggttcgaatcgagattgttttttagttcgcgttttttacgttcgttttttttttttcggtattggggggtatcgcgagatttttattttcgcggtttcgttagttgggtttttttatgtagtcgttagtttttttgcgttgagttcggcgttag

SEQ ID NO: 18060 - DNA, 514 bp, Artificial Sequence
  chemically treated genomic DNA (Homo sapiens) CpG-island No: 18060
ctaacgccgaactcaacgcaaaaaaactaacgactacataaaaaaacccaactaacgaaaccgcgaaaataaaaatctcgcgataccccccaataccgaaaaaaaaaaaacgaacgtaaaaaacgcgaactaaaaaacaatctcgattcgaacctaaaccgtaaaaaccgttaaccttcgtaaaccgataaaaacgaaaccctatcgaaacgaaactaaaaaaaaaacgaaactaaactaaaaccccctattaatccgaatttaaaacgaaattaccgaaaaaacgaaaccatatcgaaacgaatccgaaaaaaaaaacgaaactaaaaaacgaaacataaatataaactaacgaattaaaacgaaaccaaaacgaaattacgacaaaaacgacaaaaacgacaaaaacgacaaaaacgacaaaaaacgaaacgaacgatcccaacctacaaaactaaacgatctacgaaaaaaacacgaataataccccaaaatttctctataacactaaaat

SEQ ID NO: 18061 - DNA, 978 bp, Artificial Sequence
  chemically treated genomic DNA (Homo sapiens) CpG-island No: 18061
tttcgttcgttttggtttcgggttttcgggggttggggcggggttgttggcggtttcgttttcgtttgttagttttttaaagggcgtaagcgtcgttttcgtcgcgtgttcggggttagttcgagttcgtgcgggttttttaagggtcgggggcgtgtagcgggttcgtttttttttcgcggcgttcgtagttcgttaagtgcgagtttcggcgtaggggtcggatttggtcgggggtcggcggcggtgtgggagcggcgcgttatgtatattattattaaggggtttagtaagttggtcgcgtagcgtcgtataggtgcgtacgggtcggggaacgggaacggggacggggcggggcgcggcggcggttgatcgtttttcggtgttcgtaggttttacgtagtagtaggtggagggtcggttcggcgagtttttgaaatgtcggtagttcgcgtcgtcgatttcgtagttttcgcgggcgtagttttttgcgtagtcgtcgggattttggtttttgtcgaggtgagacgcgcgcggtttcggttcggttcggttcggttttttttttttcgtcggtcgttttagagcggagggtgattttggggaaatgttagtgaggttcggttacgtgttgtaggcggggcgggcgtttcgggcgcggggggtgcgcgggttttgtttattacgcgttcgcgggtttgcgtttcgtattttcgttttatttggtcgggttcgggtttttagcggggagaaagtcggttagtttttgggtcgtaggggtttttagcgttcgaggtcggtgtttcgggcgattttgggttgttgttggaattttgacgtgtagtaggtttaggttacggttcgcggagagcgtcgggcgttggtttttaagatttttcggttttgtttttgtagagtttagtgggggagacgtgcgtgcgtttttttcgggtagggtcgttgttttttttcgttttt

SEQ ID NO: 18062 - DNA, 978 bp, Artificial Sequence
  chemically treated genomic DNA (Homo sapiens) CpG-island No: 18062
aaaaacgaaaaaaaacaacgaccctacccgaaaaaaacgcacgcacgtctcccccactaaactctacaaaaacaaaaccgaaaaatcttaaaaaccaacgcccgacgctctccgcgaaccgtaacctaaacctactacacgtcaaaattccaacaacaacccaaaatcgcccgaaacaccgacctcgaacgctaaaaacccctacgacccaaaaactaaccgactttctccccgctaaaaacccgaacccgaccaaataaaacgaaaatacgaaacgcaaacccgcgaacgcgtaataaacaaaacccgcgcaccccccgcgcccgaaacgcccgccccgcctacaacacgtaaccgaacctcactaacatttccccaaaatcaccctccgctctaaaacgaccgacgaaaaaaaaaaaaccgaaccgaaccgaaccgaaaccgcgcgcgtctcacctcgacaaaaaccaaaatcccgacgactacgcaaaaaactacgcccgcgaaaactacgaaatcgacgacgcgaactaccgacatttcaaaaactcgccgaaccgaccctccacctactactacgtaaaacctacgaacaccgaaaaacgatcaaccgccgccgcgccccgccccgtccccgttcccgttccccgacccgtacgcacctatacgacgctacgcgaccaacttactaaaccccttaataataatatacataacgcgccgctcccacaccgccgccgacccccgaccaaatccgacccctacgccgaaactcgcacttaacgaactacgaacgccgcgaaaaaaaaacgaacccgctacacgcccccgacccttaaaaaacccgcacgaactcgaactaaccccgaacacgcgacgaaaacgacgcttacgccctttaaaaaactaacaaacgaaaacgaaaccgccaacaaccccgccccaacccccgaaaacccgaaaccaaaacgaacgaaa

SEQ ID NO: 18063 - DNA, 978 bp, Artificial Sequence
  chemically treated genomic DNA (Homo sapiens) CpG-island No: 18063
aagggcggaggagggtagcggttttgttcgagggaagcgtacgtacgttttttttattgagttttgtaagggtagagtcgggagattttgaggattagcgttcgacgtttttcgcgaatcgtggtttgggtttgttgtacgttagggttttagtagtaatttaaggtcgttcgaagtatcgatttcggacgttggaggtttttgcgatttaggaattggtcggtttttttttcgttgggggttcgggttcggttaggtgaggcggaagtgcgaggcgtaggttcgcgggcgcgtagtgggtaggattcgcgtatttttcgcgttcggagcgttcgtttcgtttgtagtacgtggtcggattttattaatatttttttaaggttatttttcgttttagggcggtcggcgggggaggggaagtcgggtcgggtcgggtcggggtcgcgcgcgttttatttcgataggggttagggtttcggcggttgcgtaaagggttgcgttcgcgggggttgcgaggtcggcggcgcgggttgtcggtattttaggagttcgtcgagtcggttttttatttgttgttgcgtgggatttgcgggtatcggggggcggttagtcgtcgtcgcgtttcgtttcgttttcgttttcgtttttcggttcgtgcgtatttgtgcggcgttgcgcgattagtttgttgggttttttggtgatggtgtatatgacgcgtcgtttttatatcgtcgtcggttttcggttagattcggtttttgcgtcggggttcgtatttaacggattgcgggcgtcgcggggagggggcgggttcgttatacgttttcggtttttaaagggttcgtacgggttcgggttgatttcggatacgcggcggaggcggcgtttgcgttttttgggaaattggtaggcgggggcggagtcgttagtaatttcgttttagttttcggaggttcgaggttaaggcggacgagg

SEQ ID NO: 18064 - DNA, 978 bp, Artificial Sequence
  chemically treated genomic DNA (Homo sapiens) CpG-island No: 18064
cctcgtccgccttaacctcgaacctccgaaaactaaaacgaaattactaacgactccgcccccgcctaccaatttcccaaaaaacgcaaacgccgcctccgccgcgtatccgaaatcaacccgaacccgtacgaaccctttaaaaaccgaaaacgtataacgaacccgccccctccccgcgacgcccgcaatccgttaaatacgaaccccgacgcaaaaaccgaatctaaccgaaaaccgacgacgatataaaaacgacgcgtcatatacaccatcaccaaaaaacccaacaaactaatcgcgcaacgccgcacaaatacgcacgaaccgaaaaacgaaaacgaaaacgaaacgaaacgcgacgacgactaaccgccccccgatacccgcaaatcccacgcaacaacaaataaaaaaccgactcgacgaactcctaaaataccgacaacccgcgccgccgacctcgcaacccccgcgaacgcaaccctttacgcaaccgccgaaaccctaacccctatcgaaataaaacgcgcgcgaccccgacccgacccgacccgacttcccctcccccgccgaccgccctaaaacgaaaaataaccttaaaaaaatattaataaaatccgaccacgtactacaaacgaaacgaacgctccgaacgcgaaaaatacgcgaatcctacccactacgcgcccgcgaacctacgcctcgcacttccgcctcacctaaccgaacccgaacccccaacgaaaaaaaaaccgaccaattcctaaatcgcaaaaacctccaacgtccgaaatcgatacttcgaacgaccttaaattactactaaaaccctaacgtacaacaaacccaaaccacgattcgcgaaaaacgtcgaacgctaatcctcaaaatctcccgactctacccttacaaaactcaataaaaaaaacgtacgtacgcttccctcgaacaaaaccgctaccctcctccgccctt

SEQ ID NO: 18065 - DNA, 531 bp, Artificial Sequence
  chemically treated genomic DNA (Homo sapiens) CpG-island No: 18065
gcgatttcgtttcgttgtttgtatgcggcgggagtttcggtcggtcgaggcgttgataggtgggcgcggcggaggattcgtaatcggcgcgggtttcgaagtcggtcgggttaatagggggttgttttgggaggttcgcggggtaaagggtagcgggattcgcggttggagtaattttggaggtcgttgacgtgagcggggtatttttatcggggaggttacgtggttagggcgtcgttatgacggcggaagtaatggcggaagtggtatcgttgttaggtagtcgttgtttggcgtcgcggggcgtattttgcgttgggcgcgcggaggtttaggcgggaagttcgagcggcggcgttatggttcgaggtagcgcgcggttggcgggggtttcgaggatttcgggtttcggggtttcggggtttagggtcggcggtcggagcgtttagggttttcgtttaggttttgaggttagagttttcgtttaggtagggtttcgtttgtcgggcgtttattttcgggttttcggag

SEQ ID NO: 18066 - DNA, 531 bp, Artificial Sequence
  chemically treated genomic DNA (Homo sapiens) CpG-island No: 18066
ctccgaaaacccgaaaataaacgcccgacaaacgaaaccctacctaaacgaaaactctaacctcaaaacctaaacgaaaaccctaaacgctccgaccgccgaccctaaaccccgaaaccccgaaacccgaaatcctcgaaacccccgccaaccgcgcgctacctcgaaccataacgccgccgctcgaacttcccgcctaaacctccgcgcgcccaacgcaaaatacgccccgcgacgccaaacaacgactacctaacaacgataccacttccgccattacttccgccgtcataacgacgccctaaccacgtaacctccccgataaaaataccccgctcacgtcaacgacctccaaaattactccaaccgcgaatcccgctaccctttaccccgcgaacctcccaaaacaaccccctattaacccgaccgacttcgaaacccgcgccgattacgaatcctccgccgcgcccacctatcaacgcctcgaccgaccgaaactcccgccgcatacaaacaacgaaacgaaatcgc

SEQ ID NO: 18067 - DNA, 531 bp, Artificial Sequence
  chemically treated genomic DNA (Homo sapiens) CpG-island No: 18067
tttcgggagttcgagggtgggcgttcggtagacgggattttgtttgagcggggattttggttttagggtttaggcgggggttttgagcgtttcggtcgtcgattttggatttcggaatttcggaattcgggattttcgggattttcgttagtcgcgcgttatttcgggttatggcgtcgtcgttcgagtttttcgtttaggttttcgcgcgtttagcgtagagtacgtttcgcgacgttaggtaacggttgtttggtaacggtgttattttcgttattattttcgtcgttatggcggcgttttggttacgtgattttttcggtgggagtatttcgtttacgttagcggtttttagggttgttttagtcgcgaatttcgttgttttttgtttcgcgggttttttaaggtagttttttgttagttcgatcggtttcgaagttcgcgtcggttgcggatttttcgtcgcgtttatttgttagcgtttcggtcggtcggggttttcgtcgtatgtaagtagcgaggcgaggtcgt

SEQ ID NO: 18068 - DNA, 531 bp, Artificial Sequence
  chemically treated genomic DNA (Homo sapiens) CpG-island No: 18068
acgacctcgcctcgctacttacatacgacgaaaaccccgaccgaccgaaacgctaacaaataaacgcgacgaaaaatccgcaaccgacgcgaacttcgaaaccgatcgaactaacaaaaaactaccttaaaaaacccgcgaaacaaaaaacaacgaaattcgcgactaaaacaaccctaaaaaccgctaacgtaaacgaaatactcccaccgaaaaaatcacgtaaccaaaacgccgccataacgacgaaaataataacgaaaataacaccgttaccaaacaaccgttacctaacgtcgcgaaacgtactctacgctaaacgcgcgaaaacctaaacgaaaaactcgaacgacgacgccataacccgaaataacgcgcgactaacgaaaatcccgaaaatcccgaattccgaaattccgaaatccaaaatcgacgaccgaaacgctcaaaacccccgcctaaaccctaaaaccaaaatccccgctcaaacaaaatcccgtctaccgaacgcccaccctcgaactcccgaaa

SEQ ID NO: 18069 - DNA, 661 bp, Artificial Sequence
  chemically treated genomic DNA (Homo sapiens) CpG-island No: 18069
cgggggaagattcgtttttttttcgtagttcgagttcggcgtagtttattgcggttgcgcgagtttggcgcgcgcggggcgggaacgcggaaggggttggggttgcggcgcggcggcgaggattagatcgggggcggggtcggtagtgggagtgcggggcgcgcggtgatagcgcggggttggcggcgtgggatttagggggcgatagaggtagtagtagttcgaggtttgaggagaggagatcggcggcggcggtaatgttggagatttttcgcgagcggttgttgagcgtgtagtaggattttattttcgggtgggtatacggtgggcgacgaaaagggatttgagggggtcgggtcgtcgtttgggatgtttttgtttcgttttttttttcgcgttacggtttagggttcgttttgtttcgtattttttcgtttcgtttcgtcgaggaaagtaacgaatttttcggcgttttcgcgtcgggcggcgtaaagtaatttaggtttttgcgggtcgtttgtgacgcgtattttttaggatcgggaggcgttcggcggcgtagcggagcgttcggggggggtgtgggattttgcggttttttttcggtagtattagttgggttttggagggaagttatgtgagaagttagcgcgttttatcg

SEQ ID NO: 18070 - DNA, 661 bp, Artificial Sequence
  chemically treated genomic DNA (Homo sapiens) CpG-island No: 18070
cgataaaacgcgctaacttctcacataacttccctccaaaacccaactaatactaccgaaaaaaaaccgcaaaatcccacaccccccccgaacgctccgctacgccgccgaacgcctcccgatcctaaaaaatacgcgtcacaaacgacccgcaaaaacctaaattactttacgccgcccgacgcgaaaacgccgaaaaattcgttactttcctcgacgaaacgaaacgaaaaaatacgaaacaaaacgaaccctaaaccgtaacgcgaaaaaaaaaacgaaacaaaaacatcccaaacgacgacccgaccccctcaaatcccttttcgtcgcccaccgtatacccacccgaaaataaaatcctactacacgctcaacaaccgctcgcgaaaaatctccaacattaccgccgccgccgatctcctctcctcaaacctcgaactactactacctctatcgccccctaaatcccacgccgccaaccccgcgctatcaccgcgcgccccgcactcccactaccgaccccgcccccgatctaatcctcgccgccgcgccgcaaccccaaccccttccgcgttcccgccccgcgcgcgccaaactcgcgcaaccgcaataaactacgccgaactcgaactacgaaaaaaaaacgaatcttcccccg

SEQ ID NO: 18071 - DNA, 661 bp, Artificial Sequence
  chemically treated genomic DNA (Homo sapiens) CpG-island No: 18071
cggtgaggcgcgttggttttttatatgatttttttttagggtttagttgatgttgtcgggaaaggatcgtagggttttatatttttttcgggcgtttcgttgcgtcgtcgagcgtttttcggttttggggggtgcgcgttataggcggttcgtagggatttaagttattttgcgtcgttcgacgcgaggacgtcgggaagttcgttatttttttcggcggggcggggcggggaggtgcgggataggacggattttggatcgtggcgcggggaagggagcgaggtaggggtattttaggcggcggttcggtttttttaggttttttttcgtcgtttatcgtatatttattcggaggtgaaattttgttgtacgtttagtagtcgttcgcgaagggtttttagtattgtcgtcgtcgtcggttttttttttttaggtttcgggttgttgttgtttttgtcgttttttgggttttacgtcgttaatttcgcgttgttatcgcgcgtttcgtatttttattatcggtttcgttttcggtttggttttcgtcgtcgcgtcgtaattttagtttttttcgcgttttcgtttcgcgcgcgttaggttcgcgtagtcgtagtggattgcgtcgggttcgggttgcggaaaaggggcgggttttttttcg

SEQ ID NO: 18072 - DNA, 661 bp, Artificial Sequence
  chemically treated genomic DNA (Homo sapiens) CpG-island No: 18072
cgaaaaaaaacccgccccttttccgcaacccgaacccgacgcaatccactacgactacgcgaacctaacgcgcgcgaaacgaaaacgcgaaaaaaactaaaattacgacgcgacgacgaaaaccaaaccgaaaacgaaaccgataataaaaatacgaaacgcgcgataacaacgcgaaattaacgacgtaaaacccaaaaaacgacaaaaacaacaacaacccgaaacctaaaaaaaaaaaaccgacgacgacgacaatactaaaaacccttcgcgaacgactactaaacgtacaacaaaatttcacctccgaataaatatacgataaacgacgaaaaaaaacctaaaaaaaccgaaccgccgcctaaaatacccctacctcgctcccttccccgcgccacgatccaaaatccgtcctatcccgcacctccccgccccgccccgccgaaaaaaataacgaacttcccgacgtcctcgcgtcgaacgacgcaaaataacttaaatccctacgaaccgcctataacgcgcaccccccaaaaccgaaaaacgctcgacgacgcaacgaaacgcccgaaaaaaatataaaaccctacgatcctttcccgacaacatcaactaaaccctaaaaaaaaatcatataaaaaaccaacgcgcctcaccg

SEQ ID NO: 18073 - DNA, 1197 bp, Artificial Sequence
  chemically treated genomic DNA (Homo sapiens) CpG-island No: 18073
tagtttcgcgttgtcgggggggcgggatatgtcggttgtttattagtgttcgcgattaattcgtaggtagtttcgttttcgtttttttcgggagagggcgcgcggaggattcgtcgtcgtcggtgtgaggcggttcgttttggtttttttgttcgggaagttcgtttaggtaattgagtttggtcgggtattttcggaggacgcgttatttttttacgtttcgtttcggtcgttgtatgggcggtgttcgggacgcgggggttgcgtttgtgcgggatcgcggggtagcggtcgttcgtgcgagtacgtttgattgacgcgtcggtcgtcgggtttgcggtttgtgggcggggttgtcgtgcgtgatagggtcgttcgtggtcgtcgggttgtgttcggggtcgcgtgagaaagttttgcgggattgagggttgggtgggtcgatcgggaacggcgcgcgttttcgtcgttatcgcgttttcgttttcgtttgcggtttgtttgggggtcgcggggcgtaggcgcggcgggtcgacgggcgggggttttttttacgggtgcgcgggcgtttttgttttcggcgtcgaagcggggtggggttttagggtagtttcgtttcgtcgcgttgaggtttcgtttcgtgttcgtttgtaggagtcgtcgtcgggtttcgttcgtttgtcgttttagttttagttttaattttagtcgtcgtcgttgcgtttgttttcgggcggttttggtttgtgtcgtcgtcgtttttagcgtcggagttatggcgggcgtcgcgtttttttgcgttaacggttgcgggttcggcgcgttttcggacgtcgaggtgttgtatttttgtcgtagtttcgaggtgggtatcgttatgattttgttttattttaagaagtcgtagcgattcgagcggaagattttttaggttaagttggagacgcgttagattacgtggagtcggggcgtcgataagatcgagggggttagtaagtgcgtttattttttgtttgggttcgtttcgcgcgggggtcgtgggagttcggttcgattgtttgtatttcggtcggtcgttttagcgatttgggtaaattttcgggtttttttagatttttttcgggtttcgttttcgtttcgtttcgggtggttattgggggcggggggtattcgggttttcggttatttgataggata

SEQ ID NO: 18074 - DNA, 1197 bp, Artificial Sequence
  chemically treated genomic DNA (Homo sapiens) CpG-island No: 18074
tatcctatcaaataaccgaaaacccgaataccccccgcccccaataaccacccgaaacgaaacgaaaacgaaacccgaaaaaaatctaaaaaaacccgaaaatttacccaaatcgctaaaacgaccgaccgaaatacaaacaatcgaaccgaactcccacgacccccgcgcgaaacgaacccaaacaaaaaataaacgcacttactaaccccctcgatcttatcgacgccccgactccacgtaatctaacgcgtctccaacttaacctaaaaaatcttccgctcgaatcgctacgacttcttaaaataaaacaaaatcataacgatacccacctcgaaactacgacaaaaatacaacacctcgacgtccgaaaacgcgccgaacccgcaaccgttaacgcaaaaaaacgcgacgcccgccataactccgacgctaaaaacgacgacgacacaaaccaaaaccgcccgaaaacaaacgcaacgacgacgactaaaattaaaactaaaactaaaacgacaaacgaacgaaacccgacgacgactcctacaaacgaacacgaaacgaaacctcaacgcgacgaaacgaaactaccctaaaaccccaccccgcttcgacgccgaaaacaaaaacgcccgcgcacccgtaaaaaaaacccccgcccgtcgacccgccgcgcctacgccccgcgacccccaaacaaaccgcaaacgaaaacgaaaacgcgataacgacgaaaacgcgcgccgttcccgatcgacccacccaaccctcaatcccgcaaaactttctcacgcgaccccgaacacaacccgacgaccacgaacgaccctatcacgcacgacaaccccgcccacaaaccgcaaacccgacgaccgacgcgtcaatcaaacgtactcgcacgaacgaccgctaccccgcgatcccgcacaaacgcaacccccgcgtcccgaacaccgcccatacaacgaccgaaacgaaacgtaaaaaaataacgcgtcctccgaaaatacccgaccaaactcaattacctaaacgaacttcccgaacaaaaaaaccaaaacgaaccgcctcacaccgacgacgacgaatcctccgcgcgccctctcccgaaaaaaacgaaaacgaaactacctacgaattaatcgcgaacactaataaacaaccgacatatcccgcccccccgacaacgcgaaacta

SEQ ID NO: 18075 - DNA, 1197 bp, Artificial Sequence
  chemically treated genomic DNA (Homo sapiens) CpG-island No: 18075
tgttttgttaggtgatcgaggattcggatgtttttcgtttttagtgattattcgagacgaagcgggggcggggttcggagggagtttgggagggttcgaaagtttgtttaagtcgttggggcggtcggtcggggtgtaagtagtcgggtcgggtttttacgattttcgcgcggggcgggtttaggtaggaagtgggcgtatttattggttttttcgattttgtcggcgtttcggttttacgtgatttggcgcgtttttagtttgatttggaaggtttttcgttcgggtcgttgcgattttttggagtagaataaagttatgacggtgtttatttcgaggttgcggtagaggtgtagtatttcggcgttcgagggcgcgtcgggttcgtagtcgttggcgtaaggggacgcggcgttcgttatggtttcgacgttgggggcggcggcggtataggttaggatcgttcgggagtaagcgtaacggcggcggttgaggttggggttgaggttgaggcggtagacgagcgggattcggcggcggtttttgtaggcggatacggggcggggttttagcgcggcggggcggggttgttttgaggttttatttcgtttcggcgtcgggaataaaggcgttcgcgtattcgtggggaggattttcgttcgtcggttcgtcgcgtttgcgtttcgcgatttttagataggtcgtaggcggggacggaggcgcgatggcggcgggagcgcgcgtcgttttcggtcgatttatttagtttttagtttcgtagagtttttttacgcggtttcggatatagttcggcggttacgagcggttttgttacgtacggtagtttcgtttataggtcgtaggttcggcggtcggcgcgttagttaggcgtattcgtacgggcggtcgttatttcgcggtttcgtatagacgtagttttcgcgtttcgaatatcgtttatgtagcgatcgggacgggacgtgaggggatggcgcgtttttcgggaatgttcggttaaatttagttatttgggcgggtttttcggataagggagttaggacgggtcgttttatatcggcggcggcgggtttttcgcgcgttttttttcgggaggggcgggggcggggttgtttgcggattggtcgcgggtattgatggatagtcgatatgtttcgttttttcggtagcgcggggttg

SEQ ID NO: 18076 - DNA, 1197 bp, Artificial Sequence
  chemically treated genomic DNA (Homo sapiens) CpG-island No: 18076
caaccccgcgctaccgaaaaaacgaaacatatcgactatccatcaatacccgcgaccaatccgcaaacaaccccgcccccgcccctcccgaaaaaaaacgcgcgaaaaacccgccgccgccgatataaaacgacccgtcctaactcccttatccgaaaaacccgcccaaataactaaatttaaccgaacattcccgaaaaacgcgccatcccctcacgtcccgtcccgatcgctacataaacgatattcgaaacgcgaaaactacgtctatacgaaaccgcgaaataacgaccgcccgtacgaatacgcctaactaacgcgccgaccgccgaacctacgacctataaacgaaactaccgtacgtaacaaaaccgctcgtaaccgccgaactatatccgaaaccgcgtaaaaaaactctacgaaactaaaaactaaataaatcgaccgaaaacgacgcgcgctcccgccgccatcgcgcctccgtccccgcctacgacctatctaaaaatcgcgaaacgcaaacgcgacgaaccgacgaacgaaaatcctccccacgaatacgcgaacgcctttattcccgacgccgaaacgaaataaaacctcaaaacaaccccgccccgccgcgctaaaaccccgccccgtatccgcctacaaaaaccgccgccgaatcccgctcgtctaccgcctcaacctcaaccccaacctcaaccgccgccgttacgcttactcccgaacgatcctaacctataccgccgccgcccccaacgtcgaaaccataacgaacgccgcgtccccttacgccaacgactacgaacccgacgcgccctcgaacgccgaaatactacacctctaccgcaacctcgaaataaacaccgtcataactttattctactccaaaaaatcgcaacgacccgaacgaaaaaccttccaaatcaaactaaaaacgcgccaaatcacgtaaaaccgaaacgccgacaaaatcgaaaaaaccaataaatacgcccacttcctacctaaacccgccccgcgcgaaaatcgtaaaaacccgacccgactacttacaccccgaccgaccgccccaacgacttaaacaaactttcgaaccctcccaaactccctccgaaccccgcccccgcttcgtctcgaataatcactaaaaacgaaaaacatccgaatcctcgatcacctaacaaaaca

SEQ ID NO: 18077 - DNA, 613 bp, Artificial Sequence
  chemically treated genomic DNA (Homo sapiens) CpG-island No: 18077
tgtttcgcggcgtaggtggcgtaagggttcgcggcgcggtttataggattcgaattttcggcggggtatttgaaggcgcggatgaacgcggatagggtttttaggattaatttattttatggttttttacgtcgcgttaatcggaaaagagattagtatgttttgcgtatgcgtttaaatagtggttttgatttcgcgataatgttttgtttttcggttttattcgtagagcggttgggtgggttaatttcgagaagcgcggttttttttggtcgttggggggcgtcgttgggtcgttaggtcggcgcggtaatttatagagttgtcgtagttttgagcgtttcgcggtttttcggtaatgtgtcgattcgcgttcgttgttgttggatttttagggaagcggttgggttcggggttcgagtttcggtagttatacgtattggtatagtttagtgatgtttattgatagcgtggatttcggtacgtttgttttttaaattttttttttttcgcgtttttcgtattagtttatgtttttaaaaggaagtttggttcgattttttttttttagtattttgttttaacgtggattcgtggtaagggaagtgttcgg

SEQ ID NO: 18078 - DNA, 613 bp, Artificial Sequence
  chemically treated genomic DNA (Homo sapiens) CpG-island No: 18078
ccgaacacttcccttaccacgaatccacgttaaaacaaaatactaaaaaaaaaaaatcgaaccaaacttccttttaaaaacataaactaatacgaaaaacgcgaaaaaaaaaaaatttaaaaaacaaacgtaccgaaatccacgctatcaataaacatcactaaactataccaatacgtataactaccgaaactcgaaccccgaacccaaccgcttccctaaaaatccaacaacaacgaacgcgaatcgacacattaccgaaaaaccgcgaaacgctcaaaactacgacaactctataaattaccgcgccgacctaacgacccaacgacgccccccaacgaccaaaaaaaaccgcgcttctcgaaattaacccacccaaccgctctacgaataaaaccgaaaaacaaaacattatcgcgaaatcaaaaccactatttaaacgcatacgcaaaacatactaatctcttttccgattaacgcgacgtaaaaaaccataaaataaattaatcctaaaaaccctatccgcgttcatccgcgccttcaaataccccgccgaaaattcgaatcctataaaccgcgccgcgaacccttacgccacctacgccgcgaaaca

SEQ ID NO: 18079 - DNA, 613 bp, Artificial Sequence
  chemically treated genomic DNA (Homo sapiens) CpG-island No: 18079
tcggatattttttttattacgagtttacgttagagtaaggtgttgagggagggaggtcgggttaggtttttttttgagaatataagttggtgcggagggcgcgaggggagaggggtttgagggataagcgtgtcggaatttacgttgttagtgaatattattgggttgtattagtacgtgtgattatcgaagttcgagtttcgaatttagtcgtttttttaggggtttagtagtagcgggcgcgaatcggtatattatcgggggatcgcggggcgtttaggattgcgataattttgtgggttatcgcgtcggtttagcggtttagcgacgttttttagcggttagagaaggtcgcgtttttcggggttggtttatttaatcgttttgcgggtaggatcgaggagtaaagtattatcgcgagattagggttattatttgagcgtatgcgtaagatatgttagtttttttttcggttagcgcggcgtgagaagttatgaggtgagttggttttgaaagttttattcgcgtttattcgcgtttttaggtgtttcgtcgagggttcggattttgtaggtcgcgtcgcggatttttgcgttatttgcgtcgcggggta

SEQ ID NO: 18080 - DNA, 613 bp, Artificial Sequence
  chemically treated genomic DNA (Homo sapiens) CpG-island No: 18080
taccccgcgacgcaaataacgcaaaaatccgcgacgcgacctacaaaatccgaaccctcgacgaaacacctaaaaacgcgaataaacgcgaataaaactttcaaaaccaactcacctcataacttctcacgccgcgctaaccgaaaaaaaaactaacatatcttacgcatacgctcaaataataaccctaatctcgcgataatactttactcctcgatcctacccgcaaaacgattaaataaaccaaccccgaaaaacgcgaccttctctaaccgctaaaaaacgtcgctaaaccgctaaaccgacgcgataacccacaaaattatcgcaatcctaaacgccccgcgatcccccgataatataccgattcgcgcccgctactactaaacccctaaaaaaacgactaaattcgaaactcgaacttcgataatcacacgtactaatacaacccaataatattcactaacaacgtaaattccgacacgcttatccctcaaacccctctcccctcgcgccctccgcaccaacttatattctcaaaaaaaaacctaacccgacctccctccctcaacaccttactctaacgtaaactcgtaataaaaaaaatatccga

SEQ ID NO: 18081 - DNA, 561 bp, Artificial Sequence
  chemically treated genomic DNA (Homo sapiens) CpG-island No: 18081
ggcgtttatatggtaacgtacgacggttgatcggagcgggtcggagtattaggaagtcgtcgtgacgttgttcgcggatttcggtagtttttcgtatttcgtttttcgtcgtcgggttttgcgttttagtttcgttggtcgtttcggtttaggttcggcgttttttttcgttatttgtttgatcgtttttttcgtttcggattgatttgtttcggttgtttacggcgttatcgtcgtcgtttcgtaggtttcgtagaattttttcgtttttgttaaaattttttttattaatttttaggttcgcggcggtcgtagcgttatacgtttcgcggttcggtttcgttttcgttagcgagacgttatcgcgttgttcggtttttttttttttacgttttttttcgttcggcggcggttaattattacgttttttggagatttttttaattttgttttttcgtttatcgtacgttgtttcgggttagtttgtggcgttttttggtgcgggatgcggacgtagtagttaagggaggagtaggggagcgttaggtttagtagaataag

SEQ ID NO: 18082 - DNA, 561 bp, Artificial Sequence
  chemically treated genomic DNA (Homo sapiens) CpG-island No: 18082
cttattctactaaacctaacgctcccctactcctcccttaactactacgtccgcatcccgcaccaaaaaacgccacaaactaacccgaaacaacgtacgataaacgaaaaaacaaaattaaaaaaatctccaaaaaacgtaataattaaccgccgccgaacgaaaaaaaacgtaaaaaaaaaaaaaccgaacaacgcgataacgtctcgctaacgaaaacgaaaccgaaccgcgaaacgtataacgctacgaccgccgcgaacctaaaaattaataaaaaaaattttaacaaaaacgaaaaaattctacgaaacctacgaaacgacgacgataacgccgtaaacaaccgaaacaaatcaatccgaaacgaaaaaaacgatcaaacaaataacgaaaaaaaacgccgaacctaaaccgaaacgaccaacgaaactaaaacgcaaaacccgacgacgaaaaacgaaatacgaaaaactaccgaaatccgcgaacaacgtcacgacgacttcctaatactccgacccgctccgatcaaccgtcgtacgttaccatataaacgcc

SEQ ID NO: 18083 - DNA, 561 bp, Artificial Sequence
  chemically treated genomic DNA (Homo sapiens) CpG-island No: 18083
tttgttttattggatttggcgtttttttgttttttttttagttgttacgttcgtatttcgtattagagggcgttataggttggttcggggtagcgtgcggtgggcggagaggtagaattaggggagtttttaggaggcgtggtgattggtcgtcgtcgggcggaagggggcgtggggagggaaaggtcgagtagcgcggtgacgtttcgttggcgggggcggggtcgggtcgcggagcgtgtgacgttgcggtcgtcgcggatttggggattaatgggaaaagttttggtaggagcgggagaattttgcggagtttgcgggacggcggcggtggcgtcgtaggtagtcgggataggttagttcgagacgagagaagcggttaggtaagtggcggagggaagcgtcgggtttgggtcgaggcggttagcgggattggggcgtaaggttcggcggcggggaacggggtgcggggagttgtcggggttcgcggatagcgttacggcggttttttgatgtttcggttcgtttcggttagtcgtcgtgcgttgttatgtaggcgtt

SEQ ID NO: 18084 - DNA, 561 bp, Artificial Sequence
  chemically treated genomic DNA (Homo sapiens) CpG-island No: 18084
aacgcctacataacaacgcacgacgactaaccgaaacgaaccgaaacatcaaaaaaccgccgtaacgctatccgcgaaccccgacaactccccgcaccccgttccccgccgccgaaccttacgccccaatcccgctaaccgcctcgacccaaacccgacgcttccctccgccacttacctaaccgcttctctcgtctcgaactaacctatcccgactacctacgacgccaccgccgccgtcccgcaaactccgcaaaattctcccgctcctaccaaaacttttcccattaatccccaaatccgcgacgaccgcaacgtcacacgctccgcgacccgaccccgcccccgccaacgaaacgtcaccgcgctactcgacctttccctccccacgcccccttccgcccgacgacgaccaatcaccacgcctcctaaaaactcccctaattctacctctccgcccaccgcacgctaccccgaaccaacctataacgccctctaatacgaaatacgaacgtaacaactaaaaaaaaaacaaaaaaacgccaaatccaataaaacaaa

SEQ ID NO: 18085 - DNA, 694 bp, Artificial Sequence
  chemically treated genomic DNA (Homo sapiens) CpG-island No: 18085
tcgttttttcggtttcgttttaatttcgcggtttcgtttttttttttcggtttcgtttcgttttttcgggttcgtcgtttttcgcggttttcgcgtttttttttcgggtcgcgttaggtcgggtttgcggcggttgtgtcgtatttagagagtcggggagtcgttttcgtatttaggttttttcgcgttgtttggtcgttggtgaagttcgcggcgcgcgtttttttcggattttgtagggtacggttttttttttatttttttttttcgtgggtttttgttttttttttttggcgtcggggcggggtcggggtcgagttagcgcgtagtttcgcgttttggggagtttggacgtttggtagaggttttcgttgttcgttttttttcgttcgcggtttcgcgttttcgcgttttcgttttacgtttgcggggtttgttggggtttttgagaattgttgacgtgtttcgggttttttttacgttatagtttgtttgtaggttgtgaggcgtcgttcggacgtgtgcgcggtttagggttgtttatatcgcgggggattgcgggtcgttttatattcgcgtttagtgttgcgtcggtagttacgcgtcggttatatgttcgtttgtgtttgtgatttttgtgtttgttgttttgatttttttttgatattcgatggtttttgtttaattaggtttg

SEQ ID NO: 18086 - DNA, 694 bp, Artificial Sequence
  chemically treated genomic DNA (Homo sapiens) CpG-island No: 18086
caaacctaattaaacaaaaaccatcgaatatcaaaaaaaaatcaaaacaacaaacacaaaaatcacaaacacaaacgaacatataaccgacgcgtaactaccgacgcaacactaaacgcgaatataaaacgacccgcaatcccccgcgatataaacaaccctaaaccgcgcacacgtccgaacgacgcctcacaacctacaaacaaactataacgtaaaaaaaacccgaaacacgtcaacaattctcaaaaaccccaacaaaccccgcaaacgtaaaacgaaaacgcgaaaacgcgaaaccgcgaacgaaaaaaaacgaacaacgaaaacctctaccaaacgtccaaactccccaaaacgcgaaactacgcgctaactcgaccccgaccccgccccgacgccaaaaaaaaaaaacaaaaacccacgaaaaaaaaaaataaaaaaaaaaccgtaccctacaaaatccgaaaaaaacgcgcgccgcgaacttcaccaacgaccaaacaacgcgaaaaaacctaaatacgaaaacgactccccgactctctaaatacgacacaaccgccgcaaacccgacctaacgcgacccgaaaaaaaaacgcgaaaaccgcgaaaaacgacgaacccgaaaaaacgaaacgaaaccgaaaaaaaaaaacgaaaccgcgaaattaaaacgaaaccgaaaaaacga

SEQ ID NO: 18087 - DNA, 694 bp, Artificial Sequence
  chemically treated genomic DNA (Homo sapiens) CpG-island No: 18087
taggtttggttaggtaaaaattatcggatgttagagggaaattaaggtagtaggtataggaattataagtataggcgggtatgtggtcgacgcgtggttgtcggcgtagtattgagcgcgggtgtggggcgattcgtagtttttcgcggtgtaaataattttgagtcgcgtatacgttcgaacgacgttttatagtttgtaggtagattgtagcgtagaaagagttcgaggtacgttagtagtttttaagggttttagtaagtttcgtaagcgtgaagcggaggcgcgggggcgcggggtcgcgggcggggaggggcgggtagcgggggtttttgttaggcgtttagattttttaaagcgcggagttgcgcgttggttcggtttcggtttcgtttcggcgttaaaggaagaagatagagatttacgggagggagaagtaaaggaagggtcgtattttgtagggttcgggagaggcgcgcgtcgcgggttttattagcgattaggtagcgcgagaaggtttgggtgcgggggcggtttttcgattttttagatgcggtataatcgtcgtaagttcggtttagcgcgattcggaaggaagacgcggaggtcgcgaggagcggcgggttcggggaggcggggcggagtcggggaggaggggcggggtcgcggggttggggcggggtcggggaggcgg

SEQ ID NO: 18088 - DNA, 694 bp, Artificial Sequence
  chemically treated genomic DNA (Homo sapiens) CpG-island No: 18088
ccgcctccccgaccccgccccaaccccgcgaccccgcccctcctccccgactccgccccgcctccccgaacccgccgctcctcgcgacctccgcgtcttccttccgaatcgcgctaaaccgaacttacgacgattataccgcatctaaaaaatcgaaaaaccgcccccgcacccaaaccttctcgcgctacctaatcgctaataaaacccgcgacgcgcgcctctcccgaaccctacaaaatacgacccttcctttacttctccctcccgtaaatctctatcttcttcctttaacgccgaaacgaaaccgaaaccgaaccaacgcgcaactccgcgctttaaaaaatctaaacgcctaacaaaaacccccgctacccgcccctccccgcccgcgaccccgcgcccccgcgcctccgcttcacgcttacgaaacttactaaaacccttaaaaactactaacgtacctcgaactctttctacgctacaatctacctacaaactataaaacgtcgttcgaacgtatacgcgactcaaaattatttacaccgcgaaaaactacgaatcgccccacacccgcgctcaatactacgccgacaaccacgcgtcgaccacatacccgcctatacttataattcctatacctactaccttaatttccctctaacatccgataatttttacctaaccaaaccta

SEQ ID NO: 18089 - DNA, 885 bp, Artificial Sequence
  chemically treated genomic DNA (Homo sapiens) CpG-island No: 18089
ttacggggagtcgtcgtcgtcgttttcgtcgtcgttttcgtttttttcgtcgtcgttatcgttttcgtcgtcgtcgtcgtgggatagcgcggtgatttattggtgagcgtggttgagcgggtgttcgttgttttgtagagcgtcgtagtcgttttgtattaggttttgcgtttcgcggtagtttttcgcgttttgttgtatgtcgtcgggcggttcggcgtgtacgatggaggcgttggaggtgagtaggttgtagtggttagacgttgcggtcgttatgattttcggagtcggattgagcgtttcggttaaaggagtcgcgtatttgatagttattttttcgtttcgggtttttttttttcgttcgttttttttgtttttttttttttttatagcgggtagtttcgacgttcgtttcgacgttttttgttgttgtttttgttattattgttgttgttgtcgtcgtcgtcgtttttcgttcgttttcgttttttttttttttttttttttttttttcgttttcgtttattttttgattagttcggcgtttttttttttttttgttttttttagttttttttcgtttttttggtagcgtcggttcgtagcggtacgcgtttgggtttcgtttttttcgtttttttttattggtttcgcgttttttgatttacgtggatatcgttagtaattttttaggtcggcgttattgattggcgtagagttattttttttttttttttcgggttcggagtttttttagttttttttttcgtttttttcgtttttcgatttagatttttttagtttttattttttcgttttttttttattcggggtttttttcgttttttttcggatgggtttcgttttttatttgttttttag

SEQ ID NO: 18090 - DNA, 885 bp, Artificial Sequence
  chemically treated genomic DNA (Homo sapiens) CpG-island No: 18090
ctaaaaaacaaataaaaaacgaaacccatccgaaaaaaaacgaaaaaaaccccgaataaaaaaaaaacgaaaaaataaaaactaaaaaaatctaaatcgaaaaacgaaaaaaacgaaaaaaaaaactaaaaaaactccgaacccgaaaaaaaaaaaaaaaataactctacgccaatcaataacgccgacctaaaaaattactaacgatatccacgtaaatcaaaaaacgcgaaaccaataaaaaaaaacgaaaaaaacgaaacccaaacgcgtaccgctacgaaccgacgctaccaaaaaaacgaaaaaaaactaaaaaaaacaaaaaaaaaaaaaaacgccgaactaatcaaaaaataaacgaaaacgaaaaaaaaaaaaaaaaaaaaaaaaaaaacgaaaacgaacgaaaaacgacgacgacgacaacaacaacaataataacaaaaacaacaacaaaaaacgtcgaaacgaacgtcgaaactacccgctataaaaaaaaaaaaaaacaaaaaaaacgaacgaaaaaaaaaaacccgaaacgaaaaaataactatcaaatacgcgactcctttaaccgaaacgctcaatccgactccgaaaatcataacgaccgcaacgtctaaccactacaacctactcacctccaacgcctccatcgtacacgccgaaccgcccgacgacatacaacaaaacgcgaaaaactaccgcgaaacgcaaaacctaatacaaaacgactacgacgctctacaaaacaacgaacacccgctcaaccacgctcaccaataaatcaccgcgctatcccacgacgacgacgacgaaaacgataacgacgacgaaaaaaacgaaaacgacgacgaaaacgacgacgacgactccccgtaa

SEQ ID NO: 18091 - DNA, 885 bp, Artificial Sequence
  chemically treated genomic DNA (Homo sapiens) CpG-island No: 18091
ttgggagatagatggggggcggggtttattcgagagagggcggaggaggtttcgggtgaggaagaagcgggggggtgagaattgagagaatttgaatcgggaggcgaaggggacggggaggagggttaggaggatttcgagttcgggggagggggagggagtagttttgcgttaattagtggcgtcggtttgggaggttgttagcggtatttacgtaaattaaagggcgcggagttaatgggagggggcggagggggcggggtttaggcgcgtgtcgttgcgagtcggcgttgttaagagagcgggagagagttggagagagtagggagaggggggagcgtcgagttagttagagagtgagcgagagcgagaaggagggagaggaggagaaagagagcgagggcgggcgggaggcggcggcggcggtagtagtagtagtaatagtaggagtagtaatagaaggcgtcggagcgggcgtcggagttgttcgttgtgggagagagaggagatagaaagagcgagcgaggagagggagttcgaggcgaaaaagtaattgttaaatgcgcggtttttttaatcggagcgtttagttcggtttcgagagttatggcgatcgtagcgtttaattattatagtttgtttatttttagcgtttttatcgtgtacgtcgagtcgttcggcggtatgtagtagggcgcggggggttatcgcgaagcgtagagtttggtgtagggcgattacggcgttttgtagagtaacggatattcgtttagttacgtttattagtggattatcgcgttgttttacggcggcggcggcgggggcggtggcggcggcggggggggcgggggcggcggcgggggcggcggcgacggtttttcgtgg

SEQ ID NO: 18092 - DNA, 885 bp, Artificial Sequence
  chemically treated genomic DNA (Homo sapiens) CpG-island No: 18092
ccacgaaaaaccgtcgccgccgcccccgccgccgcccccgccccccccgccgccgccaccgcccccgccgccgccgccgtaaaacaacgcgataatccactaataaacgtaactaaacgaatatccgttactctacaaaacgccgtaatcgccctacaccaaactctacgcttcgcgataaccccccgcgccctactacataccgccgaacgactcgacgtacacgataaaaacgctaaaaataaacaaactataataattaaacgctacgatcgccataactctcgaaaccgaactaaacgctccgattaaaaaaaccgcgcatttaacaattactttttcgcctcgaactccctctcctcgctcgctctttctatctcctctctctcccacaacgaacaactccgacgcccgctccgacgccttctattactactcctactattactactactactaccgccgccgccgcctcccgcccgccctcgctctctttctcctcctctccctccttctcgctctcgctcactctctaactaactcgacgctcccccctctccctactctctccaactctctcccgctctcttaacaacgccgactcgcaacgacacgcgcctaaaccccgccccctccgccccctcccattaactccgcgccctttaatttacgtaaataccgctaacaacctcccaaaccgacgccactaattaacgcaaaactactccctccccctcccccgaactcgaaatcctcctaaccctcctccccgtccccttcgcctcccgattcaaattctctcaattctcacccccccgcttcttcctcacccgaaacctcctccgccctctctcgaataaaccccgccccccatctatctcccaa

SEQ ID NO: 18093 - DNA, 568 bp, Artificial Sequence
  chemically treated genomic DNA (Homo sapiens) CpG-island No: 18093
cgtagagcgcgcgttcgtgggggtaatcggcggaaaattagggacgcgggtatagtcgtagattgggcgtggggggtatcggaatggtcgagtttgggacgttgggatttttggtcgtcgcggggcgattaggcgggcggagacgtttcgcgttttttcgggtcgcgcggttttaggcgtatttttgtatttagttttcgcgcgtcgcgttgcgttgtttttttcggatagttgatttattggttcggtcgtttagattgtttggcgtcggttgcgtgacgttatttatttacggagttcgtttttttcgtttcgttggcgtcggtcgggcggtcgttttgataacgtagacgttagttcgtataatgatttttagttggagtagtttagttagtttgcgcgtttattcgtttgtttgcgttgggttttagggcgttcgggtgagtttttttttttttttttcgttttttttttttttttaggttttcgcgggttttttttgttagggaatttattcgttgtagttttttagggttttggttttagttttttttgaagcgcgtttgta

SEQ ID NO: 18094 - DNA, 568 bp, Artificial Sequence
  chemically treated genomic DNA (Homo sapiens) CpG-island No: 18094
tacaaacgcgcttcaaaaaaaactaaaaccaaaaccctaaaaaactacaacgaataaattccctaacaaaaaaaacccgcgaaaacctaaaaaaaaaaaaaaaacgaaaaaaaaaaaaaaaaactcacccgaacgccctaaaacccaacgcaaacaaacgaataaacgcgcaaactaactaaactactccaactaaaaatcattatacgaactaacgtctacgttatcaaaacgaccgcccgaccgacgccaacgaaacgaaaaaaacgaactccgtaaataaataacgtcacgcaaccgacgccaaacaatctaaacgaccgaaccaataaatcaactatccgaaaaaaacaacgcaacgcgacgcgcgaaaactaaatacaaaaatacgcctaaaaccgcgcgacccgaaaaaacgcgaaacgtctccgcccgcctaatcgccccgcgacgaccaaaaatcccaacgtcccaaactcgaccattccgataccccccacgcccaatctacgactatacccgcgtccctaattttccgccgattacccccacgaacgcgcgctctacg

SEQ ID NO: 18095 - DNA, 568 bp, Artificial Sequence
  chemically treated genomic DNA (Homo sapiens) CpG-island No: 18095
tgtaagcgcgttttagaaaggattgggattagagttttagaaaattatagcgagtggattttttggtaggggaaattcgcgagagtttgggaaaaaaaaaaaaacgagagggagagaaaaaaatttattcgggcgttttgaagtttagcgtaagtaagcgagtgagcgcgtaggttggttgggttgttttagttggaagttattgtgcgggttggcgtttgcgttgttagggcgatcgttcggtcggcgttagcggagcgggggaggcgggtttcgtgaatgggtgacgttacgtagtcggcgttaggtagtttgggcggtcgagttaatgaattagttgttcgggggaggtagcgtagcgcggcgcgcgggagttgggtgtaggaatgcgtttggagtcgcgcggttcgggagggcgcgagacgttttcgttcgtttggtcgtttcgcggcggttagaggttttagcgttttaggttcggttatttcggtgttttttacgtttagtttgcggttgtgttcgcgtttttagtttttcgtcggttatttttacgggcgcgcgttttgcg

SEQ ID NO: 18096 - DNA, 568 bp, Artificial Sequence
  chemically treated genomic DNA (Homo sapiens) CpG-island No: 18096
cgcaaaacgcgcgcccgtaaaaataaccgacgaaaaactaaaaacgcgaacacaaccgcaaactaaacgtaaaaaacaccgaaataaccgaacctaaaacgctaaaacctctaaccgccgcgaaacgaccaaacgaacgaaaacgtctcgcgccctcccgaaccgcgcgactccaaacgcattcctacacccaactcccgcgcgccgcgctacgctacctcccccgaacaactaattcattaactcgaccgcccaaactacctaacgccgactacgtaacgtcacccattcacgaaacccgcctcccccgctccgctaacgccgaccgaacgatcgccctaacaacgcaaacgccaacccgcacaataacttccaactaaaacaacccaaccaacctacgcgctcactcgcttacttacgctaaacttcaaaacgcccgaataaatttttttctctccctctcgtttttttttttttcccaaactctcgcgaatttcccctaccaaaaaatccactcgctataattttctaaaactctaatcccaatcctttctaaaacgcgcttaca

SEQ ID NO: 18097 - DNA, 821 bp, Artificial Sequence
  chemically treated genomic DNA (Homo sapiens) CpG-island No: 18097
agggcgttcggcgttaggaagtttgggtttgggtttttatacgagttcggcgcgtttcgggcgggtttcgggcgcgggttcgtggtttttcgggtcgggtatttgtttcgaatcgaggcgcgaggcgcggtggggcggtggggtggggtggggtaggttggggtgggggcggggtggcgttacgtgttagcggcggtttcgggaaggttttatttttttcgcggttcgtattcgcggcgttcggggtttttttttcgtttcgttcgcggcgtttttcgcggtcgtatagtcgggcgatttcgggtcgggtttcgtttttttcgttggcggatttagcgcgtttttcgttagttttcgcgtttgttgttttcgttatttagttggtgcggtttatggcgagcgtattatggcgattgaaggtaagtggaggttgatagcggggagcgaggatcgggattatttagttggcggggggttcggaggtgcgtcggtaggtcgaggcgttgacggggtcgttttttgtggtttggagtcggttgaagacgcgcgggggttttggtcgcgtttcgggaggcgggtgggcggagcggcgtcgttgggacgtcgggttcgattggttcgttcgtttcggttttcgtggttttgtcggtttttcggcggtcgtacgcggggtaaagcgggttggcgggtaggtatagcgttcgggtcgtcgttttttgtcggtcgcgcggagtggaggtcggggtgaggttttgtagattttacgggacgggttgggaggagcgaggggttacggggggtttaggttgtttttttttttt

SEQ ID NO: 18098 - DNA, 821 bp, Artificial Sequence
  chemically treated genomic DNA (Homo sapiens) CpG-island No: 18098
aaaaaaaaaaaacaacctaaaccccccgtaacccctcgctcctcccaacccgtcccgtaaaatctacaaaacctcaccccgacctccactccgcgcgaccgacaaaaaacgacgacccgaacgctatacctacccgccaacccgctttaccccgcgtacgaccgccgaaaaaccgacaaaaccacgaaaaccgaaacgaacgaaccaatcgaacccgacgtcccaacgacgccgctccgcccacccgcctcccgaaacgcgaccaaaacccccgcgcgtcttcaaccgactccaaaccacaaaaaacgaccccgtcaacgcctcgacctaccgacgcacctccgaaccccccgccaactaaataatcccgatcctcgctccccgctatcaacctccacttaccttcaatcgccataatacgctcgccataaaccgcaccaactaaataacgaaaacaacaaacgcgaaaactaacgaaaaacgcgctaaatccgccaacgaaaaaaacgaaacccgacccgaaatcgcccgactatacgaccgcgaaaaacgccgcgaacgaaacgaaaaaaaaaccccgaacgccgcgaatacgaaccgcgaaaaaaataaaaccttcccgaaaccgccgctaacacgtaacgccaccccgcccccaccccaacctaccccaccccaccccaccgccccaccgcgcctcgcgcctcgattcgaaacaaatacccgacccgaaaaaccacgaacccgcgcccgaaacccgcccgaaacgcgccgaactcgtataaaaacccaaacccaaacttcctaacgccgaacgccct

SEQ ID NO: 18099 - DNA, 821 bp, Artificial Sequence
  chemically treated genomic DNA (Homo sapiens) CpG-island No: 18099
gaaaagaaagggtagtttgagtttttcgtggtttttcgttttttttagttcgtttcgtggggtttgtagggttttatttcgatttttatttcgcgcggtcggtaggaggcggcggttcggacgttgtatttgttcgttagttcgttttgtttcgcgtgcggtcgtcgggaggtcggtaaaattacgaaggtcggggcgagcgagttagtcgggttcggcgttttagcggcgtcgtttcgtttattcgtttttcgagacgcggttaggattttcgcgcgtttttagtcggttttagattataggaggcggtttcgttagcgtttcggtttgtcggcgtattttcgagtttttcgttagttgggtggtttcggttttcgtttttcgttgttagtttttatttatttttaatcgttatgatgcgttcgttatggatcgtattaattggatggcgggggtagtagacgcgagggttggcggaggacgcgttgagttcgttagcgagaggggcggggttcggttcggagtcgttcggttgtgcggtcgcgaggggcgtcgcgggcggggcgagggaggggtttcgagcgtcgcgagtgcgggtcgcggaagaaatggaattttttcggggtcgtcgttggtacgtgacgttatttcgtttttattttaatttattttattttattttatcgttttatcgcgtttcgcgtttcgattcgaaataggtgttcggttcggagagttacgggttcgcgttcgagattcgttcgaagcgcgtcgagttcgtgtgggggtttaagtttaagttttttggcgtcgggcgtttt

SEQ ID NO: 18100 - DNA, 821 bp, Artificial Sequence
  chemically treated genomic DNA (Homo sapiens) CpG-island No: 18100
aaaacgcccgacgccaaaaaacttaaacttaaacccccacacgaactcgacgcgcttcgaacgaatctcgaacgcgaacccgtaactctccgaaccgaacacctatttcgaatcgaaacgcgaaacgcgataaaacgataaaataaaataaaataaattaaaataaaaacgaaataacgtcacgtaccaacgacgaccccgaaaaaattccatttcttccgcgacccgcactcgcgacgctcgaaacccctccctcgccccgcccgcgacgcccctcgcgaccgcacaaccgaacgactccgaaccgaaccccgcccctctcgctaacgaactcaacgcgtcctccgccaaccctcgcgtctactacccccgccatccaattaatacgatccataacgaacgcatcataacgattaaaaataaataaaaactaacaacgaaaaacgaaaaccgaaaccacccaactaacgaaaaactcgaaaatacgccgacaaaccgaaacgctaacgaaaccgcctcctataatctaaaaccgactaaaaacgcgcgaaaatcctaaccgcgtctcgaaaaacgaataaacgaaacgacgccgctaaaacgccgaacccgactaactcgctcgccccgaccttcgtaattttaccgacctcccgacgaccgcacgcgaaacaaaacgaactaacgaacaaatacaacgtccgaaccgccgcctcctaccgaccgcgcgaaataaaaatcgaaataaaaccctacaaaccccacgaaacgaactaaaaaaaacgaaaaaccacgaaaaactcaaactaccctttcttttc

SEQ ID NO: 18101 - DNA, 656 bp, Artificial Sequence
  chemically treated genomic DNA (Homo sapiens) CpG-island No: 18101
taattcgcgttttcgtttcgtcgtcgtcgttatgtacgacgtagagcgcggttggagtttgtttttcgcgggttgcggttttttgggtttttattacgtcggggcgattcgttgtttgagcgagtacgtttcgtatttttttcgcgacgcgcgtatgttgttcggcgtttcggtcggggcgttgtattgcgtcggcgtttttttcggtatttcgttgggtgcgtttggggacgttgttcgggttttacgtgcggagtgggtgttttttaggtcggggagcgggggatttttaggggtcgcggggttttggaggagcgggtatcggacgcggatacggcggggtgtatttcgagggtttttttcgaggtagatgttttttgcgggggcgttgtttttgggttcgggaagggggcgttggaatttcgagcggttcgggtcgaagtttgggattttcgtgcgtttttatttttatttttattaggcgttcgtgtatgaagggagatttttattttcggattgagagtcggagcgtttcggagcgacggggagtagggagcgggattcggggcggagggtagtgttggtttttgcggatttcgggttttttgtgttttttcgggaggggttggacgggttgagttgtcgaggggtcgatt

SEQ ID NO: 18102 - DNA, 656 bp, Artificial Sequence
  chemically treated genomic DNA (Homo sapiens) CpG-island No: 18102
aatcgacccctcgacaactcaacccgtccaacccctcccgaaaaaacacaaaaaacccgaaatccgcaaaaaccaacactaccctccgccccgaatcccgctccctactccccgtcgctccgaaacgctccgactctcaatccgaaaataaaaatctcccttcatacacgaacgcctaataaaaataaaaataaaaacgcacgaaaatcccaaacttcgacccgaaccgctcgaaattccaacgcccccttcccgaacccaaaaacaacgcccccgcaaaaaacatctacctcgaaaaaaaccctcgaaatacaccccgccgtatccgcgtccgatacccgctcctccaaaaccccgcgacccctaaaaatcccccgctccccgacctaaaaaacacccactccgcacgtaaaacccgaacaacgtccccaaacgcacccaacgaaataccgaaaaaaacgccgacgcaatacaacgccccgaccgaaacgccgaacaacatacgcgcgtcgcgaaaaaaatacgaaacgtactcgctcaaacaacgaatcgccccgacgtaataaaaacccaaaaaaccgcaacccgcgaaaaacaaactccaaccgcgctctacgtcgtacataacgacgacgacgaaacgaaaacgcgaatta

SEQ ID NO: 18103 - DNA, 656 bp, Artificial Sequence
  chemically treated genomic DNA (Homo sapiens) CpG-island No: 18103
aatcggtttttcggtagtttagttcgtttagtttttttcgagaggatataggggattcggagttcgtaggggttagtattatttttcgtttcgggtttcgttttttatttttcgtcgtttcgagacgtttcgatttttagttcggaggtgagggtttttttttatgtacgggcgtttgatgggggtaggggtggggacgtacgagagttttaggtttcggttcggatcgttcggggttttaacgtttttttttcgggtttaggaatagcgttttcgtaggaagtatttgtttcggagggggttttcgggatgtatttcgtcgtgttcgcgttcgatgttcgtttttttagggtttcgcgatttttggggatttttcgtttttcggtttagggggtatttatttcgtacgtggagttcgggtagcgtttttagacgtatttagcgggatatcggagaggacgtcgacgtagtgtaacgtttcggtcgaagcgtcgaataatatgcgcgcgtcgcggaggaggtgcggggcgtgttcgtttaggtagcgggtcgtttcgacgtggtagaagtttaggaagtcgtagttcgcgaaggataagttttagtcgcgttttgcgtcgtatatggcggcggcggcggggcgggggcgcgggtta

SEQ ID NO: 18104 - DNA, 656 bp, Artificial Sequence
  chemically treated genomic DNA (Homo sapiens) CpG-island No: 18104
taacccgcgcccccgccccgccgccgccgccatatacgacgcaaaacgcgactaaaacttatccttcgcgaactacgacttcctaaacttctaccacgtcgaaacgacccgctacctaaacgaacacgccccgcacctcctccgcgacgcgcgcatattattcgacgcttcgaccgaaacgttacactacgtcgacgtcctctccgatatcccgctaaatacgtctaaaaacgctacccgaactccacgtacgaaataaataccccctaaaccgaaaaacgaaaaatccccaaaaatcgcgaaaccctaaaaaaacgaacatcgaacgcgaacacgacgaaatacatcccgaaaaccccctccgaaacaaatacttcctacgaaaacgctattcctaaacccgaaaaaaaaacgttaaaaccccgaacgatccgaaccgaaacctaaaactctcgtacgtccccacccctacccccatcaaacgcccgtacataaaaaaaaaccctcacctccgaactaaaaatcgaaacgtctcgaaacgacgaaaaataaaaaacgaaacccgaaacgaaaaataatactaacccctacgaactccgaatcccctatatcctctcgaaaaaaactaaacgaactaaactaccgaaaaaccgatt

SEQ ID NO: 18105 - DNA, 666 bp, Artificial Sequence
  chemically treated genomic DNA (Homo sapiens) CpG-island No: 18105
cgggggttgtttttatttcgatgcgtttagatcgggattgagttgttgtggacgtgttcggtgggtaggcggtgagttcgtatcgggtaagatacgggtttgattttttttcgtatttattttttttttgggcgttcgtaggattcgaagtagcgtaagggcgttttggttgtttaaacgcggggttttagcgtcgtttgtcggtcgtcgtgtgtaacgtcgattcggaagtttcgtcgtttttgtttgcgttggggacgcgcgggatattcggtttcgggaatttcggtgggggttcgattttgttttgggcgtagggaacgcggttttgtaggacgggttgtcgtcgagggtatcggtaagtttcggggtgtggatcgtgtttgcgttcgttgtattcgttttgggtaaggttgtggttttttgagttttagttattttttgcggaggacgaatagggtgggaattcgattttttttatcgtagcgtttttgtaatttcgttttcgacgacgttttagttttttttttagtttagttttatttttaatattttttttattttattcgttgggtatttttcgtaattttaaatttcggcgtgtggtttatttacgtgaaaattttttagagtttttggttgtcgtataaaacgttgtttttatat

SEQ ID NO: 18106 - DNA, 666 bp, Artificial Sequence
  chemically treated genomic DNA (Homo sapiens) CpG-island No: 18106
atataaaaacaacgttttatacgacaaccaaaaactctaaaaaattttcacgtaaataaaccacacgccgaaatttaaaattacgaaaaatacccaacgaataaaataaaaaaaatattaaaaataaaactaaactaaaaaaaaaactaaaacgtcgtcgaaaacgaaattacaaaaacgctacgataaaaaaaatcgaattcccaccctattcgtcctccgcaaaaaataactaaaactcaaaaaaccacaaccttacccaaaacgaatacaacgaacgcaaacacgatccacaccccgaaacttaccgataccctcgacgacaacccgtcctacaaaaccgcgttccctacgcccaaaacaaaatcgaacccccaccgaaattcccgaaaccgaatatcccgcgcgtccccaacgcaaacaaaaacgacgaaacttccgaatcgacgttacacacgacgaccgacaaacgacgctaaaaccccgcgtttaaacaaccaaaacgcccttacgctacttcgaatcctacgaacgcccaaaaaaaaaataaatacgaaaaaaaatcaaacccgtatcttacccgatacgaactcaccgcctacccaccgaacacgtccacaacaactcaatcccgatctaaacgcatcgaaataaaaacaacccccg

SEQ ID NO: 18107 - DNA, 666 bp, Artificial Sequence
  chemically treated genomic DNA (Homo sapiens) CpG-island No: 18107
atatgaaagtaacgttttatgcgataattaggagttttgaagggtttttacgtggatgagttatacgtcgggatttggaattgcgggaagtgtttagcgagtagggtaggaggaatgttgggggtgggattggattagaagggaggttgggacgtcgtcgagaacgagattgtagggacgttgcggtgggagaagtcgaatttttattttgttcgtttttcgtaaagagtgattgaggtttaaaaagttatagttttgtttaaaacggatgtagcgggcgtaggtacggtttatatttcgaagtttgtcgatgttttcggcggtagttcgttttgtagagtcgcgttttttgcgtttaaagtaaggtcggatttttatcgggattttcggaatcgggtgtttcgcgcgtttttagcgtaggtagagacggcgagattttcgggtcggcgttgtatacggcggtcggtaggcggcgttggagtttcgcgtttgggtagttaggacgtttttgcgttgtttcgggttttgcgagcgtttagggagggggtgagtgcggggaggggttagattcgtgttttgttcggtgcgagtttatcgtttgtttatcgggtacgtttatagtagtttagtttcggtttgagcgtatcggagtgaaaatagttttcg

SEQ ID NO: 18108 - DNA, 666 bp, Artificial Sequence
  chemically treated genomic DNA (Homo sapiens) CpG-island No: 18108
cgaaaactattttcactccgatacgctcaaaccgaaactaaactactataaacgtacccgataaacaaacgataaactcgcaccgaacaaaacacgaatctaacccctccccgcactcaccccctccctaaacgctcgcaaaacccgaaacaacgcaaaaacgtcctaactacccaaacgcgaaactccaacgccgcctaccgaccgccgtatacaacgccgacccgaaaatctcgccgtctctacctacgctaaaaacgcgcgaaacacccgattccgaaaatcccgataaaaatccgaccttactttaaacgcaaaaaacgcgactctacaaaacgaactaccgccgaaaacatcgacaaacttcgaaatataaaccgtacctacgcccgctacatccgttttaaacaaaactataactttttaaacctcaatcactctttacgaaaaacgaacaaaataaaaattcgacttctcccaccgcaacgtccctacaatctcgttctcgacgacgtcccaacctcccttctaatccaatcccacccccaacattcctcctaccctactcgctaaacacttcccgcaattccaaatcccgacgtataactcatccacgtaaaaacccttcaaaactcctaattatcgcataaaacgttactttcatat

SEQ ID NO: 18109 - DNA, 541 bp, Artificial Sequence
  chemically treated genomic DNA (Homo sapiens) CpG-island No: 18109
ggtcgcggcgttaagatcgaagttaggtcgtcgtatttgtttagcgttttattaagggttttatcgggtcgttagaattttatcggttttacgggcgtagttatgttggggtaaaaggttacgaggttagttttattttatcgtcgcgcgttaggtttttagggttcggagggcgtggttttcgaagagtcgttgtttagacggatcgcgtcgtgtgacggttacgtttttatagttatcgttttcgtttgagttacgtgatttatttttaggtttcggcgagcgtatcggtttcgttttcgagtttacgtgattttgtttagttattttggagaaaagggcgcgttttttcgtttattttttgagcgtggagggtagatgttttaggtgattttttacgagcgtggcgtgttttggatggcggtcgtatatttaggaagaacgggttttgggagaggatcgttggttcgagagtggaattttgtacgtattgggcgttgaagtagtgttttttggattaaatacgaaatattgatgttat

SEQ ID NO: 18110 - DNA, 541 bp, Artificial Sequence
  chemically treated genomic DNA (Homo sapiens) CpG-island No: 18110
ataacatcaatatttcgtatttaatccaaaaaacactacttcaacgcccaatacgtacaaaattccactctcgaaccaacgatcctctcccaaaacccgttcttcctaaatatacgaccgccatccaaaacacgccacgctcgtaaaaaatcacctaaaacatctaccctccacgctcaaaaaataaacgaaaaaacgcgcccttttctccaaaataactaaacaaaatcacgtaaactcgaaaacgaaaccgatacgctcgccgaaacctaaaaataaatcacgtaactcaaacgaaaacgataactataaaaacgtaaccgtcacacgacgcgatccgtctaaacaacgactcttcgaaaaccacgccctccgaaccctaaaaacctaacgcgcgacgataaaataaaactaacctcgtaaccttttaccccaacataactacgcccgtaaaaccgataaaattctaacgacccgataaaacccttaataaaacgctaaacaaatacgacgacctaacttcgatcttaacgccgcgacc

SEQ ID NO: 18111 - DNA, 541 bp, Artificial Sequence
  chemically treated genomic DNA (Homo sapiens) CpG-island No: 18111
gtgatattagtatttcgtatttaatttagaaagtattgttttaacgtttagtgcgtgtaaggttttattttcgggttagcggtttttttttaaagttcgttttttttaagtgtgcggtcgttatttaggatacgttacgttcgtaaaaggttatttgaagtatttattttttacgtttaagaggtaggcggaggagcgcgtttttttttttaaaatggttgagtagggttacgtgggttcgggggcggggtcggtgcgttcgtcggagtttggaagtgggttacgtggtttagacgggggcggtagttgtgggggcgtggtcgttatacggcgcgattcgtttgggtagcggtttttcgggggttacgtttttcgggttttgggggtttagcgcgcgacggtggggtggagttagtttcgtgattttttattttaatatggttgcgttcgtgggatcggtgaagttttggcgattcggtaaggtttttggtggaacgttgggtagatgcggcggtttgatttcggttttggcgtcgcggtt

SEQ ID NO: 18112 - DNA, 541 bp, Artificial Sequence
  chemically treated genomic DNA (Homo sapiens) CpG-island No: 18112
aaccgcgacgccaaaaccgaaatcaaaccgccgcatctacccaacgttccaccaaaaaccttaccgaatcgccaaaacttcaccgatcccacgaacgcaaccatattaaaataaaaaatcacgaaactaactccaccccaccgtcgcgcgctaaacccccaaaacccgaaaaacgtaacccccgaaaaaccgctacccaaacgaatcgcgccgtataacgaccacgcccccacaactaccgcccccgtctaaaccacgtaacccacttccaaactccgacgaacgcaccgaccccgcccccgaacccacgtaaccctactcaaccattttaaaaaaaaaaacgcgctcctccgcctacctcttaaacgtaaaaaataaatacttcaaataaccttttacgaacgtaacgtatcctaaataacgaccgcacacttaaaaaaaacgaactttaaaaaaaaaccgctaacccgaaaataaaaccttacacgcactaaacgttaaaacaatactttctaaattaaatacgaaatactaatatcac

SEQ ID NO: 18113 - DNA, 897 bp, Artificial Sequence
  chemically treated genomic DNA (Homo sapiens) CpG-island No: 18113
cgcgtcgagcggagttgttggcgtagagcgtttttgtagtcgtaggggttattttcgttagcgtcgcggggttggaagtgcgtttcgatacgcgtggcgtcgcggtaggcgttttggtagaaggcgggttagttaagttttaatagcggtggttttaggttcgattgttcggggaagtaggtgttcgaagagtagtcgtgcgaggagtcgaacgagttttcggtcgtcgtcgtcgtcgtcgcgtttttttttttcggttttttcgtcgcgcgtagaatggcgtgtattttatcggggtttaggaaacgagttaggcgttcgcgtcgtaggaaggtcgcgaaggtttcggggtcgttcgttattagtttttttagagttaggcgtcgtgattcgttgaatagttcggtcgggttgggcggttcgtacggcgataggtaggcggcgggtatttcgtttaggttttcggatagtagagttatggcggcgttcggattcgatagttttcggataaaaatcggcgtgtagtttcgttttataggtaatttttgaattaaataggttcgcgttattggtcgtattttttcgtttcggtttttttattggttgttttttttttaatagcggagcgaggcggggcgtaagtttttacggtttcgttttttgatgcgttattggttgcgatgttgggtttgttaagaggaatttaaatttgtaggggcgaggcgggtcgtagagtagggatagagcggggagagtcgagtttttggttattttagcgcgttttttgtcggtcgtttcgttgcgcggtcgtgtaaggttagggatagttaggtttagataacgaggagaggtaggtgtcgattttcggagattttggttacgttgtttttaggtttt

SEQ ID NO: 18114 - DNA, 897 bp, Artificial Sequence
  chemically treated genomic DNA (Homo sapiens) CpG-island No: 18114
aaaacctaaaaacaacgtaaccaaaatctccgaaaatcgacacctacctctcctcgttatctaaacctaactatccctaaccttacacgaccgcgcaacgaaacgaccgacaaaaaacgcgctaaaataaccaaaaactcgactctccccgctctatccctactctacgacccgcctcgcccctacaaatttaaattcctcttaacaaacccaacatcgcaaccaataacgcatcaaaaaacgaaaccgtaaaaacttacgccccgcctcgctccgctattaaaaaaaaaacaaccaataaaaaaaccgaaacgaaaaaatacgaccaataacgcgaacctatttaattcaaaaattacctataaaacgaaactacacgccgatttttatccgaaaactatcgaatccgaacgccgccataactctactatccgaaaacctaaacgaaatacccgccgcctacctatcgccgtacgaaccgcccaacccgaccgaactattcaacgaatcacgacgcctaactctaaaaaaactaataacgaacgaccccgaaaccttcgcgaccttcctacgacgcgaacgcctaactcgtttcctaaaccccgataaaatacacgccattctacgcgcgacgaaaaaaccgaaaaaaaaaaacgcgacgacgacgacgacgaccgaaaactcgttcgactcctcgcacgactactcttcgaacacctacttccccgaacaatcgaacctaaaaccaccgctattaaaacttaactaacccgccttctaccaaaacgcctaccgcgacgccacgcgtatcgaaacgcacttccaaccccgcgacgctaacgaaaataacccctacgactacaaaaacgctctacgccaacaactccgctcgacgcg

SEQ ID NO: 18115 - DNA, 897 bp, Artificial Sequence
  chemically treated genomic DNA (Homo sapiens) CpG-island No: 18115
agagtttaggagtagcgtggttagagttttcgggagtcggtatttgttttttttcgttgtttaggtttgattgtttttggttttgtacggtcgcgtagcggggcgatcggtagggggcgcgttgggatggttaggagttcggtttttttcgttttgtttttgttttgcggttcgtttcgtttttgtaagtttaaattttttttagtaagtttagtatcgtagttaataacgtattagggggcggagtcgtagaggtttgcgtttcgtttcgtttcgttattggaaggaaagtagttaatgggagagtcgaggcggggaggtgcggttaatggcgcgggtttgtttgatttaaaggttgtttataaagcgggattgtacgtcggtttttgttcgagggttgtcgagttcgagcgtcgttatggttttgttgttcgagggtttggacgaggtgttcgtcgtttgtttgtcgtcgtgcgggtcgtttaattcgatcgagttgtttagcgagttacggcgtttggttttggaggagttggtggcgggcggtttcgaagttttcgcggtttttttgcgacgcgagcgtttggttcgttttttgaatttcgatgaggtgtacgttattttgcgcgcggcggagaggtcgggagaggagggcgcggcggcggcggcggcggtcgaggattcgttcggtttttcgtacgattgtttttcgggtatttattttttcgagtagtcggatttggagttatcgttgttggagtttggttggttcgttttttattagggcgtttatcgcggcgttacgcgtgtcgagacgtatttttagtttcgcggcgttggcgaaggtggtttttacggttgtaaggacgttttgcgttagtagtttcgttcggcgcg

SEQ ID NO: 18116 - DNA, 897 bp, Artificial Sequence
  chemically treated genomic DNA (Homo sapiens) CpG-island No: 18116
cgcgccgaacgaaactactaacgcaaaacgtccttacaaccgtaaaaaccaccttcgccaacgccgcgaaactaaaaatacgtctcgacacgcgtaacgccgcgataaacgccctaataaaaaacgaaccaaccaaactccaacaacgataactccaaatccgactactcgaaaaaataaatacccgaaaaacaatcgtacgaaaaaccgaacgaatcctcgaccgccgccgccgccgccgcgccctcctctcccgacctctccgccgcgcgcaaaataacgtacacctcatcgaaattcaaaaaacgaaccaaacgctcgcgtcgcaaaaaaaccgcgaaaacttcgaaaccgcccgccaccaactcctccaaaaccaaacgccgtaactcgctaaacaactcgatcgaattaaacgacccgcacgacgacaaacaaacgacgaacacctcgtccaaaccctcgaacaacaaaaccataacgacgctcgaactcgacaaccctcgaacaaaaaccgacgtacaatcccgctttataaacaacctttaaatcaaacaaacccgcgccattaaccgcacctccccgcctcgactctcccattaactactttccttccaataacgaaacgaaacgaaacgcaaacctctacgactccgccccctaatacgttattaactacgatactaaacttactaaaaaaaatttaaacttacaaaaacgaaacgaaccgcaaaacaaaaacaaaacgaaaaaaaccgaactcctaaccatcccaacgcgccccctaccgatcgccccgctacgcgaccgtacaaaaccaaaaacaatcaaacctaaacaacgaaaaaaaacaaataccgactcccgaaaactctaaccacgctactcctaaactct

SEQ ID NO: 18117 - DNA, 1109 bp, Artificial Sequence
  chemically treated genomic DNA (Homo sapiens) CpG-island No: 18117
ggtcgcgtgtttttagcgtttataggtggaaattaatcgttcgcggggttgcggggtataaagaggtagttagcggtttcgttgattttttttcgtcggtttggacgaagtttgggttcgggagtcgcgtgatgtattttaaagaaggcgtagaatagtacgtgtttttttcggtgttcggggtttttatattatcgtttaatcgttgcggtcgtttagtgttcgggtcgcgtttgtcggtcgcggggatttcgggttcgggtattcgcgtcgtcgtcgttcgttatgcgttttcgttttggggtggtggtgttattcgtcgtggtcggcgttcggtcggagttgttggtggtggggtcgcggttcgagttggggcgttgggagtcgcgcggtgtcgttcgtttgaggtcggtcggtatcgcggcgggcgacggggttttggttttgtaggagtcgggtttgtggttcggggaggtggagttggcggtcgaggaggcggcgtaggacggggcggagtcgggtcgcgtggatacgttttggtataagtttttgaagcgggagtcgggaggagagtttttttgggaaggtattgttagtagacgtttgttttcggcgtagagcgggagtttcggttcgtatttttaatcggggtttcggtttcgggtaggtttcgtaggtttcggcggcgcgcgtttcgggttttttgttcgcgtttttgcgtatttttcgggcgatttgggttgattttgttttgtcggttacgttgtcgtcgttagtcgcgttttcggttttttattgattttttagattcgtatagcgttttcggtcgttttttcgtttattttgttgtttgtttttttgatttggttttcgtatatttagtttttagtttttttttaatcgcgtttgcgttacgggttagtgtttttcgtttttcgttcggggtttttttcgtttttcgagtgtttttcgattttcgagttttttttttcgcgggttttttggttgttcggtcgcgcgtcgttgatggttttaatagtttaatttcgttttggttgggttttgtgtttttatttttttgttttaatttattaaaaaaaatttaaaat

SEQ ID NO: 18118 - DNA, 1109 bp, Artificial Sequence
  chemically treated genomic DNA (Homo sapiens) CpG-island No: 18118
attttaaattttttttaataaattaaaacaaaaaaataaaaacacaaaacccaaccaaaacgaaattaaactattaaaaccatcaacgacgcgcgaccgaacaaccaaaaaacccgcgaaaaaaaaaactcgaaaatcgaaaaacactcgaaaaacgaaaaaaaccccgaacgaaaaacgaaaaacactaacccgtaacgcaaacgcgattaaaaaaaaactaaaaactaaatatacgaaaaccaaatcaaaaaaacaaacaacaaaataaacgaaaaaacgaccgaaaacgctatacgaatctaaaaaatcaataaaaaaccgaaaacgcgactaacgacgacaacgtaaccgacaaaacaaaatcaacccaaatcgcccgaaaaatacgcaaaaacgcgaacaaaaaacccgaaacgcgcgccgccgaaacctacgaaacctacccgaaaccgaaaccccgattaaaaatacgaaccgaaactcccgctctacgccgaaaacaaacgtctactaacaataccttcccaaaaaaactctcctcccgactcccgcttcaaaaacttataccaaaacgtatccacgcgacccgactccgccccgtcctacgccgcctcctcgaccgccaactccacctccccgaaccacaaacccgactcctacaaaaccaaaaccccgtcgcccgccgcgataccgaccgacctcaaacgaacgacaccgcgcgactcccaacgccccaactcgaaccgcgaccccaccaccaacaactccgaccgaacgccgaccacgacgaataacaccaccaccccaaaacgaaaacgcataacgaacgacgacgacgcgaatacccgaacccgaaatccccgcgaccgacaaacgcgacccgaacactaaacgaccgcaacgattaaacgataatataaaaaccccgaacaccgaaaaaaacacgtactattctacgccttctttaaaatacatcacgcgactcccgaacccaaacttcgtccaaaccgacgaaaaaaaatcaacgaaaccgctaactacctctttataccccgcaaccccgcgaacgattaatttccacctataaacgctaaaaacacgcgacc

SEQ ID NO: 18119 - DNA, 1109 bp, Artificial Sequence
  chemically treated genomic DNA (Homo sapiens) CpG-island No: 18119
gttttgggttttttttagtgaattagagtaggaaaatgaggatataaaatttaattaaggcggagttgggttgttgaagttattagcggcgcgcggtcgggtagttaagggattcgcgaagggggggattcggaggtcgaggggtattcggagggcgaagggagtttcgggcgggagacgaagggtattggttcgtgacgtaggcgcggttggaaagaagttgaggattggatgtgcggaaattaggttagaggggtaggtaatagagtgggcgggaaggcggtcgggagcgttatacgggtttagggaattagtaggaagtcggaggcgcggttggcggcgatagcgtggtcggtagagtagggttagtttaggtcgttcggggagtgcgtagggacgcgggtaaaaagttcgggacgcgcgtcgtcggggtttgcggggtttgttcgaggtcgaggtttcggttgggggtgcgggtcggagttttcgttttgcgtcgggggtaggcgtttgttggtaatatttttttaggagagtttttttttcggttttcgttttaggaatttgtattagaacgtgtttacgcggttcggtttcgtttcgttttgcgtcgttttttcggtcgttagttttattttttcgagttataggttcggtttttgtagggttagggtttcgtcgttcgtcgcggtgtcggtcggttttaggcggacggtatcgcgcggtttttaacgttttagttcgggtcgcgattttattattagtagtttcggtcgggcgtcggttacggcgggtggtattattattttaaagcggaagcgtatggcgggcggcggcggcgcgaatattcgggttcggagttttcgcggtcggtaggcgcggttcgagtattaggcggtcgtagcgattgggcggtggtgtgggagtttcgggtatcggggagaatacgtgttgttttgcgttttttttgggatgtattacgcggttttcgagtttagatttcgtttaggtcggcgggaaggggttagcggagtcgttagttgtttttttgtgtttcgtaatttcgcgggcggttgatttttatttgtgggcgttggggatacgcgatt

SEQ ID NO: 18120 - DNA, 1109 bp, Artificial Sequence
  chemically treated genomic DNA (Homo sapiens) CpG-island No: 18120
aatcgcgtatccccaacgcccacaaataaaaatcaaccgcccgcgaaattacgaaacacaaaaaaacaactaacgactccgctaaccccttcccgccgacctaaacgaaatctaaactcgaaaaccgcgtaatacatcccaaaaaaaacgcaaaacaacacgtattctccccgatacccgaaactcccacaccaccgcccaatcgctacgaccgcctaatactcgaaccgcgcctaccgaccgcgaaaactccgaacccgaatattcgcgccgccgccgcccgccatacgcttccgctttaaaataataataccacccgccgtaaccgacgcccgaccgaaactactaataataaaatcgcgacccgaactaaaacgttaaaaaccgcgcgataccgtccgcctaaaaccgaccgacaccgcgacgaacgacgaaaccctaaccctacaaaaaccgaacctataactcgaaaaaataaaactaacgaccgaaaaaacgacgcaaaacgaaacgaaaccgaaccgcgtaaacacgttctaatacaaattcctaaaacgaaaaccgaaaaaaaaactctcctaaaaaaatattaccaacaaacgcctacccccgacgcaaaacgaaaactccgacccgcacccccaaccgaaacctcgacctcgaacaaaccccgcaaaccccgacgacgcgcgtcccgaactttttacccgcgtccctacgcactccccgaacgacctaaactaaccctactctaccgaccacgctatcgccgccaaccgcgcctccgacttcctactaattccctaaacccgtataacgctcccgaccgccttcccgcccactctattacctacccctctaacctaatttccgcacatccaatcctcaacttctttccaaccgcgcctacgtcacgaaccaatacccttcgtctcccgcccgaaactcccttcgccctccgaatacccctcgacctccgaatcccccccttcgcgaatcccttaactacccgaccgcgcgccgctaataacttcaacaacccaactccgccttaattaaattttatatcctcattttcctactctaattcactaaaaaaaacccaaaac

SEQ ID NO: 18121 - DNA, 1057 bp, Artificial Sequence
  chemically treated genomic DNA (Homo sapiens) CpG-island No: 18121
ggggcggcgtgtcgggattcggaggggaaggtttgcgtatttagcgcggcgagtcgtggtttttgttgtcgtttcggggtttcgggtggtagcggttttagaaggcggttcgagtttacggcggtgttcgggggggggtttcgcgggcgtcggtgtaggtttggtttgggaggttttttggggaaataatgcgtttcgtttcggattttagttttttttaagcgtcgcgttgttcgtcgttttttttattgtcgtttcgtcgttttagggggcgtcgcgcgtggtcgtgttcggtttttttcgagtttcggcgggtgacgggcgcggaatatggcggcgcggggtttcgggtagtcgcgaggggtcgcggcgttgcggtttcggttggggcggcgcggttagagttgcgtttgggttcgtcggcgaggtttttttttcgttcgtcgtcgtcgtcgtcgtcgtcgcgtttcgtttcgcgcgttcgttttttttcgggtcgcggtcgtgtttcgcgtcgcgttttttcgggatggttcgcgcgtttcggcgttgtttttcggagtttacggcggagcggcggcggtcgcgttcgaggggcgcgcggttgtagcggcggcggcgtcgcgcgtgaggggtcgtttaaggtcgagcgggcgcggcgagcggtcgggcgagcgtagttaatatgtcggatattaaggtaaaagttgtcgttcgggttcggtttatgaatcgacgaggtgaggagtttttcgtttttttttatttttgttcgggttgagggcgggggtaattttagaaattgcggggtcgggacggcgagagcgcggtcggggtcggggggtcggggcggaggcggcgttcgcgttggtcgtggtgttcggggcgtcgtttttaggttcggtcgtttttagggacggagtttcgttcggcgcggttggcgggcgggcgggttggaggcgcggatgttggattttgtaacgtttttttttttttgtttttagaattggaattgaatattaagtgcgtggtggagatggaagggaattaaacggtt

SEQ ID NO: 18122 - DNA, 1057 bp, Artificial Sequence
  chemically treated genomic DNA (Homo sapiens) CpG-island No: 18122
aaccgtttaattcccttccatctccaccacgcacttaatattcaattccaattctaaaaacaaaaaaaaaaaaacgttacaaaatccaacatccgcgcctccaacccgcccgcccgccaaccgcgccgaacgaaactccgtccctaaaaacgaccgaacctaaaaacgacgccccgaacaccacgaccaacgcgaacgccgcctccgccccgaccccccgaccccgaccgcgctctcgccgtcccgaccccgcaatttctaaaattacccccgccctcaacccgaacaaaaataaaaaaaaacgaaaaactcctcacctcgtcgattcataaaccgaacccgaacgacaacttttaccttaatatccgacatattaactacgctcgcccgaccgctcgccgcgcccgctcgaccttaaacgacccctcacgcgcgacgccgccgccgctacaaccgcgcgcccctcgaacgcgaccgccgccgctccgccgtaaactccgaaaaacaacgccgaaacgcgcgaaccatcccgaaaaaacgcgacgcgaaacacgaccgcgacccgaaaaaaaacgaacgcgcgaaacgaaacgcgacgacgacgacgacgacgacgaacgaaaaaaaaacctcgccgacgaacccaaacgcaactctaaccgcgccgccccaaccgaaaccgcaacgccgcgacccctcgcgactacccgaaaccccgcgccgccatattccgcgcccgtcacccgccgaaactcgaaaaaaaccgaacacgaccacgcgcgacgccccctaaaacgacgaaacgacaataaaaaaaacgacgaacaacgcgacgcttaaaaaaaactaaaatccgaaacgaaacgcattatttccccaaaaaacctcccaaaccaaacctacaccgacgcccgcgaaacccccccccgaacaccgccgtaaactcgaaccgccttctaaaaccgctaccacccgaaaccccgaaacgacaacaaaaaccacgactcgccgcgctaaatacgcaaaccttcccctccgaatcccgacacgccgcccc

SEQ ID NO: 18123 - DNA, 1057 bp, Artificial Sequence
  chemically treated genomic DNA (Homo sapiens) CpG-island No: 18123
gatcgtttgatttttttttatttttattacgtatttggtgtttagttttagttttgaaagtagagagaaagggacgttgtaaagtttagtattcgcgtttttagttcgttcgttcgttagtcgcgtcgagcggggtttcgtttttggaggcggtcgagtttggagacggcgtttcgggtattacggttagcgcggacgtcgttttcgtttcggtttttcggtttcggtcgcgttttcgtcgtttcggtttcgtagtttttaaagttgttttcgtttttagttcgagtagaaataaaaaagagcggaaagttttttatttcgtcggtttatgggtcggattcggacggtaatttttattttggtattcgatatgttggttgcgttcgttcggtcgttcgtcgcgttcgttcggttttaggcggttttttacgcgcggcgtcgtcgtcgttgtagtcgcgcgtttttcgagcgcggtcgtcgtcgtttcgtcgtgagtttcgagaggtagcgtcgaggcgcgcgggttatttcgggggagcgcgacgcggggtacggtcgcggttcggggaggggcgggcgcgcggggcggggcgcggcggcggcggcggcggcggcgggcggggaggaggtttcgtcggcgggtttaggcgtagttttagtcgcgtcgttttagtcgagatcgtagcgtcgcggtttttcgcggttgttcggggtttcgcgtcgttatgtttcgcgttcgttattcgtcggggttcgggagaggtcggatacggttacgcgcggcgttttttggagcggcgggacggtagtgagaggagcggcgagtagcgcggcgtttaggggaggttggagttcggggcgggacgtattgtttttttaggggattttttaggttaagtttgtatcggcgttcgcggggttttttttcggatatcgtcgtgagttcgagtcgttttttggggtcgttgttattcggagtttcgggacggtagtaaggattacggttcgtcgcgttgggtgcgtaggttttttttttcgagtttcggtacgtcgtttt

SEQ ID NO: 18124 - DNA, 1057 bp, Artificial Sequence
  chemically treated genomic DNA (Homo sapiens) CpG-island No: 18124
aaaacgacgtaccgaaactcgaaaaaaaaaacctacgcacccaacgcgacgaaccgtaatccttactaccgtcccgaaactccgaataacaacgaccccaaaaaacgactcgaactcacgacgatatccgaaaaaaaaccccgcgaacgccgatacaaacttaacctaaaaaatcccctaaaaaaacaatacgtcccgccccgaactccaacctcccctaaacgccgcgctactcgccgctcctctcactaccgtcccgccgctccaaaaaacgccgcgcgtaaccgtatccgacctctcccgaaccccgacgaataacgaacgcgaaacataacgacgcgaaaccccgaacaaccgcgaaaaaccgcgacgctacgatctcgactaaaacgacgcgactaaaactacgcctaaacccgccgacgaaacctcctccccgcccgccgccgccgccgccgccgccgcgccccgccccgcgcgcccgcccctccccgaaccgcgaccgtaccccgcgtcgcgctcccccgaaataacccgcgcgcctcgacgctacctctcgaaactcacgacgaaacgacgacgaccgcgctcgaaaaacgcgcgactacaacgacgacgacgccgcgcgtaaaaaaccgcctaaaaccgaacgaacgcgacgaacgaccgaacgaacgcaaccaacatatcgaataccaaaataaaaattaccgtccgaatccgacccataaaccgacgaaataaaaaactttccgctcttttttatttctactcgaactaaaaacgaaaacaactttaaaaactacgaaaccgaaacgacgaaaacgcgaccgaaaccgaaaaaccgaaacgaaaacgacgtccgcgctaaccgtaatacccgaaacgccgtctccaaactcgaccgcctccaaaaacgaaaccccgctcgacgcgactaacgaacgaacgaactaaaaacgcgaatactaaactttacaacgtccctttctctctactttcaaaactaaaactaaacaccaaatacgtaataaaaataaaaaaaaatcaaacgatc

SEQ ID NO: 18125 - DNA, 1326 bp, Artificial Sequence
  chemically treated genomic DNA (Homo sapiens) CpG-island No: 18125
atttttatcgtgttgtattgggtttcggttttttcgagttcggttttttcggacgacggtcgtcgttattgcgggtattagattggggggcgggtcgtttatttcgcggttttgttttatatcgatttcgttgaggagttttcggtattcggggcgattagggaaggcgggaggaggtgtttagaaattgttcgttttgttagtcgtatttggtcgacgattttttggttattggtttggtttgggggatacgattttttatttaattgaattagattcgaggtcgcggcggggagggtagcggtcggggttttttcgttttttttttcggttcgtttttatttgttgcgggaaagtcgcggtggagcgttcgagggcggtcgtaatttcggtcggggtcgagtcgggttggtcgagtcgcggcggcgaagggcgggggaaggcgttttcggagtagggtgcgcggcgcgtagggtcggttgtttcgggtcgcggtcgcgcgggcggggagggggttgtcggcgtcgggtgatttcggtgttagttcgtcggtttcgttcgtcgttttttgttcgacgggatttttattattttcgttgtgcggttatttgtttcgtttcgtattgcgtcgtcgtcgtttttgtggtcgtcgtcgttagtttttagtttcgttatggtgtttcgatgacgcgttcggagagtcgtttcgtttttttttcggtttggttttcgtcggttttcgttttttaggttagcggtttagataggtgagcgtagttcggggatggcggagggcggggatagagagcgcggtagtcggttgcggtttgggtttggcgcgttttttcgcgggtaggtgcggcgtggtagtcgtttcgatcgtcgttgtcgagtttcggttggaagagcggcgggcggaattagtattttagttcggagttttcggtcgtcgcggtcgattagttgagggttttcggagatatggagcggggttagcgaggtttggtggcgttttttggagtttgggacgagcggcggttcgaggagtagtttaggtggggcgagggtacggagacgttattttttttcgaattttgaagtagttaggttagtgtcggtttcgcgagggttggagtttacggtgatagtcggtagagtatttgatgttacgtggagaggcgaagtatatgggtcggattttacgttgggagtcggtttggatttgcgttttaggaagttattgcgggcgattttattttgtcgttaggatttcgtatttgatgagttttagggtatataagttagagaggtttgtgtcggttgatg

SEQ ID NO: 18126 - DNA, 1326 bp, Artificial Sequence
  chemically treated genomic DNA (Homo sapiens) CpG-island No: 18126
catcaaccgacacaaacctctctaacttatataccctaaaactcatcaaatacgaaatcctaacgacaaaataaaatcgcccgcaataacttcctaaaacgcaaatccaaaccgactcccaacgtaaaatccgacccatatacttcgcctctccacgtaacatcaaatactctaccgactatcaccgtaaactccaaccctcgcgaaaccgacactaacctaactacttcaaaattcgaaaaaaaataacgtctccgtaccctcgccccacctaaactactcctcgaaccgccgctcgtcccaaactccaaaaaacgccaccaaacctcgctaaccccgctccatatctccgaaaaccctcaactaatcgaccgcgacgaccgaaaactccgaactaaaatactaattccgcccgccgctcttccaaccgaaactcgacaacgacgatcgaaacgactaccacgccgcacctacccgcgaaaaaacgcgccaaacccaaaccgcaaccgactaccgcgctctctatccccgccctccgccatccccgaactacgctcacctatctaaaccgctaacctaaaaaacgaaaaccgacgaaaaccaaaccgaaaaaaaaacgaaacgactctccgaacgcgtcatcgaaacaccataacgaaactaaaaactaacgacgacgaccacaaaaacgacgacgacgcaatacgaaacgaaacaaataaccgcacaacgaaaataataaaaatcccgtcgaacaaaaaacgacgaacgaaaccgacgaactaacaccgaaatcacccgacgccgacaaccccctccccgcccgcgcgaccgcgacccgaaacaaccgaccctacgcgccgcgcaccctactccgaaaacgccttcccccgcccttcgccgccgcgactcgaccaacccgactcgaccccgaccgaaattacgaccgccctcgaacgctccaccgcgactttcccgcaacaaataaaaacgaaccgaaaaaaaaaacgaaaaaaccccgaccgctaccctccccgccgcgacctcgaatctaattcaattaaataaaaaatcgtatcccccaaaccaaaccaataaccaaaaaatcgtcgaccaaatacgactaacaaaacgaacaatttctaaacacctcctcccgccttccctaatcgccccgaataccgaaaactcctcaacgaaatcgatataaaacaaaaccgcgaaataaacgacccgccccccaatctaatacccgcaataacgacgaccgtcgtccgaaaaaaccgaactcgaaaaaaccgaaacccaatacaacacgataaaaat

SEQ ID NO: 18127 - DNA, 1326 bp, Artificial Sequence
  chemically treated genomic DNA (Homo sapiens) CpG-island No: 18127
tattagtcggtataagtttttttaatttgtgtgttttgaggtttattagatgcgaagttttggcgataagatagggtcgttcgtagtggttttttaaagcgtagatttaggtcggtttttagcgtggaattcgatttatgtatttcgtttttttacgtggtattagatgttttgtcggttgttatcgtgaattttagttttcgcggagtcgatattgatttggttattttagagttcggagggaaatagcgttttcgtattttcgttttatttgggttgtttttcggatcgtcgttcgttttagattttaggaggcgttattaggtttcgttgatttcgttttatattttcgggagtttttagttggtcggtcgcggcgatcggaagtttcggattgaggtattggtttcgttcgtcgtttttttagtcgagattcggtagcggcggtcggagcggttgttacgtcgtatttgttcgcgagggggcgcgttaggtttaggtcgtagtcgattgtcgcgttttttgttttcgtttttcgttattttcggattgcgtttatttgtttgggtcgttggtttgggaggcgggggtcggcgggagttaagtcgaggaaagggcggagcggtttttcgggcgcgttatcggagtattatggcggagttaggagttggcggcgacggttataggggcggcgacggcgtagtgcgaagcgaaataggtgatcgtatagcggggatagtgggggtttcgtcgggtaggggacggcgagcggggtcggcgggttggtatcgaaattattcggcgtcggtagtttttttttcgttcgcgcggtcgcggttcggaataatcggttttgcgcgtcgcgtattttgtttcgagagcgttttttttcgtttttcgtcgtcgcggttcggttagttcggttcggtttcggtcggggttgcggtcgttttcgggcgttttatcgcgattttttcgtaataggtggaggcgagtcgggggaggaaacggagagatttcggtcgttgtttttttcgtcgcggtttcgggtttaatttagttgaatgggaaatcgtattttttagattaaattagtggttagagagtcgtcggttaggtgcgattggtaggacgagtagtttttgggtattttttttcgttttttttggtcgtttcgggtgtcgggggttttttagcggggtcggtgtggggtaggatcgcggggtgagcggttcgttttttaatttggtgttcgtagtggcgacgatcgtcgttcgaggggatcgagttcgggagggtcggggtttagtgtagtacggtgggggt

SEQ ID NO: 18128 - DNA, 1326 bp, Artificial Sequence
  chemically treated genomic DNA (Homo sapiens) CpG-island No: 18128
acccccaccgtactacactaaaccccgaccctcccgaactcgatcccctcgaacgacgatcgtcgccactacgaacaccaaattaaaaaacgaaccgctcaccccgcgatcctaccccacaccgaccccgctaaaaaacccccgacacccgaaacgaccaaaaaaaacgaaaaaaaatacccaaaaactactcgtcctaccaatcgcacctaaccgacgactctctaaccactaatttaatctaaaaaatacgatttcccattcaactaaattaaacccgaaaccgcgacgaaaaaaacaacgaccgaaatctctccgtttcctcccccgactcgcctccacctattacgaaaaaatcgcgataaaacgcccgaaaacgaccgcaaccccgaccgaaaccgaaccgaactaaccgaaccgcgacgacgaaaaacgaaaaaaaacgctctcgaaacaaaatacgcgacgcgcaaaaccgattattccgaaccgcgaccgcgcgaacgaaaaaaaaactaccgacgccgaataatttcgataccaacccgccgaccccgctcgccgtcccctacccgacgaaacccccactatccccgctatacgatcacctatttcgcttcgcactacgccgtcgccgcccctataaccgtcgccgccaactcctaactccgccataatactccgataacgcgcccgaaaaaccgctccgccctttcctcgacttaactcccgccgacccccgcctcccaaaccaacgacccaaacaaataaacgcaatccgaaaataacgaaaaacgaaaacaaaaaacgcgacaatcgactacgacctaaacctaacgcgccccctcgcgaacaaatacgacgtaacaaccgctccgaccgccgctaccgaatctcgactaaaaaaacgacgaacgaaaccaatacctcaatccgaaacttccgatcgccgcgaccgaccaactaaaaactcccgaaaatataaaacgaaatcaacgaaacctaataacgcctcctaaaatctaaaacgaacgacgatccgaaaaacaacccaaataaaacgaaaatacgaaaacgctatttccctccgaactctaaaataaccaaatcaatatcgactccgcgaaaactaaaattcacgataacaaccgacaaaacatctaataccacgtaaaaaaacgaaatacataaatcgaattccacgctaaaaaccgacctaaatctacgctttaaaaaaccactacgaacgaccctatcttatcgccaaaacttcgcatctaataaacctcaaaacacacaaattaaaaaaacttataccgactaata

SEQ ID NO: 18129 - DNA, 621 bp, Artificial Sequence
  chemically treated genomic DNA (Homo sapiens) CpG-island No: 18129
  unsure (515)
gatcgtattttacgacgcgatattacgattattacgcgatatttcgttttcgttatacgttaatatattttcgttcgttagatatttacgcgttacgatatattacgattataatacgcgcgcgttatcgcgatttcgcgatttcgtagtttagtatatcgcgattattacgtttagcgttacgttattagtattacgtatataatttatattatattaggtattagatagcgcgatagcgcgtatatcgtatatcgtcgcgcgcgttagtatcgtatacgatacgtcgataattagcgtttacgacgatagcgatattcgttcgcgtacgtacgtcgcgcgttacgatatatataggcgcggtatcgtatagtcgcgacgcgacggttcgatttaaggtcgcgtcgcgcgtttatatacgatatcgatcgttcggcgttatattattttttacgatatttacgcgattagcgttacgtaggcgtattacgacgacggattcgtttttcgattantcgtaatatttattagtagagacgattatttacgttatgatagtgttgttattttttacgattttagtagttttcgttttcgatatgtatttattattttaagtat

SEQ ID NO: 18130 - DNA, 621 bp, Artificial Sequence
  chemically treated genomic DNA (Homo sapiens) CpG-island No: 18130
  unsure (107)
atacttaaaataataaatacatatcgaaaacgaaaactactaaaatcgtaaaaaataacaacactatcataacgtaaataatcgtctctactaataaatattacgantaatcgaaaaacgaatccgtcgtcgtaatacgcctacgtaacgctaatcgcgtaaatatcgtaaaaaataatataacgccgaacgatcgatatcgtatataaacgcgcgacgcgaccttaaatcgaaccgtcgcgtcgcgactatacgataccgcgcctatatatatcgtaacgcgcgacgtacgtacgcgaacgaatatcgctatcgtcgtaaacgctaattatcgacgtatcgtatacgatactaacgcgcgcgacgatatacgatatacgcgctatcgcgctatctaatacctaatataatataaattatatacgtaatactaataacgtaacgctaaacgtaataatcgcgatatactaaactacgaaatcgcgaaatcgcgataacgcgcgcgtattataatcgtaatatatcgtaacgcgtaaatatctaacgaacgaaaatatattaacgtataacgaaaacgaaatatcgcgtaataatcgtaatatcgcgtcgtaaaatacgatc

SEQ ID NO: 18131 - DNA, 621 bp, Artificial Sequence
  chemically treated genomic DNA (Homo sapiens) CpG-island No: 18131
  unsure (107)
atgtttgaggtggtggatgtatgtcggggacggagattgttgagatcgtagggagtagtagtattattatggcgtgggtggtcgtttttgttggtgggtgttgcggntggtcggggggcgggttcgtcgtcgtggtgcgtttgcgtggcgttggtcgcgtgggtgtcgtggggggtggtgtggcgtcgggcggtcggtgtcgtgtgtgggcgcgcggcgcggttttgggtcgggtcgtcgcgtcgcggttgtgcggtgtcgcgtttgtgtgtgtcgtggcgcgcggcgtgcgtgcgcgggcgggtgtcgttgtcgtcgtgggcgttggttgtcggcgtgtcgtgtgcggtgttggcgcgcgcggcggtgtgcggtgtgcgcgttgtcgcgttgtttggtgtttggtgtggtgtgggttgtgtgcgtggtgttggtggcgtggcgttgggcgtggtggtcgcggtgtgttgggttgcggggtcgcggggtcgcggtggcgcgcgcgtgttgtggtcgtggtgtgtcgtggcgcgtgggtgtttggcgggcgggggtgtgttggcgtgtggcgggggcggggtgtcgcgtggtggtcgtggtgtcgcgtcgtggggtgcggtt

SEQ ID NO: 18132 - DNA, 621 bp, Artificial Sequence
  chemically treated genomic DNA (Homo sapiens) CpG-island No: 18132
  unsure (515)
aaccgcaccccacgacgcgacaccacgaccaccacgcgacaccccgcccccgccacacgccaacacacccccgcccgccaaacacccacgcgccacgacacaccacgaccacaacacgcgcgcgccaccgcgaccccgcgaccccgcaacccaacacaccgcgaccaccacgcccaacgccacgccaccaacaccacgcacacaacccacaccacaccaaacaccaaacaacgcgacaacgcgcacaccgcacaccgccgcgcgcgccaacaccgcacacgacacgccgacaaccaacgcccacgacgacaacgacacccgcccgcgcacgcacgccgcgcgccacgacacacacaaacgcgacaccgcacaaccgcgacgcgacgacccgacccaaaaccgcgccgcgcgcccacacacgacaccgaccgcccgacgccacaccaccccccacgacacccacgcgaccaacgccacgcaaacgcaccacgacgacgaacccgccccccgaccanccgcaacacccaccaacaaaaacgaccacccacgccataataatactactactccctacgatctcaacaatctccgtccccgacatacatccaccacctcaaacat

SEQ ID NO: 18133 - DNA, 506 bp, Artificial Sequence
  chemically treated genomic DNA (Homo sapiens) CpG-island No: 18133
ttggtcgatcgcgaacgtaggttatgttagtagtaggagtttattatgttattgtacgttatcgcgtacgcggttcgatatagatatcgtatgtacgatcgttagtcgcgttaatatacgcgatcgcgatttatgtatcgatatagtaatgttcgagcgtgattatagttttaacgtgttattcgattacgaattcgagcgatggcgtcgtttaggtatcgttaacgtttgcgcgtacgtatgttttagttatggtttagtcgaagtcgacgttatgtcgaatcgacgtgaagtgtacgtcgcgattagttaatgattagggttatgtgcggtttgtttatcgtattagttgtttatttcgtttaagtcgtagttagcgtacgttagtcgatcgcgatttttagcgtagcgaatcgtagttcgtattagtttatgttcgtgtagtttggtatggtagacgtagcgttgttatgtgatatgtcgtcgtatttgatttaagtcgcggt

SEQ ID NO: 18134 - DNA, 506 bp, Artificial Sequence
  chemically treated genomic DNA (Homo sapiens) CpG-island No: 18134
accgcgacttaaatcaaatacgacgacatatcacataacaacgctacgtctaccataccaaactacacgaacataaactaatacgaactacgattcgctacgctaaaaatcgcgatcgactaacgtacgctaactacgacttaaacgaaataaacaactaatacgataaacaaaccgcacataaccctaatcattaactaatcgcgacgtacacttcacgtcgattcgacataacgtcgacttcgactaaaccataactaaaacatacgtacgcgcaaacgttaacgatacctaaacgacgccatcgctcgaattcgtaatcgaataacacgttaaaactataatcacgctcgaacattactatatcgatacataaatcgcgatcgcgtatattaacgcgactaacgatcgtacatacgatatctatatcgaaccgcgtacgcgataacgtacaataacataataaactcctactactaacataacctacgttcgcgatcgaccaa

SEQ ID NO: 18135 - DNA, 506 bp, Artificial Sequence
  chemically treated genomic DNA (Homo sapiens) CpG-island No: 18135
atcgcgatttagattagatgcgacgatatgttatatgatagcgttgcgtttattatattagattatacgagtatagattagtacgagttacgattcgttacgttagaggtcgcgatcgattgacgtgcgttgattgcgatttgaacgagataggtagttgatgcgatgaataggtcgtatatagttttgattattagttagtcgcgacgtgtattttacgtcggttcgatatggcgtcggtttcggttaagttatgattgagatatgcgtacgcgtagacgttagcgatgtttgagcgacgttatcgttcggattcgtgatcggatgatacgttgagattatggttacgttcgagtattgttatgtcgatatatggatcgcgatcgcgtgtattgacgcggttgacgatcgtgtatgcggtgtttatatcggatcgcgtacgcgatggcgtatagtgatatagtagatttttattgttgatatagtttgcgttcgcgatcggttag

SEQ ID NO: 18136 - DNA, 506 bp, Artificial Sequence
  chemically treated genomic DNA (Homo sapiens) CpG-island No: 18136
ctaaccgatcgcgaacgcaaactatatcaacaataaaaatctactatatcactatacgccatcgcgtacgcgatccgatataaacaccgcatacacgatcgtcaaccgcgtcaatacacgcgatcgcgatccatatatcgacataacaatactcgaacgtaaccataatctcaacgtatcatccgatcacgaatccgaacgataacgtcgctcaaacatcgctaacgtctacgcgtacgcatatctcaatcataacttaaccgaaaccgacgccatatcgaaccgacgtaaaatacacgtcgcgactaactaataatcaaaactatatacgacctattcatcgcatcaactacctatctcgttcaaatcgcaatcaacgcacgtcaatcgatcgcgacctctaacgtaacgaatcgtaactcgtactaatctatactcgtataatctaatataataaacgcaacgctatcatataacatatcgtcgcatctaatctaaatcgcgat

SEQ ID NO: 18137 - DNA, 671 bp, Artificial Sequence
  chemically treated genomic DNA (Homo sapiens) CpG-island No: 18137
tcggtttcggggttggagggaggttcgcgagatttcgggtcgttcgtttcgtcgtcgcgtttcggttcgcgggggtagtttgcgagtttcgacgtttcgggtttagggtcgcgtttcgaagcgtcgtttttagaattcgattcgttgtttttttggattgaggagttcgaggagtgtggtttcgcgagttgttcggagagcgcgttttttcgtttgtaggggtttagtagtagttatcgagcgcggggcgaggtttacgttttttttttttttttcgcgtttacggcgggcgagttggcgttggagtaaggtttcgggttttcgtcgtagttttcggattttagttagatttattttttttcgagcgagttcgtggggagttaggaggacggttttcgttttcgagtcgtgttcgatgttttggacggggatggggacggtttcgttcgtatcgaggattttatttagtttgttacggtttacggggtagagtaggtacggagcggttcgggtcggggcgtgggaattgggtaggtgcgcgttggtcggcggggttgatgtgggatcggtcgacgttgtttttggagtcgggaaaggtattgttaagatttgacggttttgttttttttgtttatttattatttcggttttggatttttggttgaattgcg

SEQ ID NO: 18138 - DNA, 671 bp, Artificial Sequence
  chemically treated genomic DNA (Homo sapiens) CpG-island No: 18138
cgcaattcaaccaaaaatccaaaaccgaaataataaataaacaaaaaaaacaaaaccgtcaaatcttaacaatacctttcccgactccaaaaacaacgtcgaccgatcccacatcaaccccgccgaccaacgcgcacctacccaattcccacgccccgacccgaaccgctccgtacctactctaccccgtaaaccgtaacaaactaaataaaatcctcgatacgaacgaaaccgtccccatccccgtccaaaacatcgaacacgactcgaaaacgaaaaccgtcctcctaactccccacgaactcgctcgaaaaaaaataaatctaactaaaatccgaaaactacgacgaaaacccgaaaccttactccaacgccaactcgcccgccgtaaacgcgaaaaaaaaaaaaaaaacgtaaacctcgccccgcgctcgataactactactaaacccctacaaacgaaaaaacgcgctctccgaacaactcgcgaaaccacactcctcgaactcctcaatccaaaaaaacaacgaatcgaattctaaaaacgacgcttcgaaacgcgaccctaaacccgaaacgtcgaaactcgcaaactacccccgcgaaccgaaacgcgacgacgaaacgaacgacccgaaatctcgcgaacctccctccaaccccgaaaccga

SEQ ID NO: 18139 - DNA, 671 bp, Artificial Sequence
  chemically treated genomic DNA (Homo sapiens) CpG-island No: 18139
cgtaatttaattagaaatttagggtcgaagtggtgaataagtagaaaaagtaggatcgttaggttttgatagtgtttttttcgattttaggggtagcgtcgatcggttttatattaatttcgtcggttagcgcgtatttgtttagtttttacgtttcggttcgggtcgtttcgtatttgttttgtttcgtagatcgtagtaaattggatgaagttttcgatgcggacgaaatcgtttttattttcgtttagggtatcgaatacggttcggaggcgggggtcgtttttttgattttttacgggttcgttcggaagggggtgggtttggttgaggttcgagggttgcggcggggattcgggattttgttttagcgttagttcgttcgtcgtgggcgcggggaagggagagaagacgtagatttcgtttcgcgttcggtggttgttgttggatttttgtaagcggaaaggcgcgtttttcgggtagttcgcggggttatatttttcgggttttttagtttaggagaataacgggtcgagttttggaagcggcgtttcggagcgcggttttgggttcggggcgtcggggttcgtaagttgttttcgcgggtcggagcgcggcggcggggcggacggttcggggtttcgcgggtttttttttagtttcggggtcgg

SEQ ID NO: 18140 - DNA, 671 bp, Artificial Sequence
  chemically treated genomic DNA (Homo sapiens) CpG-island No: 18140
ccgaccccgaaactaaaaaaaaacccgcgaaaccccgaaccgtccgccccgccgccgcgctccgacccgcgaaaacaacttacgaaccccgacgccccgaacccaaaaccgcgctccgaaacgccgcttccaaaactcgacccgttattctcctaaactaaaaaacccgaaaaatataaccccgcgaactacccgaaaaacgcgcctttccgcttacaaaaatccaacaacaaccaccgaacgcgaaacgaaatctacgtcttctctcccttccccgcgcccacgacgaacgaactaacgctaaaacaaaatcccgaatccccgccgcaaccctcgaacctcaaccaaacccacccccttccgaacgaacccgtaaaaaatcaaaaaaacgacccccgcctccgaaccgtattcgataccctaaacgaaaataaaaacgatttcgtccgcatcgaaaacttcatccaatttactacgatctacgaaacaaaacaaatacgaaacgacccgaaccgaaacgtaaaaactaaacaaatacgcgctaaccgacgaaattaatataaaaccgatcgacgctacccctaaaatcgaaaaaaacactatcaaaacctaacgatcctactttttctacttattcaccacttcgaccctaaatttctaattaaattacg

SEQ ID NO: 18141 - DNA, 566 bp, Artificial Sequence
  chemically treated genomic DNA (Homo sapiens) CpG-island No: 18141
  unsure (272)
gcggggggtttcggggcggcggggggttttcgggtaggcgggggcgggtttcgggttggtatcgtttttcgcgttcgtttttcgcgtttatagcggttcgcgggtcgggcgttatgggcggttttttttggcgtttcgcgttgcgggggttgcgttgcggttcgcgggtttcgggttcgagtttgttagtgcgttacggttcgggtgagtggggtcgcgcgtttcggcggggacgcggagggaggaaggggcgcgcgtcgttcggtttttgngcgcgtacgtgcgggttggggttcgatttttttagaggtttcggggcgcgggttgcggggttcgttcgagttggggaaggcgtcggttcgtattcgtacgtttttttagtgttcgttcggttttgcggttttttttcgtttttttaggttttaggttgtaggcgttcggcgagttggtagtttgggcgggttcggggcgatcgagggttcgggagcgtaaggaaggtagaggtcggttgtagtattgggcggggagggggtttttcggtcggggtgggggtgggggtgtggggg

SEQ ID NO: 18142 - DNA, 566 bp, Artificial Sequence
  chemically treated genomic DNA (Homo sapiens) CpG-island No: 18142
  unsure (295)
cccccacacccccacccccaccccgaccgaaaaaccccctccccgcccaatactacaaccgacctctaccttccttacgctcccgaaccctcgatcgccccgaacccgcccaaactaccaactcgccgaacgcctacaacctaaaacctaaaaaaacgaaaaaaaaccgcaaaaccgaacgaacactaaaaaaacgtacgaatacgaaccgacgccttccccaactcgaacgaaccccgcaacccgcgccccgaaacctctaaaaaaatcgaaccccaacccgcacgtacgcgcncaaaaaccgaacgacgcgcgccccttcctccctccgcgtccccgccgaaacgcgcgaccccactcacccgaaccgtaacgcactaacaaactcgaacccgaaacccgcgaaccgcaacgcaacccccgcaacgcgaaacgccaaaaaaaaccgcccataacgcccgacccgcgaaccgctataaacgcgaaaaacgaacgcgaaaaacgataccaacccgaaacccgcccccgcctacccgaaaaccccccgccgccccgaaaccccccgc

SEQ ID NO: 18143 - DNA, 566 bp, Artificial Sequence
  chemically treated genomic DNA (Homo sapiens) CpG-island No: 18143
  unsure (295)
tttttatatttttatttttatttcggtcgggagatttttttttcgtttagtgttgtagtcggtttttgttttttttgcgttttcgggttttcggtcgtttcggattcgtttaggttgttaattcgtcgggcgtttgtagtttggggtttggggaggcgagaaggagtcgtagagtcggacgggtattggaggggcgtgcgggtgcgagtcggcgttttttttaattcggacggatttcgtagttcgcgtttcgaggtttttgggggagtcggattttagttcgtacgtgcgcgtntaaaggtcgagcggcgcgcgttttttttttttttcgcgttttcgtcggagcgcgcggttttatttattcgagtcgtggcgtattagtaggttcgggttcggggttcgcgggtcgtagcgtagttttcgtagcgcggagcgttagaagaggtcgtttatgacgttcggttcgcgggtcgttgtgagcgcgaggagcgggcgcggagggcggtgttagttcgagattcgttttcgtttgttcgggagtttttcgtcgtttcggagtttttcgt

SEQ ID NO: 18144 - DNA, 566 bp, Artificial Sequence
  chemically treated genomic DNA (Homo sapiens) CpG-island No: 18144
  unsure (272)
acgaaaaactccgaaacgacgaaaaactcccgaacaaacgaaaacgaatctcgaactaacaccgccctccgcgcccgctcctcgcgctcacaacgacccgcgaaccgaacgtcataaacgacctcttctaacgctccgcgctacgaaaactacgctacgacccgcgaaccccgaacccgaacctactaatacgccacgactcgaataaataaaaccgcgcgctccgacgaaaacgcgaaaaaaaaaaaaaacgcgcgccgctcgacctttanacgcgcacgtacgaactaaaatccgactcccccaaaaacctcgaaacgcgaactacgaaatccgtccgaattaaaaaaaacgccgactcgcacccgcacgcccctccaatacccgtccgactctacgactccttctcgcctccccaaaccccaaactacaaacgcccgacgaattaacaacctaaacgaatccgaaacgaccgaaaacccgaaaacgcaaaaaaaacaaaaaccgactacaacactaaacgaaaaaaaaatctcccgaccgaaataaaaataaaaatataaaaa

SEQ ID NO: 18145 - DNA, 531 bp, Artificial Sequence
  chemically treated genomic DNA (Homo sapiens) CpG-island No: 18145
aaagattcggggaggagattcgtagatcgtcgagtttttgtcgcgggaatcgcgttttcggtttcgtaatgcgtttgcgtttcgcgcgtcgatttttagttttagtaggtcgcgggcgggggcggggttttcggggagaattcgggggaggggcggggttttcgggaagtaattagggtaggggcggggcgttcggggagtggggcggggttttcggttttaggcgagttcgtagttgcgcgtcgggttttggaggtcgaggtcgttttcgttcgttgttttcgtagttttcgacgggagcgttatggtttagtcgtcgttcgacgtggagggggacgattgttttttcgcgtatcgttattttttttgttcggatttgttgcggtgagcggggtttgggaagcgagcgtagttttggtgcggggttcggttcgcgggcgtcggcgtttttacgtggttttcgagggttcgcgtgttaggaaatttgttttgtttggtttttttttttttttttttttttttttttttttt

SEQ ID NO: 18146 - DNA, 531 bp, Artificial Sequence
  chemically treated genomic DNA (Homo sapiens) CpG-island No: 18146
aaaaaaaaaaaaaaaaaaaaaaaaaaaaaaaaaaccaaacaaaacaaatttcctaacacgcgaaccctcgaaaaccacgtaaaaacgccgacgcccgcgaaccgaaccccgcaccaaaactacgctcgcttcccaaaccccgctcaccgcaacaaatccgaacaaaaaaaataacgatacgcgaaaaaacaatcgtccccctccacgtcgaacgacgactaaaccataacgctcccgtcgaaaactacgaaaacaacgaacgaaaacgacctcgacctccaaaacccgacgcgcaactacgaactcgcctaaaaccgaaaaccccgccccactccccgaacgccccgcccctaccctaattacttcccgaaaaccccgcccctcccccgaattctccccgaaaaccccgcccccgcccgcgacctactaaaactaaaaatcgacgcgcgaaacgcaaacgcattacgaaaccgaaaacgcgattcccgcgacaaaaactcgacgatctacgaatctcctccccgaatcttt

SEQ ID NO: 18147 - DNA, 531 bp, Artificial Sequence
  chemically treated genomic DNA (Homo sapiens) CpG-island No: 18147
aaaaaaaaaaagaaagaaaaaagaaagaaaggagttaggtaagataggttttttaatacgcgagttttcggggattacgtgggggcgtcggcgttcgcggatcggatttcgtattaaggttgcgttcgttttttaggtttcgtttatcgtagtaggttcgggtagaagaggtggcggtacgcggggagatagtcgtttttttttacgtcgggcggcggttgggttatggcgttttcgtcggggattgcggggataacgggcgggagcggtttcggtttttaggattcggcgcgtagttgcgaattcgtttggaatcgggagtttcgttttatttttcggacgtttcgtttttgttttgattgtttttcggaggtttcgtttttttttcgaatttttttcggaggtttcgttttcgttcgcggtttgttgggattggaagtcggcgcgcgaggcgtaggcgtattgcggggtcgggggcgcggttttcgcggtagaagttcggcggtttgcgggtttttttttcgagttttt

SEQ ID NO: 18148 - DNA, 531 bp, Artificial Sequence
  chemically treated genomic DNA (Homo sapiens) CpG-island No: 18148
aaaaactcgaaaaaaaaacccgcaaaccgccgaacttctaccgcgaaaaccgcgcccccgaccccgcaatacgcctacgcctcgcgcgccgacttccaatcccaacaaaccgcgaacgaaaacgaaacctccgaaaaaaattcgaaaaaaaaacgaaacctccgaaaaacaatcaaaacaaaaacgaaacgtccgaaaaataaaacgaaactcccgattccaaacgaattcgcaactacgcgccgaatcctaaaaaccgaaaccgctcccgcccgttatccccgcaatccccgacgaaaacgccataacccaaccgccgcccgacgtaaaaaaaaacgactatctccccgcgtaccgccacctcttctacccgaacctactacgataaacgaaacctaaaaaacgaacgcaaccttaatacgaaatccgatccgcgaacgccgacgcccccacgtaatccccgaaaactcgcgtattaaaaaacctatcttacctaactcctttctttcttttttctttcttttttttttt

SEQ ID NO: 18149 - DNA, 706 bp, Artificial Sequence
  chemically treated genomic DNA (Homo sapiens) CpG-island No: 18149
tgtaatgcgtttcggttttttgtaattcgtgtgtgtttcgtgtttgtaatgggttttggttttttgtaaattcgtgtgtgtttcgtgtttgtaatgggtttcggttttttgtaattcgtgtatgtttcgtgtttgtaatgggtttcggttttttgtaattcgtgtgtgtttcgtgtatgtaatgtgattcggttttttgtaaattcgtgtgtgtttcgtgtttgtaatgtgtcgcggttttttgtaattcgtgtgtgtttcgtgtttgtaatgcgtttcggttttttgtaattcgtgtgtgtttcgtgtttgtaatgcgtttcggttttttgtaattcgtgtgtgtttcgtgtttgtaatgggtttcggttttttgtaattcgtgtgtgtttcgtgtttgtaatgtgtttcggttttttgtaattcgtgtgtgtttcgtgtttgtaatgggtttcggttttttgtaattcgtgtgtgtttcgtgtttgtaatgtgtttcggttttttgtaattcgtgtgtgtttcgtgtttgtaatgggttttggttttttgtaaagttgtgtgtgtttcgtgtttgtaatgtgtttcggttttttgtaaattcgtgtgtgtttcgtgtttgtaatgtgtcgcggttttttgtaaatttttgtgtgttttatattatttggattaggtatttttttttagcggttcggggtgttga

SEQ ID NO: 18150 - DNA, 706 bp, Artificial Sequence
  chemically treated genomic DNA (Homo sapiens) CpG-island No: 18150
tcaacaccccgaaccgctaaaaaaaaatacctaatccaaataatataaaacacacaaaaatttacaaaaaaccgcgacacattacaaacacgaaacacacacgaatttacaaaaaaccgaaacacattacaaacacgaaacacacacaactttacaaaaaaccaaaacccattacaaacacgaaacacacacgaattacaaaaaaccgaaacacattacaaacacgaaacacacacgaattacaaaaaaccgaaacccattacaaacacgaaacacacacgaattacaaaaaaccgaaacacattacaaacacgaaacacacacgaattacaaaaaaccgaaacccattacaaacacgaaacacacacgaattacaaaaaaccgaaacgcattacaaacacgaaacacacacgaattacaaaaaaccgaaacgcattacaaacacgaaacacacacgaattacaaaaaaccgcgacacattacaaacacgaaacacacacgaatttacaaaaaaccgaatcacattacatacacgaaacacacacgaattacaaaaaaccgaaacccattacaaacacgaaacatacacgaattacaaaaaaccgaaacccattacaaacacgaaacacacacgaatttacaaaaaaccaaaacccattacaaacacgaaacacacacgaattacaaaaaaccgaaacgcattaca

SEQ ID NO: 18151 - DNA, 706 bp, Artificial Sequence
  chemically treated genomic DNA (Homo sapiens) CpG-island No: 18151
ttagtatttcgggtcgttgggagaaggtatttagtttagatgatatgggatatataggggtttataggaaatcgcgatatattatagatacgggatatatacgggtttataggaaatcgggatatattatagatacgggatatatatagttttataggaaattaggatttattatagatacgggatatatacgggttataggaaatcgggatatattatagatacgggatatatacgggttataggaaatcgggatttattatagatacgggatatatacgggttataggaaatcgggatatattatagatacgggatatatacgggttataggaaatcgggatttattatagatacgggatatatacgggttataggaaatcgggacgtattatagatacgggatatatacgggttataggaaatcgggacgtattatagatacgggatatatacgggttataggaaatcgcgatatattatagatacgggatatatacgggtttataggaaatcgggttatattatatatacgggatatatacgggttataggaaatcgggatttattatagatacgggatatatacgggttataggaaatcgggatttattatagatacgggatatatacgggtttataggaaattaggatttattatagatacgggatatatacgggttataggaaatcgggacgtattata

SEQ ID NO: 18152 - DNA, 706 bp, Artificial Sequence
  chemically treated genomic DNA (Homo sapiens) CpG-island No: 18152
tataatacgtcccgatttcctataacccgtatatatcccgtatctataataaatcctaatttcctataaacccgtatatatcccgtatctataataaatcccgatttcctataacccgtatatatcccgtatctataataaatcccgatttcctataacccgtatatatcccgtatatataatataacccgatttcctataaacccgtatatatcccgtatctataatatatcgcgatttcctataacccgtatatatcccgtatctataatacgtcccgatttcctataacccgtatatatcccgtatctataatacgtcccgatttcctataacccgtatatatcccgtatctataataaatcccgatttcctataacccgtatatatcccgtatctataatatatcccgatttcctataacccgtatatatcccgtatctataataaatcccgatttcctataacccgtatatatcccgtatctataatatatcccgatttcctataacccgtatatatcccgtatctataataaatcctaatttcctataaaactatatatatcccgtatctataatatatcccgatttcctataaacccgtatatatcccgtatctataatatatcgcgatttcctataaacccctatatatcccatatcatctaaactaaataccttctcccaacgacccgaaatactaa

SEQ ID NO: 18153 - DNA, 2474 bp, Artificial Sequence
  chemically treated genomic DNA (Homo sapiens) CpG-island No: 18153
ggacgggtgtgagtggtgttacgggacgggtgtgagtggtgttacgggacgggtgtgagtggtgtttcgggacgggtgtgagtggtgttacgggacgggtgtgagtgatgttacgggacgggtgtgagtggtgttacgggacgggtgtgagtggtgttacgggacgggtgtgagtggtgtttcgggacgggtgtgcgtggtgtttcgggacgggtgtgcgtggtgtttcgggacgggtgtgtagtggtgtttcgggacgggtgtgcgtggtgtttcgggatgggtgtgcgtggtgtttcgggatgggtgtgagtggtgtttcgggatgggtgtgagtggtgtttcgggatgggtgtgcgtggtgttacgggatgggtgtgtagtggtgtttcgggatgggtgtgcgtggtgtttcgggatgggtgtgcgtggtgtttcgggatgggtgtgcgtggtgtttcgggatgggtgtgcgtggtgtttcgggatgggtgtgagtggtgtttcgggatgggtgtgagtggtgtttcgggatgggtgtgtagtggtgtttcgggatgggtgtgagtggtgtttcgggatgggtgtgagtggtgtttcgggatgggtgtgagtggtgttacgggatgggtgtgagtggtgtttcgggatgggtgtgcgtggtgttacgggatgggtgtgagtggtgtttcgggatgggtgtgcgtggtgttacgggatgggtgtgagtggtgttacgggatgggtgtgtagtggtgtttcgggatgggtgtgtagtggtgtttcgggatgggtgtgtagtggtgtttcgggatgggtgtgagtggtgtttcgggacgggtgtgtagtggtgtttcgggacgggtgtgagtggtgtttcgggacgggtgtgagtggtgttacgggacgggtgtgagtggtgttacgggacgggtgtgagtggtgattcgggacgggtgtgtagtggtgattcgggacgggtgtgcgtggtgtttcgggacgggtgtgtagtggtgtttcgggacgggtgtgtagtggtgtttcgggacgggtgtgagtggtgtttcgggacgggtgtgagtggtgtttcgggacgggtgtgtagtggtgtttcgggacgggtgtgtagtggtgtttcgggacgggtgtgagtggtgttacgggacgggtgtgagtggtgttacgggacgggtgtgagtggtgtttcgggacgggtgtgagtggtgtttcgggacgggtgtgattggtgttacgggacgggtgtgtagtggtgttacgggacgggtgtgagtggtgtttcgggacgggtgtgagtggtgttacgggacgggtgtgagtggtgttacgggacgggtgtgagtggtgtttcgggacgggtgtgtagtggtgtttcgggacgggtgtgtagtggtgttacgggacgggtgtgtagtggtgttacgggacgggtgtgtagtggtgttacgggacgggtgtgtagtggtgttacgggacgcgtgtgtagtggtgttacgggacgggtgtgagtgatgttacgggacgggtgtgagtggtgttacgggacgggtgtgagtggtgtttcgggacgggtgtgtagtgatgtttcgggacgggtgtgtattgatgttacgggacgggtgtgtagtggtgtttcgggacgggtgtgagtggtgtttcgggacgggtgtgagtggtgtttcgggacgggtgtgtagtggtgttacgggacgggtgtgtagtggtgttacgggacgggtgtgagtggtgtttcgggacgggtgtgagtggtgtttcgggacgggtgtgtagtgttgttacgggacgggtgtgtagtggtgtttcgggacgggtgtgtagtggtgtttcgggatgggtgtgtagtggtgtttcgggaggggtgtgtagtggtgtttcgggacgggtgtgagtggtgttacgggacgggtgtgagtggtgtttcgggacgggtgtgagtggtgtttcgggacgggtgtgtagtgttgttacgggacgggtgtgagtggtgtttcgggacgggtgtgtagtgatgttacgggacgggtgtgtagtggtgtttcgggacgggtgtgtagtggtgtttcgggacgggtgtgtagtggtgtttcgggacgggtgtgcgtggtgtttcgggacgggtgtgtagtggtgtttcgggacgggtgtgtagtggtgtttcgggacgggtgtgtagtggtgtttcgggacgggtgtgtagtggtgtttcgggatgggtgtgagtggtgtttcgggatgggtgtgtagtgatgttacgagatgggtgtgagtggtgtttcgggatgggtgtgagtggtgttacgggatgggtgtgtagtggtgtttcgggatgggtgtgagtggtgtttcgggatgggtgtgtagtggtgttacgggatcggtgtgagtggtgttacgggatgggtgtgtagtgatggtatcggatgggtgtgtagtgg

SEQ ID NO: 18154 - DNA, 2474 bp, Artificial Sequence
  chemically treated genomic DNA (Homo sapiens) CpG-island No: 18154
ccactacacacccatccgataccatcactacacacccatcccgtaacaccactcacaccgatcccgtaacaccactacacacccatcccgaaacaccactcacacccatcccgaaacaccactacacacccatcccgtaacaccactcacacccatcccgaaacaccactcacacccatctcgtaacatcactacacacccatcccgaaacaccactcacacccatcccgaaacaccactacacacccgtcccgaaacaccactacacacccgtcccgaaacaccactacacacccgtcccgaaacaccactacacacccgtcccgaaacaccacgcacacccgtcccgaaacaccactacacacccgtcccgaaacaccactacacacccgtcccgaaacaccactacacacccgtcccgtaacatcactacacacccgtcccgaaacaccactcacacccgtcccgtaacaacactacacacccgtcccgaaacaccactcacacccgtcccgaaacaccactcacacccgtcccgtaacaccactcacacccgtcccgaaacaccactacacacccctcccgaaacaccactacacacccatcccgaaacaccactacacacccgtcccgaaacaccactacacacccgtcccgtaacaacactacacacccgtcccgaaacaccactcacacccgtcccgaaacaccactcacacccgtcccgtaacaccactacacacccgtcccgtaacaccactacacacccgtcccgaaacaccactcacacccgtcccgaaacaccactcacacccgtcccgaaacaccactacacacccgtcccgtaacatcaatacacacccgtcccgaaacatcactacacacccgtcccgaaacaccactcacacccgtcccgtaacaccactcacacccgtcccgtaacatcactcacacccgtcccgtaacaccactacacacgcgtcccgtaacaccactacacacccgtcccgtaacaccactacacacccgtcccgtaacaccactacacacccgtcccgtaacaccactacacacccgtcccgaaacaccactacacacccgtcccgaaacaccactcacacccgtcccgtaacaccactcacacccgtcccgtaacaccactcacacccgtcccgaaacaccactcacacccgtcccgtaacaccactacacacccgtcccgtaacaccaatcacacccgtcccgaaacaccactcacacccgtcccgaaacaccactcacacccgtcccgtaacaccactcacacccgtcccgtaacaccactcacacccgtcccgaaacaccactacacacccgtcccgaaacaccactacacacccgtcccgaaacaccactcacacccgtcccgaaacaccactcacacccgtcccgaaacaccactacacacccgtcccgaaacaccactacacacccgtcccgaaacaccacgcacacccgtcccgaatcaccactacacacccgtcccgaatcaccactcacacccgtcccgtaacaccactcacacccgtcccgtaacaccactcacacccgtcccgaaacaccactcacacccgtcccgaaacaccactacacacccgtcccgaaacaccactcacacccatcccgaaacaccactacacacccatcccgaaacaccactacacacccatcccgaaacaccactacacacccatcccgtaacaccactcacacccatcccgtaacaccacgcacacccatcccgaaacaccactcacacccatcccgtaacaccacgcacacccatcccgaaacaccactcacacccatcccgtaacaccactcacacccatcccgaaacaccactcacacccatcccgaaacaccactcacacccatcccgaaacaccactacacacccatcccgaaacaccactcacacccatcccgaaacaccactcacacccatcccgaaacaccacgcacacccatcccgaaacaccacgcacacccatcccgaaacaccacgcacacccatcccgaaacaccacgcacacccatcccgaaacaccactacacacccatcccgtaacaccacgcacacccatcccgaaacaccactcacacccatcccgaaacaccactcacacccatcccgaaacaccacgcacacccatcccgaaacaccacgcacacccgtcccgaaacaccactacacacccgtcccgaaacaccacgcacacccgtcccgaaacaccacgcacacccgtcccgaaacaccactcacacccgtcccgtaacaccactcacacccgtcccgtaacaccactcacacccgtcccgtaacatcactcacacccgtcccgtaacaccactcacacccgtcccgaaacaccactcacacccgtcccgtaacaccactcacacccgtcccgtaacaccactcacacccgtcc

SEQ ID NO: 18155 - DNA, 2474 bp, Artificial Sequence
  chemically treated genomic DNA (Homo sapiens) CpG-island No: 18155
ttattgtatatttattcggtattattattgtatatttatttcgtgatattatttatatcgatttcgtgatattattgtatatttatttcgagatattatttatatttatttcgagatattattgtatatttatttcgtgatattatttatatttatttcgagatattatttatatttatttcgtgatattattgtatatttatttcgagatattatttatatttatttcgagatattattgtatattcgtttcgagatattattgtatattcgtttcgagatattattgtatattcgtttcgagatattattgtatattcgtttcgagatattacgtatattcgtttcgagatattattgtatattcgtttcgagatattattgtatattcgtttcgagatattattgtatattcgtttcgtgatattattgtatattcgtttcgagatattatttatattcgtttcgtgataatattgtatattcgtttcgagatattatttatattcgtttcgagatattatttatattcgtttcgtgatattatttatattcgtttcgagatattattgtatatttttttcgagatattattgtatatttatttcgagatattattgtatattcgtttcgagatattattgtatattcgtttcgtgataatattgtatattcgtttcgagatattatttatattcgtttcgagatattatttatattcgtttcgtgatattattgtatattcgtttcgtgatattattgtatattcgtttcgagatattatttatattcgtttcgagatattatttatattcgtttcgagatattattgtatattcgtttcgtgatattagtgtatattcgtttcgagatattattgtatattcgtttcgagatattatttatattcgtttcgtgatattatttatattcgtttcgtgatattatttatattcgtttcgtgatattattgtatacgcgtttcgtgatattattgtatattcgtttcgtgatattattgtatattcgtttcgtgatattattgtatattcgtttcgtgatattattgtatattcgtttcgagatattattgtatattcgtttcgagatattatttatattcgtttcgtgatattatttatattcgtttcgtgatattatttatattcgtttcgagatattatttatattcgtttcgtgatattattgtatattcgtttcgtgatattagttatattcgtttcgagatattatttatattcgtttcgagatattatttatattcgtttcgtgatattatttatattcgtttcgtgatattatttatattcgtttcgagatattattgtatattcgtttcgagatattattgtatattcgtttcgagatattatttatattcgtttcgagatattatttatattcgtttcgagatattattgtatattcgtttcgagatattattgtatattcgtttcgagatattacgtatattcgtttcgagttattattgtatattcgtttcgagttattatttatattcgtttcgtgatattatttatattcgtttcgtgatattatttatattcgtttcgagatattatttatattcgtttcgagatattattgtatattcgtttcgagatattatttatatttatttcgagatattattgtatatttatttcgagatattattgtatatttatttcgagatattattgtatatttatttcgtgatattatttatatttatttcgtgatattacgtatatttatttcgagatattatttatatttatttcgtgatattacgtatatttatttcgagatattatttatatttatttcgtgatattatttatatttatttcgagatattatttatatttatttcgagatattatttatatttatttcgagatattattgtatatttatttcgagatattatttatatttatttcgagatattatttatatttatttcgagatattacgtatatttatttcgagatattacgtatatttatttcgagatattacgtatatttatttcgagatattacgtatatttatttcgagatattattgtatatttatttcgtgatattacgtatatttatttcgagatattatttatatttatttcgagatattatttatatttatttcgagatattacgtatatttatttcgagatattacgtatattcgtttcgagatattattgtatattcgtttcgagatattacgtatattcgtttcgagatattacgtatattcgtttcgagatattatttatattcgtttcgtgatattatttatattcgtttcgtgatattatttatattcgtttcgtgatattatttatattcgtttcgtgatattatttatattcgtttcgagatattatttatattcgtttcgtgatattatttatattcgtttcgtgatattatttatattcgttt

SEQ ID NO: 18156 - DNA, 2474 bp, Artificial Sequence
  chemically treated genomic DNA (Homo sapiens) CpG-island No: 18156
aaacgaatataaataatatcacgaaacgaatataaataatatcacgaaacgaatataaataatatctcgaaacgaatataaataatatcacgaaacgaatataaataatatcacgaaacgaatataaataatatcacgaaacgaatataaataatatcacgaaacgaatataaataatatctcgaaacgaatatacgtaatatctcgaaacgaatatacgtaatatctcgaaacgaatatacaataatatctcgaaacgaatatacgtaatatctcgaaataaatatacgtaatatctcgaaataaatataaataatatctcgaaataaatataaataatatctcgaaataaatatacgtaatatcacgaaataaatatacaataatatctcgaaataaatatacgtaatatctcgaaataaatatacgtaatatctcgaaataaatatacgtaatatctcgaaataaatatacgtaatatctcgaaataaatataaataatatctcgaaataaatataaataatatctcgaaataaatatacaataatatctcgaaataaatataaataatatctcgaaataaatataaataatatctcgaaataaatataaataatatcacgaaataaatataaataatatctcgaaataaatatacgtaatatcacgaaataaatataaataatatctcgaaataaatatacgtaatatcacgaaataaatataaataatatcacgaaataaatatacaataatatctcgaaataaatatacaataatatctcgaaataaatatacaataatatctcgaaataaatataaataatatctcgaaacgaatatacaataatatctcgaaacgaatataaataatatctcgaaacgaatataaataatatcacgaaacgaatataaataatatcacgaaacgaatataaataataactcgaaacgaatatacaataataactcgaaacgaatatacgtaatatctcgaaacgaatatacaataatatctcgaaacgaatatacaataatatctcgaaacgaatataaataatatctcgaaacgaatataaataatatctcgaaacgaatatacaataatatctcgaaacgaatatacaataatatctcgaaacgaatataaataatatcacgaaacgaatataaataatatcacgaaacgaatataaataatatctcgaaacgaatataaataatatctcgaaacgaatataactaatatcacgaaacgaatatacaataatatcacgaaacgaatataaataatatctcgaaacgaatataaataatatcacgaaacgaatataaataatatcacgaaacgaatataaataatatctcgaaacgaatatacaataatatctcgaaacgaatatacaataatatcacgaaacgaatatacaataatatcacgaaacgaatatacaataatatcacgaaacgaatatacaataatatcacgaaacgcgtatacaataatatcacgaaacgaatataaataatatcacgaaacgaatataaataatatcacgaaacgaatataaataatatctcgaaacgaatatacaataatatctcgaaacgaatatacactaatatcacgaaacgaatatacaataatatctcgaaacgaatataaataatatctcgaaacgaatataaataatatctcgaaacgaatatacaataatatcacgaaacgaatatacaataatatcacgaaacgaatataaataatatctcgaaacgaatataaataatatctcgaaacgaatatacaatattatcacgaaacgaatatacaataatatctcgaaacgaatatacaataatatctcgaaataaatatacaataatatctcgaaaaaaatatacaataatatctcgaaacgaatataaataatatcacgaaacgaatataaataatatctcgaaacgaatataaataatatctcgaaacgaatatacaatattatcacgaaacgaatataaataatatctcgaaacgaatatacaataatatcacgaaacgaatatacaataatatctcgaaacgaatatacaataatatctcgaaacgaatatacaataatatctcgaaacgaatatacgtaatatctcgaaacgaatatacaataatatctcgaaacgaatatacaataatatctcgaaacgaatatacaataatatctcgaaacgaatatacaataatatctcgaaataaatataaataatatctcgaaataaatatacaataatatcacgaaataaatataaataatatctcgaaataaatataaataatatcacgaaataaatatacaataatatctcgaaataaatataaataatatctcgaaataaatatacaataatatcacgaaatcgatataaataatatcacgaaataaatatacaataataataccgaataaatatacaataa

SEQ ID NO: 18157 - DNA, 526 bp, Artificial Sequence
  chemically treated genomic DNA (Homo sapiens) CpG-island No: 18157
cgggtaggtgcggtttaggtgcggtttcgcggtcggttcgcgggttttcgtagatcgggttttttttcgagggcgcggtcgttttagggttcgttcggttcgtcgtttaatgcgagtttttattttcgcgagcggcgtcgttttttttaatcggttgcgggcgcggcgtcgatcgtttaaagtttaagtcgtcgggggtgggcgtgaggggcggtggtcgcgttgagataggttgcggagggatgattggcgttttggcgtttaatgggcgttggcgggcggttttgagtatttgcgttgggcgggcgggaacggcgcgcggcgagttgagggtggcggcggtcgatatgttttaggtttcggatagcgagggcggtcgcgtcggttttaggtgcggcgcggggtatacgggaggcgggcggatagcgcgattacgtggcgggagcgggttagtttagggcgtttattagtcgtgtggggttggggtggggttggggggtagggcgattttatagaggttttcggg

SEQ ID NO: 18158 - DNA, 526 bp, Artificial Sequence
  chemically treated genomic DNA (Homo sapiens) CpG-island No: 18158
cccgaaaacctctataaaatcgccctaccccccaaccccaccccaaccccacacgactaataaacgccctaaactaacccgctcccgccacgtaatcgcgctatccgcccgcctcccgtataccccgcgccgcacctaaaaccgacgcgaccgccctcgctatccgaaacctaaaacatatcgaccgccgccaccctcaactcgccgcgcgccgttcccgcccgcccaacgcaaatactcaaaaccgcccgccaacgcccattaaacgccaaaacgccaatcatccctccgcaacctatctcaacgcgaccaccgcccctcacgcccacccccgacgacttaaactttaaacgatcgacgccgcgcccgcaaccgattaaaaaaaacgacgccgctcgcgaaaataaaaactcgcattaaacgacgaaccgaacgaaccctaaaacgaccgcgccctcgaaaaaaaacccgatctacgaaaacccgcgaaccgaccgcgaaaccgcacctaaaccgcacctacccg

SEQ ID NO: 18159 - DNA, 526 bp, Artificial Sequence
  chemically treated genomic DNA (Homo sapiens) CpG-island No: 18159
ttcgagggtttttgtgaggtcgttttgttttttaattttattttaattttatacggttggtggacgttttgggttggttcgttttcgttacgtggtcgcgttattcgttcgtttttcgtgtgtttcgcgtcgtatttggagtcggcgcggtcgttttcgttattcgggatttggaatatgtcgatcgtcgttatttttagttcgtcgcgcgtcgttttcgttcgtttagcgtaggtatttaaggtcgttcgttagcgtttattgggcgttaagacgttaattattttttcgtagtttattttagcgcggttatcgttttttacgtttattttcgacgatttaggttttgaacggtcggcgtcgcgttcgtagtcgattggggaaggcgacgtcgttcgcggaggtgggagttcgtattgggcggcgggtcgggcgggttttgggacggtcgcgttttcgggaggaagttcggtttgcgggagttcgcgagtcgatcgcggggtcgtatttgggtcgtatttgttcg

SEQ ID NO: 18160 - DNA, 526 bp, Artificial Sequence
  chemically treated genomic DNA (Homo sapiens) CpG-island No: 18160
cgaacaaatacgacccaaatacgaccccgcgatcgactcgcgaactcccgcaaaccgaacttcctcccgaaaacgcgaccgtcccaaaacccgcccgacccgccgcccaatacgaactcccacctccgcgaacgacgtcgccttccccaatcgactacgaacgcgacgccgaccgttcaaaacctaaatcgtcgaaaataaacgtaaaaaacgataaccgcgctaaaataaactacgaaaaaataattaacgtcttaacgcccaataaacgctaacgaacgaccttaaatacctacgctaaacgaacgaaaacgacgcgcgacgaactaaaaataacgacgatcgacatattccaaatcccgaataacgaaaacgaccgcgccgactccaaatacgacgcgaaacacacgaaaaacgaacgaataacgcgaccacgtaacgaaaacgaaccaacccaaaacgtccaccaaccgtataaaattaaaataaaattaaaaaacaaaacgacctcacaaaaaccctcgaa

SEQ ID NO: 18161 - DNA, 520 bp, Artificial Sequence
  chemically treated genomic DNA (Homo sapiens) CpG-island No: 18161
cgggatttcggtttattttattagcgcggcgatagcggaggagcgttcgggttttttgtatcgttcgtcgtttgttaagtcgcgtttttagcgtcgggtgtcggtagtttttggggaagcggtgtttgattatcgtcgcgcggttttggaagcggttacggaatacgcgcgtttcggtattttgttttattagttttaggtcgtttaagaagcggttgtttcgttttcgggttgcggttagagttttagttttcggggcgggtttttcgttatcggtcggcgtagtagttttggtcgtcgttatgattgttcggcgtaatagttttaatcgattagttgtttttgaaaattgtcgcgatgtttcggttcgtttcggaaattttgggattttttcggtaattttgggattttttcggttattcgaatgcgtttatttcggatattttcggtttgtaagtggttacgttttttaatttttcggttttttgaagtttgaggttttttgtaggaagggtttttg

SEQ ID NO: 18162 - DNA, 520 bp, Artificial Sequence
  chemically treated genomic DNA (Homo sapiens) CpG-island No: 18162
caaaaacccttcctacaaaaaacctcaaacttcaaaaaaccgaaaaattaaaaaacgtaaccacttacaaaccgaaaatatccgaaataaacgcattcgaataaccgaaaaaatcccaaaattaccgaaaaaatcccaaaatttccgaaacgaaccgaaacatcgcgacaattttcaaaaacaactaatcgattaaaactattacgccgaacaatcataacgacgaccaaaactactacgccgaccgataacgaaaaacccgccccgaaaactaaaactctaaccgcaacccgaaaacgaaacaaccgcttcttaaacgacctaaaactaataaaacaaaataccgaaacgcgcgtattccgtaaccgcttccaaaaccgcgcgacgataatcaaacaccgcttccccaaaaactaccgacacccgacgctaaaaacgcgacttaacaaacgacgaacgatacaaaaaacccgaacgctcctccgctatcgccgcgctaataaaataaaccgaaatcccg

SEQ ID NO: 18163 - DNA, 520 bp, Artificial Sequence
  chemically treated genomic DNA (Homo sapiens) CpG-island No: 18163
taagagttttttttgtagggaattttaggttttagagagtcgaaaagttgggaggcgtaattatttataggtcggaagtgttcggggtggacgtattcgggtagtcgaagaagttttaggattgtcgaagaagttttaggattttcgaagcgagtcgaagtatcgcgatagtttttagagatagttgatcggttggagttgttgcgtcgagtagttatggcggcggttagagttattacgtcggtcgatggcgaggagttcgtttcggaggttgaggttttggtcgtagttcgggagcggagtagtcgttttttgagcggtttggagttggtgaagtagggtgtcgaggcgcgcgtgtttcgtggtcgtttttagggtcgcgcggcggtgattaagtatcgtttttttaagggttatcggtattcggcgttggaggcgcggtttggtagacggcggacggtgtaggaggttcgggcgttttttcgttgtcgtcgcgttggtaaggtgggtcgggatttcg

SEQ ID NO: 18164 - DNA, 520 bp, Artificial Sequence
  chemically treated genomic DNA (Homo sapiens) CpG-island No: 18164
cgaaatcccgacccaccttaccaacgcgacgacaacgaaaaaacgcccgaacctcctacaccgtccgccgtctaccaaaccgcgcctccaacgccgaataccgataacccttaaaaaaacgatacttaatcaccgccgcgcgaccctaaaaacgaccacgaaacacgcgcgcctcgacaccctacttcaccaactccaaaccgctcaaaaaacgactactccgctcccgaactacgaccaaaacctcaacctccgaaacgaactcctcgccatcgaccgacgtaataactctaaccgccgccataactactcgacgcaacaactccaaccgatcaactatctctaaaaactatcgcgatacttcgactcgcttcgaaaatcctaaaacttcttcgacaatcctaaaacttcttcgactacccgaatacgtccaccccgaacacttccgacctataaataattacgcctcccaacttttcgactctctaaaacctaaaattccctacaaaaaaaactctta

SEQ ID NO: 18165 - DNA, 659 bp, Artificial Sequence
  chemically treated genomic DNA (Homo sapiens) CpG-island No: 18165
tcgggagaaggtcgcgttaggagagaagtcgcgcggcgtttagggtaaggtgtagagggcggcgcggcggtgtagcgagaaagacgcggagagagggcgttgttttgtggttttgtaatttttcgttagtttttacgtttttttcgcgcgttttcggcgttttttcgttttttttgttttttcgcgatttttgcgttttcgtgcgcgcgcgttcgtttgtttgttttttgtcgtcgtcgttgttcgggttatggcgatttgtatttggttgcggagttgtggggttcggcgtttcgggtcgacgtttttaggttgtcgttttcgttttcgcgtcggcggtttggtttttgttttcgggtttgcgttcggttcggtttagtttcgttgttacgttgggcgtttggcgggtttttttgcggcgttgttgcgtatcgatagtttcgtgggcggtcgttggttttcggtcgtcgttatttttttcgtgtaagattcggttagcggcgtcgttttgggtatggtagtcgattgcggggtgcgagaggttcgcgtcgtcgtgcgcgttgtttacgaggttttttgtcgttggagggaggttttcgttaaggtgagagagttcggatgtagggggttagagttggtcggggatacggcggggagta

SEQ ID NO: 18166 - DNA, 659 bp, Artificial Sequence
  chemically treated genomic DNA (Homo sapiens) CpG-island No: 18166
tactccccgccgtatccccgaccaactctaaccccctacatccgaactctctcaccttaacgaaaacctccctccaacgacaaaaaacctcgtaaacaacgcgcacgacgacgcgaacctctcgcaccccgcaatcgactaccatacccaaaacgacgccgctaaccgaatcttacacgaaaaaaataacgacgaccgaaaaccaacgaccgcccacgaaactatcgatacgcaacaacgccgcaaaaaaacccgccaaacgcccaacgtaacaacgaaactaaaccgaaccgaacgcaaacccgaaaacaaaaaccaaaccgccgacgcgaaaacgaaaacgacaacctaaaaacgtcgacccgaaacgccgaaccccacaactccgcaaccaaatacaaatcgccataacccgaacaacgacgacgacaaaaaacaaacaaacgaacgcgcgcgcacgaaaacgcaaaaatcgcgaaaaaacaaaaaaaacgaaaaaacgccgaaaacgcgcgaaaaaaacgtaaaaactaacgaaaaattacaaaaccacaaaacaacgccctctctccgcgtctttctcgctacaccgccgcgccgccctctacaccttaccctaaacgccgcgcgacttctctcctaacgcgaccttctcccga

SEQ ID NO: 18167 - DNA, 659 bp, Artificial Sequence
  chemically treated genomic DNA (Homo sapiens) CpG-island No: 18167
tgtttttcgtcgtgttttcggttagttttggttttttgtattcgggtttttttattttggcggagatttttttttagcggtagaaagtttcgtaggtagcgcgtacggcggcgcgggtttttcgtatttcgtagtcggttattatgtttagagcggcgtcgttggtcgggttttgtacggggaaggtggcggcggtcgggagttagcggtcgtttacgaagttgtcggtgcgtagtagcgtcgtagagaggttcgttaggcgtttagcgtagtagcggagttgggtcgggtcgggcgtaggttcggaggtagggattaggtcgtcggcgcgggggcggaggcggtagtttggaaacgtcgattcgaggcgtcgggttttatagtttcgtagttaaatgtaggtcgttatggttcgggtaacgacggcgataggaaataggtaagcgggcgcgcgcgtacgggaacgtaggggtcgcggggaagtaagaggagcgaggaggcgtcggggacgcgcggggaaagcgtgggagttggcggaaggttgtagagttatagagtagcgtttttttttcgcgtttttttcgttgtatcgtcgcgtcgttttttgtattttgttttaagcgtcgcgcggttttttttttggcgcgattttttttcgg

SEQ ID NO: 18168 - DNA, 659 bp, Artificial Sequence
  chemically treated genomic DNA (Homo sapiens) CpG-island No: 18168
ccgaaaaaaaatcgcgccaaaaaaaaaaccgcgcgacgcttaaaacaaaatacaaaaaacgacgcgacgatacaacgaaaaaaacgcgaaaaaaaaacgctactctataactctacaaccttccgccaactcccacgctttccccgcgcgtccccgacgcctcctcgctcctcttacttccccgcgacccctacgttcccgtacgcgcgcgcccgcttacctatttcctatcgccgtcgttacccgaaccataacgacctacatttaactacgaaactataaaacccgacgcctcgaatcgacgtttccaaactaccgcctccgcccccgcgccgacgacctaatccctacctccgaacctacgcccgacccgacccaactccgctactacgctaaacgcctaacgaacctctctacgacgctactacgcaccgacaacttcgtaaacgaccgctaactcccgaccgccgccaccttccccgtacaaaacccgaccaacgacgccgctctaaacataataaccgactacgaaatacgaaaaacccgcgccgccgtacgcgctacctacgaaactttctaccgctaaaaaaaaatctccgccaaaataaaaaaacccgaatacaaaaaaccaaaactaaccgaaaacacgacgaaaaaca

SEQ ID NO: 18169 - DNA, 1138 bp, Artificial Sequence
  chemically treated genomic DNA (Homo sapiens) CpG-island No: 18169
cgggttacgtatttttagttcgagaggttttagcgtagagcgtagtagttttcgcgagcgtaggtttttttcgcggtggtttcgtttagggcgtttgggtttcggggatttcgttttcgtttcgttcggtgttatttaggtttcggtggcgtagggcggagtcgcgggcggcgggcgtaggtggggaggggcggtcggagcgcgtcggtgatattcgcgggggggcggggaaggcgcggcggtcgtattttattttgggaagaaatcggttaggtgtggtttaggcgtttagtgttagcggggaggagattcgtttcgtcgtcgattaatattaatatttagtttcgacgtagtttttttgcgtttttgtcgtttttcgagttatagtttttttttcgtttttgttttcggttcgtcgtcgttttcgcgttcgtagcggtttcgggagggtttaggtagcgagtagcgatttcgcgagtttttcgtattttcgttcggtttttcggtcgttcgtttatttttggtttttttcgtttttttcgcgtcggttcgtttcgtttatgtttcggcgttgagtcgttttttcgattgttcgtcgatatgagttgtaacggaggtttttattcgcggattaatattttgggtcgtatgattcgcgtcgagtttggttcggatttgcgttacgaggtgattagcggcggcgggggtattagtaggatgtattattttcggcgcggcgtgattatcgattagaattcggacggttattggtgggtatttgttcggagagcgcgggttgcggggttcgcgggatagggagggatcgtttttttttggacgattgggagattcgggtttcgaaggtggaaaggtttttttgttttaggtttcgaaagaatttttcggtcgcgttgggagtaggatcgggtgttttgacgcgtgcggggataggttggtttttgttttgcgaatagggattcggtcgtattttttttttttttcgcgagttcgggcgggtggttagagggggcgtcgggttcgcgcggggttgttttttgtttgttggatacggttgtagtcgtttttgttttagttcgcgaatgggaggttaggcgaggtggggttgcgattataaaat

SEQ ID NO: 18170 - DNA, 1138 bp, Artificial Sequence
  chemically treated genomic DNA (Homo sapiens) CpG-island No: 18170
attttataatcgcaaccccacctcgcctaacctcccattcgcgaactaaaacaaaaacgactacaaccgtatccaacaaacaaaaaacaaccccgcgcgaacccgacgccccctctaaccacccgcccgaactcgcgaaaaaaaaaaaaaatacgaccgaatccctattcgcaaaacaaaaaccaacctatccccgcacgcgtcaaaacacccgatcctactcccaacgcgaccgaaaaattctttcgaaacctaaaacaaaaaaacctttccaccttcgaaacccgaatctcccaatcgtccaaaaaaaaacgatccctccctatcccgcgaaccccgcaacccgcgctctccgaacaaatacccaccaataaccgtccgaattctaatcgataatcacgccgcgccgaaaataatacatcctactaatacccccgccgccgctaatcacctcgtaacgcaaatccgaaccaaactcgacgcgaatcatacgacccaaaatattaatccgcgaataaaaacctccgttacaactcatatcgacgaacaatcgaaaaaacgactcaacgccgaaacataaacgaaacgaaccgacgcgaaaaaaacgaaaaaaaccaaaaataaacgaacgaccgaaaaaccgaacgaaaatacgaaaaactcgcgaaatcgctactcgctacctaaaccctcccgaaaccgctacgaacgcgaaaacgacgacgaaccgaaaacaaaaacgaaaaaaaaactataactcgaaaaacgacaaaaacgcaaaaaaactacgtcgaaactaaatattaatattaatcgacgacgaaacgaatctcctccccgctaacactaaacgcctaaaccacacctaaccgatttcttcccaaaataaaatacgaccgccgcgccttccccgcccccccgcgaatatcaccgacgcgctccgaccgcccctccccacctacgcccgccgcccgcgactccgccctacgccaccgaaacctaaataacaccgaacgaaacgaaaacgaaatccccgaaacccaaacgccctaaacgaaaccaccgcgaaaaaaacctacgctcgcgaaaactactacgctctacgctaaaacctctcgaactaaaaatacgtaacccg

SEQ ID NO: 18171 - DNA, 1138 bp, Artificial Sequence
  chemically treated genomic DNA (Homo sapiens) CpG-island No: 18171
gttttgtggtcgtagttttatttcgtttgattttttattcgcgggttgggataaaggcggttgtagtcgtgtttagtaggtaggggatagtttcgcgcgggttcgacgttttttttgattattcgttcgggttcgcgggaggggagaaaggtacgatcgagtttttgttcgtaggataggggttaatttgttttcgtacgcgttaggatattcggttttgtttttagcgcggtcgggaagttttttcgggatttggggtaaaaaaatttttttattttcgggattcgagttttttagtcgtttagaggaggacggtttttttttgtttcgcgagtttcgtagttcgcgtttttcgggtaggtatttattagtagtcgttcgagttttggtcggtgattacgtcgcgtcgagaatagtatattttgttggtgttttcgtcgtcgttggttatttcgtagcgtaggttcgggttagattcggcgcggattatgcggtttagagtgttgattcgcgggtgggagttttcgttgtagtttatgtcggcgggtaatcgggagagcggtttagcgtcgaggtataagcgaggcgggtcggcgcggagaaagcggagggggttaaggataggcggacggtcggggaatcgggcgggagtgcggaaggttcgcgaggtcgttgttcgttatttgggttttttcgaggtcgttgcgagcgcggagacggcgacgggtcgggggtaggagcgggaggaaagttgtggttcggagggcggtaagggcgtagaggagttgcgtcggagttgggtgttggtgttggtcggcggcggagcgagtttttttttcgttggtattgggcgtttaggttatatttggtcggtttttttttagggtggggtgcggtcgtcgcgtttttttcgttttttcgcgggtgttatcgacgcgtttcggtcgtttttttttatttgcgttcgtcgttcgcgatttcgttttgcgttatcgaggtttgagtaatatcgggcggggcgggggcggggttttcgagatttaagcgttttgggcgaagttatcgcggggaggatttgcgttcgcgggggttgttgcgttttgcgttggggtttttcgggttgggaatgcgtggttcg

SEQ ID NO: 18172 - DNA, 1138 bp, Artificial Sequence
  chemically treated genomic DNA (Homo sapiens) CpG-island No: 18172
cgaaccacgcattcccaacccgaaaaaccccaacgcaaaacgcaacaacccccgcgaacgcaaatcctccccgcgataacttcgcccaaaacgcttaaatctcgaaaaccccgcccccgccccgcccgatattactcaaacctcgataacgcaaaacgaaatcgcgaacgacgaacgcaaataaaaaaaaacgaccgaaacgcgtcgataacacccgcgaaaaaacgaaaaaaacgcgacgaccgcaccccaccctaaaaaaaaaccgaccaaatataacctaaacgcccaataccaacgaaaaaaaaactcgctccgccgccgaccaacaccaacacccaactccgacgcaactcctctacgcccttaccgccctccgaaccacaactttcctcccgctcctacccccgacccgtcgccgtctccgcgctcgcaacgacctcgaaaaaacccaaataacgaacaacgacctcgcgaaccttccgcactcccgcccgattccccgaccgtccgcctatccttaaccccctccgctttctccgcgccgacccgcctcgcttatacctcgacgctaaaccgctctcccgattacccgccgacataaactacaacgaaaactcccacccgcgaatcaacactctaaaccgcataatccgcgccgaatctaacccgaacctacgctacgaaataaccaacgacgacgaaaacaccaacaaaatatactattctcgacgcgacgtaatcaccgaccaaaactcgaacgactactaataaatacctacccgaaaaacgcgaactacgaaactcgcgaaacaaaaaaaaaccgtcctcctctaaacgactaaaaaactcgaatcccgaaaataaaaaaatttttttaccccaaatcccgaaaaaacttcccgaccgcgctaaaaacaaaaccgaatatcctaacgcgtacgaaaacaaattaacccctatcctacgaacaaaaactcgatcgtacctttctcccctcccgcgaacccgaacgaataatcaaaaaaaacgtcgaacccgcgcgaaactatcccctacctactaaacacgactacaaccgcctttatcccaacccgcgaataaaaaatcaaacgaaataaaactacgaccacaaaac

SEQ ID NO: 18173 - DNA, 563 bp, Artificial Sequence
  chemically treated genomic DNA (Homo sapiens) CpG-island No: 18173
ttataggttgtttaagttacgtggcgattgtggtttcgtttatagtttttagaggtttgcgcgtgcggtttgtagttcggtcgtttttttttggcgggtgggttgtagttatggagggcgagtttttatttgtggaggagcggcggcggttgtaggaggagttgaacgagttcgtggagagcggttgtcggacgttggaggaggtgatcgcgtttttgggttgggatttagatagtttggatttcggggaagaggaggcggcggaggtgaggagcgcggtcgcggggttttttcggggattatcggttcggggttttttttggaagaagggagattcgtattggtagtcgcggagggaagggcgaggagttttcgttcgtgtgtagagtcgcgatgggcgtttgggattcgaggggcgtcgggggttttggagtaattttgacgtttttgggtttcgggttggggcgcgcgaggaattttcgaaggttttatatcgatttttagtgcggcgtttttttcgcgtaatttcgagtttaaagaaaatcgggggtcgggcgcggtgg

SEQ ID NO: 18174 - DNA, 563 bp, Artificial Sequence
  chemically treated genomic DNA (Homo sapiens) CpG-island No: 18174
ccaccgcgcccgacccccgattttctttaaactcgaaattacgcgaaaaaaacgccgcactaaaaatcgatataaaaccttcgaaaattcctcgcgcgccccaacccgaaacccaaaaacgtcaaaattactccaaaacccccgacgcccctcgaatcccaaacgcccatcgcgactctacacacgaacgaaaactcctcgcccttccctccgcgactaccaatacgaatctcccttcttccaaaaaaaaccccgaaccgataatccccgaaaaaaccccgcgaccgcgctcctcacctccgccgcctcctcttccccgaaatccaaactatctaaatcccaacccaaaaacgcgatcacctcctccaacgtccgacaaccgctctccacgaactcgttcaactcctcctacaaccgccgccgctcctccacaaataaaaactcgccctccataactacaacccacccgccaaaaaaaaacgaccgaactacaaaccgcacgcgcaaacctctaaaaactataaacgaaaccacaatcgccacgtaacttaaacaacctataa

SEQ ID NO: 18175 - DNA, 563 bp, Artificial Sequence
  chemically treated genomic DNA (Homo sapiens) CpG-island No: 18175
ttatcgcgttcggttttcggttttttttaaattcgaagttgcgcgggaggagcgtcgtattggaggtcgatgtggagttttcgggagtttttcgcgcgttttagttcggaatttagggacgttagggttgttttagggttttcggcgtttttcgggttttaggcgtttatcgcggttttgtatacggacgaggatttttcgttttttttttcgcggttgttagtgcggatttttttttttttagagaagatttcgggtcgatagttttcgaaagggtttcgcggtcgcgttttttattttcgtcgttttttttttttcgggatttagattatttaggttttagtttagggacgcggttattttttttaacgttcggtagtcgttttttacgaattcgtttagttttttttgtagtcgtcgtcgtttttttataggtggaggttcgttttttatagttgtagtttattcgttaagaggaagcggtcgaattgtagatcgtacgcgtaggtttttgggagttgtgggcggggttatagtcgttacgtgatttgaatagtttatag

SEQ ID NO: 18176 - DNA, 563 bp, Artificial Sequence
  chemically treated genomic DNA (Homo sapiens) CpG-island No: 18176
ctataaactattcaaatcacgtaacgactataaccccgcccacaactcccaaaaacctacgcgtacgatctacaattcgaccgcttcctcttaacgaataaactacaactataaaaaacgaacctccacctataaaaaaacgacgacgactacaaaaaaaactaaacgaattcgtaaaaaacgactaccgaacgttaaaaaaaataaccgcgtccctaaactaaaacctaaataatctaaatcccgaaaaaaaaaaaacgacgaaaataaaaaacgcgaccgcgaaaccctttcgaaaactatcgacccgaaatcttctctaaaaaaaaaaaaatccgcactaacaaccgcgaaaaaaaaaacgaaaaatcctcgtccgtatacaaaaccgcgataaacgcctaaaacccgaaaaacgccgaaaaccctaaaacaaccctaacgtccctaaattccgaactaaaacgcgcgaaaaactcccgaaaactccacatcgacctccaatacgacgctcctcccgcgcaacttcgaatttaaaaaaaaccgaaaaccgaacgcgataa

SEQ ID NO: 18177 - DNA, 584 bp, Artificial Sequence
  chemically treated genomic DNA (Homo sapiens) CpG-island No: 18177
ggtcgcgggttaggcgtggcgggaaggagttcgcgtagatatagggtttgataggtagagagagatatagatatcggggattgatagtcgcgggggtacgcggggtcggttggtcgtggcgggcgtttatttggtagcggcggcggtggcggcgttcgcgatcgggtcgtttttttcgcgttgcgggttttttttttcgcggtcgggcgggcggtcggcgtaggtttcgtagaggcggcggcggcggcgacgtcggagtcgcggattgttgagcggcggggacgtagttgtattaatcgatttcgggtcgttcggttgggttcggtcgttttcggaggcgttcggttttgttcggttttgtacggtttttttcggttttgttcgattcggttgggggcgtggtttaggttttttagttcgtttaggtcgtttttggcggtcgcggggcggggttttcgagcgggtgcgagttttttgacgtcgcggggagcggattttgttttcggcgtatgcgttagtatttttttttttttttttttttcgttttatcgtgtggaggttgaagaagacggggaaggaggcgt

SEQ ID NO: 18178 - DNA, 584 bp, Artificial Sequence
  chemically treated genomic DNA (Homo sapiens) CpG-island No: 18178
acgcctccttccccgtcttcttcaacctccacacgataaaacgaaaaaaaaaaaaaaaaaaaaatactaacgcatacgccgaaaacaaaatccgctccccgcgacgtcaaaaaactcgcacccgctcgaaaaccccgccccgcgaccgccaaaaacgacctaaacgaactaaaaaacctaaaccacgcccccaaccgaatcgaacaaaaccgaaaaaaaccgtacaaaaccgaacaaaaccgaacgcctccgaaaacgaccgaacccaaccgaacgacccgaaatcgattaatacaactacgtccccgccgctcaacaatccgcgactccgacgtcgccgccgccgccgcctctacgaaacctacgccgaccgcccgcccgaccgcgaaaaaaaaaacccgcaacgcgaaaaaaacgacccgatcgcgaacgccgccaccgccgccgctaccaaataaacgcccgccacgaccaaccgaccccgcgtacccccgcgactatcaatccccgatatctatatctctctctacctatcaaaccctatatctacgcgaactccttcccgccacgcctaacccgcgacc

SEQ ID NO: 18179 - DNA, 584 bp, Artificial Sequence
  chemically treated genomic DNA (Homo sapiens) CpG-island No: 18179
gcgttttttttttcgttttttttagtttttatacggtggggcggggaggaggggggaggaggagtgttggcgtatgcgtcgggggtaaggttcgtttttcgcgacgttagggggttcgtattcgttcgaaagtttcgtttcgcggtcgttagaggcgatttgggcggattggggggtttgggttacgtttttagtcgagtcgagtaaggtcgaggggagtcgtgtaaggtcgagtagagtcgagcgttttcgagagcggtcgagtttagtcgagcggttcggagtcggttggtgtagttgcgttttcgtcgtttagtagttcgcggtttcggcgtcgtcgtcgtcgtcgtttttgcggggtttgcgtcggtcgttcgttcggtcgcggggagggaggttcgtagcgcgggaagagcggttcggtcgcgggcgtcgttatcgtcgtcgttgttaggtgagcgttcgttacggttagtcggtttcgcgtgttttcgcggttgttagttttcggtgtttgtatttttttttgtttgttagattttgtgtttgcgcgagttttttttcgttacgtttggttcgcggtt

SEQ ID NO: 18180 - DNA, 584 bp, Artificial Sequence
  chemically treated genomic DNA (Homo sapiens) CpG-island No: 18180
aaccgcgaaccaaacgtaacgaaaaaaaactcgcgcaaacacaaaatctaacaaacaaaaaaaaatacaaacaccgaaaactaacaaccgcgaaaacacgcgaaaccgactaaccgtaacgaacgctcacctaacaacgacgacgataacgacgcccgcgaccgaaccgctcttcccgcgctacgaacctccctccccgcgaccgaacgaacgaccgacgcaaaccccgcaaaaacgacgacgacgacgacgccgaaaccgcgaactactaaacgacgaaaacgcaactacaccaaccgactccgaaccgctcgactaaactcgaccgctctcgaaaacgctcgactctactcgaccttacacgactcccctcgaccttactcgactcgactaaaaacgtaacccaaaccccccaatccgcccaaatcgcctctaacgaccgcgaaacgaaactttcgaacgaatacgaaccccctaacgtcgcgaaaaacgaaccttacccccgacgcatacgccaacactcctcctcccccctcctccccgccccaccgtataaaaactaaaaaaaacgaaaaaaaaaacgc

SEQ ID NO: 18181 - DNA, 586 bp, Artificial Sequence
  chemically treated genomic DNA (Homo sapiens) CpG-island No: 18181
ttttatatttcgatttcgcgatcgacgcggttcgcgttttgcgcggcgggttcgagtttgcggagtcggggttgttaagttagtcgcgagaaagttcgggcgttcgtcgtgcgcgcggttgcggagcgcggtttggggtgttagcgggggaacgttcggtttcggaacgtcgttcgcgtattttttgtcgtttaggagttaagttataagttaagaaatagttcgagcgcgcggcggtcgtgatttagtagcggggtcgggtcggtagggcgggagggtagcgatcgtagggttcgagcgggatcgtagggcgggagcggggtcggggtagggtcgagttcggaaaaggttatcgagatgtcgcgggcgtcgtcgttcgagttcgcgattcgtttcgcggtcgggttagtagtagcgagggcggtagggcggcgttttgggcgggcgtggcgtcggggtcgggcgggcgggtcggggggtttttattttttcggtttttgggggagtttcgtttgtttcgggcgttggttcgtttttttttaatcgtagttgttattttagggttgttttttttattgtattagat

SEQ ID NO: 18182 - DNA, 586 bp, Artificial Sequence
  chemically treated genomic DNA (Homo sapiens) CpG-island No: 18182
atctaatacaataaaaaaaacaaccctaaaataacaactacgattaaaaaaaaacgaaccaacgcccgaaacaaacgaaactcccccaaaaaccgaaaaaataaaaaccccccgacccgcccgcccgaccccgacgccacgcccgcccaaaacgccgccctaccgccctcgctactactaacccgaccgcgaaacgaatcgcgaactcgaacgacgacgcccgcgacatctcgataaccttttccgaactcgaccctaccccgaccccgctcccgccctacgatcccgctcgaaccctacgatcgctaccctcccgccctaccgacccgaccccgctactaaatcacgaccgccgcgcgctcgaactatttcttaacttataacttaactcctaaacgacaaaaaatacgcgaacgacgttccgaaaccgaacgttcccccgctaacaccccaaaccgcgctccgcaaccgcgcgcacgacgaacgcccgaactttctcgcgactaacttaacaaccccgactccgcaaactcgaacccgccgcgcaaaacgcgaaccgcgtcgatcgcgaaatcgaaatataaaa

SEQ ID NO: 18183 - DNA, 586 bp, Artificial Sequence
  chemically treated genomic DNA (Homo sapiens) CpG-island No: 18183
gtttggtataatggggaagataattttgagatagtagttgcgattgaggaagagcgagttagcgttcggagtaagcggagtttttttaagagtcggaaaggtaggagtttttcggttcgttcgttcggtttcggcgttacgttcgtttaggacgtcgttttgtcgttttcgttgttgttggttcgatcgcgaggcgggtcgcgggttcgggcggcggcgttcgcggtatttcggtgatttttttcggattcggttttgtttcggtttcgttttcgttttgcggtttcgttcgggttttgcgatcgttgttttttcgttttgtcgattcggtttcgttgttgaattacggtcgtcgcgcgttcgggttgttttttaatttgtgatttagtttttgggcggtagaaagtgcgcggacggcgtttcggggtcggacgttttttcgttggtattttaagtcgcgtttcgtagtcgcgcgtacggcgggcgttcgagttttttcgcggttagtttgatagtttcggtttcgtagattcgggttcgtcgcgtaggacgcgggtcgcgtcggtcgcggagtcggggtgtggga

SEQ ID NO: 18184 - DNA, 586 bp, Artificial Sequence
  chemically treated genomic DNA (Homo sapiens) CpG-island No: 18184
tcccacaccccgactccgcgaccgacgcgacccgcgtcctacgcgacgaacccgaatctacgaaaccgaaactatcaaactaaccgcgaaaaaactcgaacgcccgccgtacgcgcgactacgaaacgcgacttaaaataccaacgaaaaaacgtccgaccccgaaacgccgtccgcgcactttctaccgcccaaaaactaaatcacaaattaaaaaacaacccgaacgcgcgacgaccgtaattcaacaacgaaaccgaatcgacaaaacgaaaaaacaacgatcgcaaaacccgaacgaaaccgcaaaacgaaaacgaaaccgaaacaaaaccgaatccgaaaaaaatcaccgaaataccgcgaacgccgccgcccgaacccgcgacccgcctcgcgatcgaaccaacaacaacgaaaacgacaaaacgacgtcctaaacgaacgtaacgccgaaaccgaacgaacgaaccgaaaaactcctacctttccgactcttaaaaaaactccgcttactccgaacgctaactcgctcttcctcaatcgcaactactatctcaaaattatcttccccattataccaaac

SEQ ID NO: 18185 - DNA, 1090 bp, Artificial Sequence
  chemically treated genomic DNA (Homo sapiens) CpG-island No: 18185
gtcgtggattttcggacgtgaaaacgtttaaagttagttgggaaaattttattagcgtttttcgcgtatagcgttagttataggaaaggatttttaggagcgaattcgggtagggaaatttcggacgttcgtatatttagtattagtatcggtatttagtatttagtatcgagtatcgagtacgtagtatttagtatcgattatcgagtagagtatttcgtacgtagaatttatcgagagtttgatgtagttttcgtcgtaggtatagcgttaggtttcggcgtttttataataaagggacgttggcgggcggggtttgagaggcgcgcggtggaggggtcgggcgcgaggtcgcggagatagttcggagttcggtattggggagtggtatagcgttggcggatttaggtgggttttacggggcgttcgcgggatcggaaatgacgcgtagaattttgtatcgggtttttcgttgtttcgcgggcgtcgttttttagtgttttagagttacggagtcggggaaacgcgtcgcggtttataacgttttcgcggttgttcgttggtttcgttcgggtcgttttattttaggtagacgggaggagaaatacggcgcgtttagcgttttttttttcgttggttttgttcgggtttttttattgtaggtcgacgggggtggaaatacgtagttttttttttttttttaaggtttagggtaatacggggtttttaagtgttttttcgttgtcgtttggtggtttagttcgggtcgttgtagtgtagttatacggggagggatacggcgcgtcgagtgtttcgggcggtcgtacgttggtttcgttcgggtcgttttattgtaggtagagggagaggacgacggtgcgcgtagtgtattttcgtggttcgttggtttcgtcggggtcgttttattgaaggtagaaggggggggatcgtggttttatttttcgcggtagttcgttggtttcgttcgggcggtttcgttcgggttgttttattagcggtattttagggcgggatcggttagtttgtggaggtagcggtttttaagtttcggagggtttattgtttaggt

SEQ ID NO: 18186 - DNA, 1090 bp, Artificial Sequence
  chemically treated genomic DNA (Homo sapiens) CpG-island No: 18186
acctaaacaataaaccctccgaaacttaaaaaccgctacctccacaaactaaccgatcccgccctaaaataccgctaataaaacaacccgaacgaaaccgcccgaacgaaaccaacgaactaccgcgaaaaataaaaccacgatccccccccttctaccttcaataaaacgaccccgacgaaaccaacgaaccacgaaaatacactacgcgcaccgtcgtcctctccctctacctacaataaaacgacccgaacgaaaccaacgtacgaccgcccgaaacactcgacgcgccgtatccctccccgtataactacactacaacgacccgaactaaaccaccaaacgacaacgaaaaaacacttaaaaaccccgtattaccctaaaccttaaaaaaaaaaaaaaaactacgtatttccacccccgtcgacctacaataaaaaaacccgaacaaaaccaacgaaaaaaaaaacgctaaacgcgccgtatttctcctcccgtctacctaaaataaaacgacccgaacgaaaccaacgaacaaccgcgaaaacgttataaaccgcgacgcgtttccccgactccgtaactctaaaacactaaaaaacgacgcccgcgaaacaacgaaaaacccgatacaaaattctacgcgtcatttccgatcccgcgaacgccccgtaaaacccacctaaatccgccaacgctataccactccccaataccgaactccgaactatctccgcgacctcgcgcccgacccctccaccgcgcgcctctcaaaccccgcccgccaacgtccctttattataaaaacgccgaaacctaacgctatacctacgacgaaaactacatcaaactctcgataaattctacgtacgaaatactctactcgataatcgatactaaatactacgtactcgatactcgatactaaatactaaataccgatactaatactaaatatacgaacgtccgaaatttccctacccgaattcgctcctaaaaatcctttcctataactaacgctatacgcgaaaaacgctaataaaattttcccaactaactttaaacgttttcacgtccgaaaatccacgac

SEQ ID NO: 18187 - DNA, 1090 bp, Artificial Sequence
  chemically treated genomic DNA (Homo sapiens) CpG-island No: 18187
atttgggtagtaaatttttcggggtttagaggtcgttgtttttatagattggtcgatttcgttttgaagtgtcgttggtggaatagttcgggcggaatcgttcgggcggaattaacgggttgtcgcggggggtggggttacggtttttttttttttgtttttagtggaacggtttcggcggaattaacgggttacggggatgtattacgcgtatcgtcgttttttttttttgtttgtagtggaacggttcgggcggaattaacgtgcggtcgttcggagtattcggcgcgtcgtgttttttttcgtgtggttgtattgtaacggttcgggttggattattaggcggtagcggagaggtatttaaaagtttcgtgttattttagattttaaaaaaaaaaaaaaaattgcgtgtttttattttcgtcggtttgtagtggaagggttcgagtagaattaacgggggaggggacgttgagcgcgtcgtgttttttttttcgtttgtttggagtagaacggttcgggcggaattaacgggtagtcgcgggggcgttgtgggtcgcggcgcgttttttcggtttcgtggttttggggtattgaggagcggcgttcgcggggtagcgaggagttcgatgtagggttttgcgcgttattttcggtttcgcgggcgtttcgtgaagtttatttggattcgttagcgttgtgttattttttagtgtcgagtttcgagttgttttcgcggtttcgcgttcggtttttttatcgcgcgttttttaggtttcgttcgttagcgtttttttgttgtgaaggcgtcggggtttagcgttatgtttgcggcggagattgtattaggttttcggtgggttttgcgtgcggggtgttttgttcggtgatcggtgttgggtgttgcgtgttcggtgttcggtgttgggtgttgggtgtcggtattgatgttgagtgtgcgggcgttcggggtttttttgttcggattcgtttttgggggtttttttttatggttggcgttgtgcgcggaaaacgttggtggggtttttttagttggttttaagcgtttttacgttcgggagtttacggt

SEQ ID NO: 18188 - DNA, 1090 bp, Artificial Sequence
  chemically treated genomic DNA (Homo sapiens) CpG-island No: 18188
accgtaaactcccgaacgtaaaaacgcttaaaaccaactaaaaaaaccccaccaacgttttccgcgcacaacgccaaccataaaaaaaaacccccaaaaacgaatccgaacaaaaaaaccccgaacgcccgcacactcaacatcaataccgacacccaacacccaacaccgaacaccgaacacgcaacacccaacaccgatcaccgaacaaaacaccccgcacgcaaaacccaccgaaaacctaatacaatctccgccgcaaacataacgctaaaccccgacgccttcacaacaaaaaaacgctaacgaacgaaacctaaaaaacgcgcgataaaaaaaccgaacgcgaaaccgcgaaaacaactcgaaactcgacactaaaaaataacacaacgctaacgaatccaaataaacttcacgaaacgcccgcgaaaccgaaaataacgcgcaaaaccctacatcgaactcctcgctaccccgcgaacgccgctcctcaataccccaaaaccacgaaaccgaaaaaacgcgccgcgacccacaacgcccccgcgactacccgttaattccgcccgaaccgttctactccaaacaaacgaaaaaaaaaacacgacgcgctcaacgtcccctcccccgttaattctactcgaacccttccactacaaaccgacgaaaataaaaacacgcaattttttttttttttttaaaatctaaaataacacgaaacttttaaatacctctccgctaccgcctaataatccaacccgaaccgttacaatacaaccacacgaaaaaaaacacgacgcgccgaatactccgaacgaccgcacgttaattccgcccgaaccgttccactacaaacaaaaaaaaaaaacgacgatacgcgtaatacatccccgtaacccgttaattccgccgaaaccgttccactaaaaacaaaaaaaaaaaaaccgtaaccccaccccccgcgacaacccgttaattccgcccgaacgattccgcccgaactattccaccaacgacacttcaaaacgaaatcgaccaatctataaaaacaacgacctctaaaccccgaaaaatttactacccaaat

SEQ ID NO: 18189 - DNA, 512 bp, Artificial Sequence
  chemically treated genomic DNA (Homo sapiens) CpG-island No: 18189
gtcgagggcggtttcgcggttgcgttttagtagatatatcgggtttcggggagttggtttacgggcggcggggttgggttcggggtttttaggcgttgattttcggggttcgtaggcgtgtggtttacggatttggtgtacgtggcggtttacgagatcggttacgcgttgggtttgatgtatttataatacggtcgggcgtttatgtatttgaacgttacgttgcgcggttggaaggcgttgttttaggacgagttgtgggggttgtatcggttttacggtgagtttttttgtcgggcgggagggcggggatcgggcggttttgagttaggtcgtgttttttacgttttcgataggatgtttcgataggttgttcgtgtgcgcgttttgggcgcggaggggtttttgcgacgttcgtcggcggtttatgaagaggttttgttttagtagttgcgatttttgttacggtgatgtttacggggtcgggatagggttgcgtgggagttgggttt

SEQ ID NO: 18190 - DNA, 512 bp, Artificial Sequence
  chemically treated genomic DNA (Homo sapiens) CpG-island No: 18190
aaacccaactcccacgcaaccctatcccgaccccgtaaacatcaccgtaacaaaaatcgcaactactaaaacaaaacctcttcataaaccgccgacgaacgtcgcaaaaacccctccgcgcccaaaacgcgcacacgaacaacctatcgaaacatcctatcgaaaacgtaaaaaacacgacctaactcaaaaccgcccgatccccgccctcccgcccgacaaaaaaactcaccgtaaaaccgatacaacccccacaactcgtcctaaaacaacgccttccaaccgcgcaacgtaacgttcaaatacataaacgcccgaccgtattataaatacatcaaacccaacgcgtaaccgatctcgtaaaccgccacgtacaccaaatccgtaaaccacacgcctacgaaccccgaaaatcaacgcctaaaaaccccgaacccaaccccgccgcccgtaaaccaactccccgaaacccgatatatctactaaaacgcaaccgcgaaaccgccctcgac

SEQ ID NO: 18191 - DNA, 512 bp, Artificial Sequence
  chemically treated genomic DNA (Homo sapiens) CpG-island No: 18191
aggtttagtttttacgtagttttgtttcggtttcgtgggtattatcgtagtagaagtcgtagttgttggggtagagtttttttatgagtcgtcggcgagcgtcgtagaagttttttcgcgtttaggacgcgtatacgaatagtttgtcgaggtattttgtcgggagcgtggggagtacggtttggtttaggatcgttcggttttcgttttttcgttcgataaagggatttatcgtagagtcggtgtagtttttatagttcgttttgggataacgttttttagtcgcgtagcgtggcgtttaggtgtatgagcgttcggtcgtgttgtgagtgtattaggtttagcgcgtggtcgatttcgtgggtcgttacgtgtattaggttcgtgagttatacgtttgcgggtttcgggggttagcgtttgggagtttcgggtttagtttcgtcgttcgtgggttagtttttcgaggttcggtgtatttgttggagcgtagtcgcggagtcgttttcggt

SEQ ID NO: 18192 - DNA, 512 bp, Artificial Sequence
  chemically treated genomic DNA (Homo sapiens) CpG-island No: 18192
accgaaaacgactccgcgactacgctccaacaaatacaccgaacctcgaaaaactaacccacgaacgacgaaactaaacccgaaactcccaaacgctaacccccgaaacccgcaaacgtataactcacgaacctaatacacgtaacgacccacgaaatcgaccacgcgctaaacctaatacactcacaacacgaccgaacgctcatacacctaaacgccacgctacgcgactaaaaaacgttatcccaaaacgaactataaaaactacaccgactctacgataaatccctttatcgaacgaaaaaacgaaaaccgaacgatcctaaaccaaaccgtactccccacgctcccgacaaaatacctcgacaaactattcgtatacgcgtcctaaacgcgaaaaaacttctacgacgctcgccgacgactcataaaaaaactctaccccaacaactacgacttctactacgataatacccacgaaaccgaaacaaaactacgtaaaaactaaacct

SEQ ID NO: 18193 - DNA, 688 bp, Artificial Sequence
  chemically treated genomic DNA (Homo sapiens) CpG-island No: 18193
gattcgtcgtttttattatttaaagtttcgtgcgggatgagattgttcgcggaagcgagggtgtcgttcgttttcgggttcgggttcgtttcgtttcgaggtttgttcggaagaaagatttcggtgcgtagttttcgtcgcgtttttatatttggttcgtttagtcggaatttatttttacggggtcgcggtcggtttttgagtttgagaagaaatagtaatcggcgttcgttagaagtatttttattttttgtgttgacgtttaatgatgatataatagtcgatttttggtttagaatttaagacgataggggttcgttttgtgcggtattttttgtgtttgcgcgggatgatgacgtataaaatagcgtttgtttaggtttaggattttaaaagaaattgcgtcgtgagttgtattttcgatttcggcgcgggtcggggcgtcgagtagagcgacgtcgatttttggagtagtttgcgtttgcgcggaacgcgtggtcggttttcggaattttatcgggattttttcggtagcgaagttcgcgtttgtgttaaggtttgcgagtagaatgttttcgcgatggacgttcgtattttatttttttgatcgttgggatttttagtggcgggtgggtggagcgcgttttatttatttgttggttatttcgtgaggcgttttaggtttgtg

SEQ ID NO: 18194 - DNA, 688 bp, Artificial Sequence
  chemically treated genomic DNA (Homo sapiens) CpG-island No: 18194
cacaaacctaaaacgcctcacgaaataaccaacaaataaataaaacgcgctccacccacccgccactaaaaatcccaacgatcaaaaaaataaaatacgaacgtccatcgcgaaaacattctactcgcaaaccttaacacaaacgcgaacttcgctaccgaaaaaatcccgataaaattccgaaaaccgaccacgcgttccgcgcaaacgcaaactactccaaaaatcgacgtcgctctactcgacgccccgacccgcgccgaaatcgaaaatacaactcacgacgcaatttcttttaaaatcctaaacctaaacaaacgctattttatacgtcatcatcccgcgcaaacacaaaaaataccgcacaaaacgaacccctatcgtcttaaattctaaaccaaaaatcgactattatatcatcattaaacgtcaacacaaaaaataaaaatacttctaacgaacgccgattactatttcttctcaaactcaaaaaccgaccgcgaccccgtaaaaataaattccgactaaacgaaccaaatataaaaacgcgacgaaaactacgcaccgaaatctttcttccgaacaaacctcgaaacgaaacgaacccgaacccgaaaacgaacgacaccctcgcttccgcgaacaatctcatcccgcacgaaactttaaataataaaaacgacgaatc

SEQ ID NO: 18195 - DNA, 688 bp, Artificial Sequence
  chemically treated genomic DNA (Homo sapiens) CpG-island No: 18195
tatagatttgaggcgttttacgaggtaattagtaggtaaatggagcgcgttttatttattcgttattaggggttttagcggttaagggggtggaatgcgggcgtttatcgcgaaggtattttgttcgtaagttttggtataggcgcgggtttcgttatcggaaaagtttcggtaggatttcggaagtcggttacgcgtttcgcgtaggcgtaaattgttttaaaagtcggcgtcgttttgttcggcgtttcggttcgcgtcgaagtcggaagtgtagtttacggcgtagttttttttggagttttggatttgagtaagcgttgttttatgcgttattatttcgcgtagatataggaagtgtcgtatagagcgagtttttgtcgttttgagttttgggttagaggtcggttattatattattattaggcgttaatataggaagtgaggatatttttggcgagcgtcggttgttgtttttttttaggtttagggatcggtcgcggtttcgtaggggtgagtttcgattgggcggattaggtgtgggagcgcgacgagaattgcgtatcgaggtttttttttcgagtaggtttcggagcggggcggattcgggttcgggggcgagcgatattttcgttttcgcggatagttttatttcgtacggaattttgggtggtggaggcggcgggtt

SEQ ID NO: 18196 - DNA, 688 bp, Artificial Sequence
  chemically treated genomic DNA (Homo sapiens) CpG-island No: 18196
aacccgccgcctccaccacccaaaattccgtacgaaataaaactatccgcgaaaacgaaaatatcgctcgcccccgaacccgaatccgccccgctccgaaacctactcgaaaaaaaaacctcgatacgcaattctcgtcgcgctcccacacctaatccgcccaatcgaaactcacccctacgaaaccgcgaccgatccctaaacctaaaaaaaaacaacaaccgacgctcgccaaaaatatcctcacttcctatattaacgcctaataataatataataaccgacctctaacccaaaactcaaaacgacaaaaactcgctctatacgacacttcctatatctacgcgaaataataacgcataaaacaacgcttactcaaatccaaaactccaaaaaaaactacgccgtaaactacacttccgacttcgacgcgaaccgaaacgccgaacaaaacgacgccgacttttaaaacaatttacgcctacgcgaaacgcgtaaccgacttccgaaatcctaccgaaacttttccgataacgaaacccgcgcctataccaaaacttacgaacaaaataccttcgcgataaacgcccgcattccacccccttaaccgctaaaacccctaataacgaataaataaaacgcgctccatttacctactaattacctcgtaaaacgcctcaaatctata

SEQ ID NO: 18197 - DNA, 979 bp, Artificial Sequence
  chemically treated genomic DNA (Homo sapiens) CpG-island No: 18197
ggtcgcgcgttcgcgggtagcgatgattttaggtagcgggcgattttaggcggacggtaggtcgggtttgtttatttatcgttcgttgtcgcgggcgtttgcgggggcgtttatatgtcggatcgagttcgtaggtttcgtcgtcgcgtcgtcgttagtcgtcgttatttggtttttggcgttttggtcgtttgttgttttatggtcgttcggatttcggcgtcggcgtcgtcgagtagtaatgcgtcgcgttcgtttattgcgtaggcgtattcgttacgtatgcgcgttgtcgcgtacgtggggcgtttcgcgcgtttgtcgggttttatcggcgtcgggatatttcgcgcgggcgggaggcggcgggcgtggcgggaaagaggcgggcggtggggaagaggggcgaatcgcggtggagagtagtgattagggagtggaggcgggtagcggggataggggcgggcgttcgcgattcgggtaggcgggggtcggcgtttcgaggagggcggttttcggttttcgtttttatttatttgtcgcgttcggagggcgttttcgggttcgttcgttacgtttacgtttaggcgttttcgatattgtgattttagttcggcgtttcgtttttaatttatcgttatcgcgggcgggatttttcggattacgtgggtcggtttaggggagtgtaggtgtttcgcgagagttggtttcgttcgtcgtcgtttttttaattatcgggttgtgatacggtgtgggtcgagtcggatttgggaatcgaaatttagagtagttgcggtagcgttgcgttttttcggggttgttcgtcggggttgggagggcggttttgcgtttgggggaatcgcgatcggttttacgtttatttttagcggttaggtgcgttttgtacgtttacgaacgtttttagaggtttacgtttgggattttaaggttggtagtggagggaggattcggtggtttg

SEQ ID NO: 18198 - DNA, 979 bp, Artificial Sequence
  chemically treated genomic DNA (Homo sapiens) CpG-island No: 18198
caaaccaccgaatcctccctccactaccaaccttaaaatcccaaacgtaaacctctaaaaacgttcgtaaacgtacaaaacgcacctaaccgctaaaaataaacgtaaaaccgatcgcgattcccccaaacgcaaaaccgccctcccaaccccgacgaacaaccccgaaaaaacgcaacgctaccgcaactactctaaatttcgattcccaaatccgactcgacccacaccgtatcacaacccgataattaaaaaaacgacgacgaacgaaaccaactctcgcgaaacacctacactcccctaaaccgacccacgtaatccgaaaaatcccgcccgcgataacgataaattaaaaacgaaacgccgaactaaaatcacaatatcgaaaacgcctaaacgtaaacgtaacgaacgaacccgaaaacgccctccgaacgcgacaaataaataaaaacgaaaaccgaaaaccgccctcctcgaaacgccgacccccgcctacccgaatcgcgaacgcccgcccctatccccgctacccgcctccactccctaatcactactctccaccgcgattcgcccctcttccccaccgcccgcctctttcccgccacgcccgccgcctcccgcccgcgcgaaatatcccgacgccgataaaacccgacaaacgcgcgaaacgccccacgtacgcgacaacgcgcatacgtaacgaatacgcctacgcaataaacgaacgcgacgcattactactcgacgacgccgacgccgaaatccgaacgaccataaaacaacaaacgaccaaaacgccaaaaaccaaataacgacgactaacgacgacgcgacgacgaaacctacgaactcgatccgacatataaacgcccccgcaaacgcccgcgacaacgaacgataaataaacaaacccgacctaccgtccgcctaaaatcgcccgctacctaaaatcatcgctacccgcgaacgcgcgacc

SEQ ID NO: 18199 - DNA, 979 bp, Artificial Sequence
  chemically treated genomic DNA (Homo sapiens) CpG-island No: 18199
taggttatcgggttttttttttattgttagttttgggattttaagcgtagatttttgaggacgttcgtgggcgtgtaaggcgtatttggtcgttagaggtgggcgtgaggtcgatcgcggtttttttaggcgtagggtcgtttttttagtttcgacggatagtttcgagggagcgtagcgttgtcgtagttgttttaagtttcggtttttaaattcggttcggtttatatcgtgttatagttcggtaattagggaagcggcggcgggcggggttagttttcgcggggtatttgtatttttttgagtcggtttacgtggttcgggaggtttcgttcgcggtggcggtgagttgggggcgggacgtcgggttgggattataatgtcgggggcgtttaggcgtagacgtggcgggcggattcgggggcgtttttcggacgcggtaggtgagtggggacgggagtcgggggtcgtttttttcggggcgtcgattttcgtttattcgagtcgcggacgttcgtttttgttttcgttgttcgtttttattttttggttattgttttttatcgcgattcgttttttttttttatcgttcgtttttttttcgttacgttcgtcgtttttcgttcgcgcggggtgtttcggcgtcggtgggattcggtagacgcgcgggacgttttacgtgcgcggtagcgcgtatgcgtggcgggtgcgtttgcgtagtgggcgggcgcggcgtattgttgttcggcggcgtcggcgtcggggttcgggcggttatggggtaataggcggttagggcgttaagggttaggtagcgacggttggcggcggcgcggcggcggggtttgcgggttcggttcggtatgtagacgttttcgtaggcgttcgcggtagcgaacggtgagtgagtagattcggtttgtcgttcgtttggggtcgttcgttgtttggggttatcgttgttcgcgagcgcgcggtt

SEQ ID NO: 18200 - DNA, 979 bp, Artificial Sequence
  chemically treated genomic DNA (Homo sapiens) CpG-island No: 18200
aaccgcgcgctcgcgaacaacgataaccccaaacaacgaacgaccccaaacgaacgacaaaccgaatctactcactcaccgttcgctaccgcgaacgcctacgaaaacgtctacataccgaaccgaacccgcaaaccccgccgccgcgccgccgccaaccgtcgctacctaacccttaacgccctaaccgcctattaccccataaccgcccgaaccccgacgccgacgccgccgaacaacaatacgccgcgcccgcccactacgcaaacgcacccgccacgcatacgcgctaccgcgcacgtaaaacgtcccgcgcgtctaccgaatcccaccgacgccgaaacaccccgcgcgaacgaaaaacgacgaacgtaacgaaaaaaaaacgaacgataaaaaaaaaaaacgaatcgcgataaaaaacaataaccaaaaaataaaaacgaacaacgaaaacaaaaacgaacgtccgcgactcgaataaacgaaaatcgacgccccgaaaaaaacgacccccgactcccgtccccactcacctaccgcgtccgaaaaacgcccccgaatccgcccgccacgtctacgcctaaacgcccccgacattataatcccaacccgacgtcccgcccccaactcaccgccaccgcgaacgaaacctcccgaaccacgtaaaccgactcaaaaaaatacaaataccccgcgaaaactaaccccgcccgccgccgcttccctaattaccgaactataacacgatataaaccgaaccgaatttaaaaaccgaaacttaaaacaactacgacaacgctacgctccctcgaaactatccgtcgaaactaaaaaaacgaccctacgcctaaaaaaaccgcgatcgacctcacgcccacctctaacgaccaaatacgccttacacgcccacgaacgtcctcaaaaatctacgcttaaaatcccaaaactaacaataaaaaaaaaacccgataaccta

SEQ ID NO: 18201 - DNA, 828 bp, Artificial Sequence
  chemically treated genomic DNA (Homo sapiens) CpG-island No: 18201
ggttcgcgggcgcggttttatttttaggttttttcgtcgcggaggttttttagcgtcgttcgtattttcgtttttcgcgcgtttttgttttaatagttttggttttgttaggattttattttttcgttttcggcgtaatcgcggttacgtagcgacgtgtacgcgcgtgtgcgtcgtcgtcgttcggtagagtgggcgttttcgatattaggagcgcgtacgtcgcgtagaggggtttggacgagcgcgttttcgattcgtcgttatcgtttttttttttttttttcggttcgttttttttttcgtttttttttgttaggcggttttttttttttttttttttagtttttttcgtttttttcgggttttagcggtggcggagcgaacgggatcggttcggttttagagcgcgaggtggagggtggaacgcgggcgtttgaaggagttgttgtttcggtagcgttcgcggagacgtgaagaggtgaggcgaggacggttttttagggatacgagggcggttcggcggttcggattcgcgggtcgaggttgtttgggtgtgttggcgtcgggttgagtttggggagggtcgagatggggttttagtcgaggattgggatgcgggaggatcgcggtaaggagggtagggggcgggtttaggattgtcggtcgtttttcggatatcgtagtttttttaggtggtcgtttttcgcggatagggcgggcggggtcggcgtttttatttgggggtggggtagtggttttggcggtcgttttttttagttgtgtttttttgatattgttgtttcggcggttgtcgttcgttgttat

SEQ ID NO: 18202 - DNA, 828 bp, Artificial Sequence
  chemically treated genomic DNA (Homo sapiens) CpG-island No: 18202
ataacaacgaacgacaaccgccgaaacaacaatatcaaaaaaacacaactaaaaaaaacgaccgccaaaaccactaccccacccccaaataaaaacgccgaccccgcccgccctatccgcgaaaaacgaccacctaaaaaaactacgatatccgaaaaacgaccgacaatcctaaacccgccccctaccctccttaccgcgatcctcccgcatcccaatcctcgactaaaaccccatctcgaccctccccaaactcaacccgacgccaacacacccaaacaacctcgacccgcgaatccgaaccgccgaaccgccctcgtatccctaaaaaaccgtcctcgcctcacctcttcacgtctccgcgaacgctaccgaaacaacaactccttcaaacgcccgcgttccaccctccacctcgcgctctaaaaccgaaccgatcccgttcgctccgccaccgctaaaacccgaaaaaaacgaaaaaaactaaaaaaaaaaaaaaaaaaaaccgcctaacaaaaaaaaacgaaaaaaaaaacgaaccgaaaaaaaaaaaaaaaaacgataacgacgaatcgaaaacgcgctcgtccaaacccctctacgcgacgtacgcgctcctaatatcgaaaacgcccactctaccgaacgacgacgacgcacacgcgcgtacacgtcgctacgtaaccgcgattacgccgaaaacgaaaaaataaaatcctaacaaaaccaaaactattaaaacaaaaacgcgcgaaaaacgaaaatacgaacgacgctaaaaaacctccgcgacgaaaaaacctaaaaataaaaccgcgcccgcgaacc

SEQ ID NO: 18203 - DNA, 828 bp, Artificial Sequence
  chemically treated genomic DNA (Homo sapiens) CpG-island No: 18203
gtagtagcgggcggtagtcgtcgaggtagtaatgttaggagggtatagttggaggaggcggtcgttaaagttattattttatttttaggtaagggcgtcgatttcgttcgttttattcgcgaggagcggttatttgggagaattgcggtgttcgggaggcggtcgatagttttgaattcgttttttattttttttatcgcggttttttcgtattttagttttcggttggggttttatttcgattttttttaggtttagttcgacgttaatatatttaggtagtttcggttcgcggattcgggtcgtcgggtcgttttcgtgtttttaggaggtcgttttcgttttatttttttacgttttcgcgggcgttgtcgagataataatttttttaggcgttcgcgttttattttttatttcgcgttttgaagtcgggtcggtttcgttcgtttcgttatcgttggagttcgaggagggcggagggaattgagaggggaggggagaagggtcgtttggtaggaagaggcgagggagggggcgggtcgagaaggaggggaggaggcggtggcggcgggtcggaagcgcgttcgtttaggtttttttgcgcggcgtgcgcgtttttgatgtcggaggcgtttattttgtcgggcggcggcggcgtatacgcgcgtgtacgtcgttgcgtggtcgcggttgcgtcgggagcggaggagtgaggttttgatagaattagagttgttagagtagggacgcgcgaaaggcgggagtacgggcggcgttggagaattttcgcggcggaggggtttgggggtgggatcgcgttcgcgagtt

SEQ ID NO: 18204 - DNA, 828 bp, Artificial Sequence
  chemically treated genomic DNA (Homo sapiens) CpG-island No: 18204
aactcgcgaacgcgatcccacccccaaacccctccgccgcgaaaattctccaacgccgcccgtactcccgcctttcgcgcgtccctactctaacaactctaattctatcaaaacctcactcctccgctcccgacgcaaccgcgaccacgcaacgacgtacacgcgcgtatacgccgccgccgcccgacaaaataaacgcctccgacatcaaaaacgcgcacgccgcgcaaaaaaacctaaacgaacgcgcttccgacccgccgccaccgcctcctcccctccttctcgacccgccccctccctcgcctcttcctaccaaacgacccttctcccctcccctctcaattccctccgccctcctcgaactccaacgataacgaaacgaacgaaaccgacccgacttcaaaacgcgaaataaaaaataaaacgcgaacgcctaaaaaaattattatctcgacaacgcccgcgaaaacgtaaaaaaataaaacgaaaacgacctcctaaaaacacgaaaacgacccgacgacccgaatccgcgaaccgaaactacctaaatatattaacgtcgaactaaacctaaaaaaaatcgaaataaaaccccaaccgaaaactaaaatacgaaaaaaccgcgataaaaaaaataaaaaacgaattcaaaactatcgaccgcctcccgaacaccgcaattctcccaaataaccgctcctcgcgaataaaacgaacgaaatcgacgcccttacctaaaaataaaataataactttaacgaccgcctcctccaactataccctcctaacattactacctcgacgactaccgcccgctactac

SEQ ID NO: 18205 - DNA, 528 bp, Artificial Sequence
  chemically treated genomic DNA (Homo sapiens) CpG-island No: 18205
tttcgtcgcggtttcgtcggttttttagggtcgttagagggattgcgtttcggttagtgggcgggcggtcggggttacggcggggacggcggtagtcggttaatgaggagcgcggttgtggtcgggggcgggcgtattcggtttttcgcgtcgttttcggatcgttatttttttcgtttcgagttttattaggtcgaggattttaaatttcgaagaaaggaaaggttttttatcgttttttcgtcgtcgtttcgcgttttttgatgagttcgtttagggagatgttcgttattttgattcgtcgagtaagtcgaaagtagtcgagatttcgcgagttcgttttttcggtcgttagggagcgacgaattattttcggcgttcgcggattaattttcgcgatagttagtttaaagtaggtaagaatcggaaggggcggggacgtttttcgtgagttttcgcggtgttggttgtttatttgtatacggaagttcggtatattatgaattatttatttttttcgagggaaaa

SEQ ID NO: 18206 - DNA, 528 bp, Artificial Sequence
  chemically treated genomic DNA (Homo sapiens) CpG-island No: 18206
ttttccctcgaaaaaaataaataattcataatataccgaacttccgtatacaaataaacaaccaacaccgcgaaaactcacgaaaaacgtccccgccccttccgattcttacctactttaaactaactatcgcgaaaattaatccgcgaacgccgaaaataattcgtcgctccctaacgaccgaaaaaacgaactcgcgaaatctcgactactttcgacttactcgacgaatcaaaataacgaacatctccctaaacgaactcatcaaaaaacgcgaaacgacgacgaaaaaacgataaaaaacctttcctttcttcgaaatttaaaatcctcgacctaataaaactcgaaacgaaaaaaataacgatccgaaaacgacgcgaaaaaccgaatacgcccgcccccgaccacaaccgcgctcctcattaaccgactaccgccgtccccgccgtaaccccgaccgcccgcccactaaccgaaacgcaatccctctaacgaccctaaaaaaccgacgaaaccgcgacgaaa

SEQ ID NO: 18207 - DNA, 528 bp, Artificial Sequence
  chemically treated genomic DNA (Homo sapiens) CpG-island No: 18207
ttttttttcgaggaaaataaataatttataatgtgtcgaattttcgtatgtagatgagtagttagtatcgcgaaggtttacggggaacgttttcgtttttttcggtttttgtttgttttgagttggttgtcgcgagagttggttcgcggacgtcggaagtagttcgtcgttttttagcggtcgaaggggcgggttcgcggggtttcgattgttttcggtttgttcggcggattaagatggcggatatttttttggacgaatttattaggaagcgcggggcggcggcgaaaggacggtgagaggtttttttttttttcggggtttagggttttcggtttagtggagttcgaggcgggggaggtagcgattcgggagcgacgcggaggatcgggtgcgttcgttttcgattatagtcgcgttttttattggtcggttgtcgtcgttttcgtcgtggtttcgatcgttcgtttattggtcgaggcgtagtttttttggcggttttgggaggtcgacggggtcgcggcgggg

SEQ ID NO: 18208 - DNA, 528 bp, Artificial Sequence
  chemically treated genomic DNA (Homo sapiens) CpG-island No: 18208
ccccgccgcgaccccgtcgacctcccaaaaccgccaaaaaaactacgcctcgaccaataaacgaacgatcgaaaccacgacgaaaacgacgacaaccgaccaataaaaaacgcgactataatcgaaaacgaacgcacccgatcctccgcgtcgctcccgaatcgctacctcccccgcctcgaactccactaaaccgaaaaccctaaaccccgaaaaaaaaaaaaacctctcaccgtcctttcgccgccgccccgcgcttcctaataaattcgtccaaaaaaatatccgccatcttaatccgccgaacaaaccgaaaacaatcgaaaccccgcgaacccgccccttcgaccgctaaaaaacgacgaactacttccgacgtccgcgaaccaactctcgcgacaaccaactcaaaacaaacaaaaaccgaaaaaaacgaaaacgttccccgtaaaccttcgcgatactaactactcatctacatacgaaaattcgacacattataaattatttattttcctcgaaaaaaaa

SEQ ID NO: 18209 - DNA, 578 bp, Artificial Sequence
  chemically treated genomic DNA (Homo sapiens) CpG-island No: 18209
acgtagttcgtttaggttattgtggggtggggtggggcgcggcgggttgggcgggagaagtgggtgcggtcgggtgcggttcgggtttcgcgttatttttcgtaggttagttcgttttttcgtcgtcgggttttagtttttcgagacgtttcgcggtttcggcgtttttttttcgtttatcgtgttgagttgggtttttatggtggtttcgcgtcgcgttcgttttgtcgtcgtcgtcgtcgtcgtcgagatcgtcgcgttcgggttcgcgttatttcggagtaggggcggggtcgaggggttaggcgggcgcgcggggcggggcgggcgcgggggcggggatcgggtcgtttcgtttgtttttgtcggggatggagattggaaattggggatgcggttttttgcgtttcgagttttttcgtcgttgtgttgtttcgcgcgggaaggtggtttatttgggtttcgttcgtcgttataaaggaagtaagatggcgtttttcggatgggagcgagaataagaggcggaattttttttcggttttcgagattgtaggggtcggttttgtttggtttggtat

SEQ ID NO: 18210 - DNA, 578 bp, Artificial Sequence
  chemically treated genomic DNA (Homo sapiens) CpG-island No: 18210
ataccaaaccaaacaaaaccgacccctacaatctcgaaaaccgaaaaaaaattccgcctcttattctcgctcccatccgaaaaacgccatcttacttcctttataacgacgaacgaaacccaaataaaccaccttcccgcgcgaaacaacacaacgacgaaaaaactcgaaacgcaaaaaaccgcatccccaatttccaatctccatccccgacaaaaacaaacgaaacgacccgatccccgcccccgcgcccgccccgccccgcgcgcccgcctaacccctcgaccccgcccctactccgaaataacgcgaacccgaacgcgacgatctcgacgacgacgacgacgacgacaaaacgaacgcgacgcgaaaccaccataaaaacccaactcaacacgataaacgaaaaaaaaacgccgaaaccgcgaaacgtctcgaaaaactaaaacccgacgacgaaaaaacgaactaacctacgaaaaataacgcgaaacccgaaccgcacccgaccgcacccacttctcccgcccaacccgccgcgccccaccccaccccacaataacctaaacgaactacgt

SEQ ID NO: 18211 - DNA, 578 bp, Artificial Sequence
  chemically treated genomic DNA (Homo sapiens) CpG-island No: 18211
atgttaggttaggtaggatcggtttttgtagtttcggaggtcgggggaagatttcgttttttattttcgtttttattcggggggcgttattttgttttttttatggcggcgaacgaggtttagataggttattttttcgcgcggggtagtatagcggcgggagagttcggagcgtagagggtcgtatttttagtttttagtttttattttcggtagaagtaggcggagcgattcggttttcgttttcgcgttcgtttcgtttcgcgcgttcgtttggtttttcggtttcgtttttgtttcggagtgacgcgggttcgggcgcgacggtttcggcggcggcggcggcggcgatagagcgagcgcggcgcggggttattatgggggtttagtttagtacggtaggcggggagggggcgtcggggtcgcggggcgtttcgagggattgggattcggcggcgagggggcgggttggtttgcgggaggtgacgcgggattcgggtcgtattcggtcgtatttatttttttcgtttagttcgtcgcgttttattttattttataatggtttgggcgagttacgt

SEQ ID NO: 18212 - DNA, 578 bp, Artificial Sequence
  chemically treated genomic DNA (Homo sapiens) CpG-island No: 18212
acgtaactcgcccaaaccattataaaataaaataaaacgcgacgaactaaacgaaaaaaataaatacgaccgaatacgacccgaatcccgcgtcacctcccgcaaaccaacccgccccctcgccgccgaatcccaatccctcgaaacgccccgcgaccccgacgccccctccccgcctaccgtactaaactaaacccccataataaccccgcgccgcgctcgctctatcgccgccgccgccgccgccgaaaccgtcgcgcccgaacccgcgtcactccgaaacaaaaacgaaaccgaaaaaccaaacgaacgcgcgaaacgaaacgaacgcgaaaacgaaaaccgaatcgctccgcctacttctaccgaaaataaaaactaaaaactaaaaatacgaccctctacgctccgaactctcccgccgctatactaccccgcgcgaaaaaataacctatctaaacctcgttcgccgccataaaaaaaacaaaataacgccccccgaataaaaacgaaaataaaaaacgaaatcttcccccgacctccgaaactacaaaaaccgatcctacctaacctaacat

SEQ ID NO: 18213 - DNA, 511 bp, Artificial Sequence
  chemically treated genomic DNA (Homo sapiens) CpG-island No: 18213
gggtcgcggaggaaaaggtcggtttttcgattgtagtttcgtggtggggaggttgcggggtttacgggttaagttttttacgtagggtcggtttttggttttttttggttttcggaggcgtcgtcgttttgtttcggggtcgagttcgtttttcgttgtttatttcgattattttttcgttcgttttttacgtgtggattttttgtttttattttgttcgttgtggttatatttgggatatttagaattattttttcgtttttaggttttcgacgtagttatattcgttaagttttttttttttgtgggcgaatttgtggtcgttcgttcgtagatgttcggatcgtggtgtggatatcggggggcgttatttttggttcggcgcggacgtttttttttcggcgcgggtttgttcggatttcgtttttagttattattttcgcgttttatttttatttttttaggttgtttttggtgttttcgtagtatttattcggtagaaaattatttg

SEQ ID NO: 18214 - DNA, 511 bp, Artificial Sequence
  chemically treated genomic DNA (Homo sapiens) CpG-island No: 18214
caaataattttctaccgaataaatactacgaaaacaccaaaaacaacctaaaaaaataaaaataaaacgcgaaaataataactaaaaacgaaatccgaacaaacccgcgccgaaaaaaaaacgtccgcgccgaaccaaaaataacgccccccgatatccacaccacgatccgaacatctacgaacgaacgaccacaaattcgcccacaaaaaaaaaaaacttaacgaatataactacgtcgaaaacctaaaaacgaaaaaataattctaaatatcccaaatataaccacaacgaacaaaataaaaacaaaaaatccacacgtaaaaaacgaacgaaaaaataatcgaaataaacaacgaaaaacgaactcgaccccgaaacaaaacgacgacgcctccgaaaaccaaaaaaaaccaaaaaccgaccctacgtaaaaaacttaacccgtaaaccccgcaacctccccaccacgaaactacaatcgaaaaaccgaccttttcctccgcgaccc

SEQ ID NO: 18215 - DNA, 511 bp, Artificial Sequence
  chemically treated genomic DNA (Homo sapiens) CpG-island No: 18215
taggtgattttttgtcgggtgggtgttgcgagggtattaggggtaatttgggaaagtgggaatgggacgcggaggtggtggttgagggcggggttcgggtaggttcgcgtcgaggagggggcgttcgcgtcgagttaggaatggcgtttttcgatgtttatattacggttcgggtatttgcgaacgggcggttatagattcgtttatagggaaaggggatttggcgggtatggttgcgtcgggggtttggagacggggagatggttttggatgttttaggtgtaattatagcgggtaggataaggataaagggtttatacgtggaggacgggcggggagatggtcggagtgagtaacgggagacgaattcggtttcgaagtaggacgacggcgttttcggaagttagaaaaggttaagaatcggttttgcgtggggagtttagttcgtgagtttcgtagtttttttattacggaattgtagtcgggaaatcggttttttttttcgcggttt

SEQ ID NO: 18216 - DNA, 511 bp, Artificial Sequence
  chemically treated genomic DNA (Homo sapiens) CpG-island No: 18216
aaaccgcgaaaaaaaaaaccgatttcccgactacaattccgtaataaaaaaactacgaaactcacgaactaaactccccacgcaaaaccgattcttaaccttttctaacttccgaaaacgccgtcgtcctacttcgaaaccgaattcgtctcccgttactcactccgaccatctccccgcccgtcctccacgtataaaccctttatccttatcctacccgctataattacacctaaaacatccaaaaccatctccccgtctccaaacccccgacgcaaccatacccgccaaatcccctttccctataaacgaatctataaccgcccgttcgcaaatacccgaaccgtaatataaacatcgaaaaacgccattcctaactcgacgcgaacgccccctcctcgacgcgaacctacccgaaccccgccctcaaccaccacctccgcgtcccattcccactttcccaaattacccctaataccctcgcaacacccacccgacaaaaaatcaccta

SEQ ID NO: 18217 - DNA, 543 bp, Artificial Sequence
  chemically treated genomic DNA (Homo sapiens) CpG-island No: 18217
acgtagtgggaggtgaaatcgacgagggtgtaggtagtattaggcggcgaattaggttcgttgggtggtggttggaggttgcgggtggggataaaagcgcggtagacgagataaaagggagcgtatttattagaattattcgttatcgaagttgggtacggaaaatattttttagtggatgaagatgtcgaatttggtttggttaaattacgcgggtagttggcgggcgtttagggatttttaggtggggtcgaagcgcgtggcgttgtgggtagggtacggcggcggcggtagtagtagtaatagtaatagtagtaacgggaacgcgagtttggggagtttttggggtcgtatgtttcggcgtaggtcggttgttttttttgtaggttttcgcggtttcgggagcgttgttttttcgtttttgtcgttgagtatgtcgcgtcgcggttatttgattaagtcggatttggaaatcggttatttttttttttttggggcgggagtggttattttttcgggcgtttcgaatgattttaggagggt

SEQ ID NO: 18218 - DNA, 543 bp, Artificial Sequence
  chemically treated genomic DNA (Homo sapiens) CpG-island No: 18218
accctcctaaaatcattcgaaacgcccgaaaaaataaccactcccgccccaaaaaaaaaaaaataaccgatttccaaatccgacttaatcaaataaccgcgacgcgacatactcaacgacaaaaacgaaaaaacaacgctcccgaaaccgcgaaaacctacaaaaaaaacaaccgacctacgccgaaacatacgaccccaaaaactccccaaactcgcgttcccgttactactattactattactactactaccgccgccgccgtaccctacccacaacgccacgcgcttcgaccccacctaaaaatccctaaacgcccgccaactacccgcgtaatttaaccaaaccaaattcgacatcttcatccactaaaaaatattttccgtacccaacttcgataacgaataattctaataaatacgctcccttttatctcgtctaccgcgcttttatccccacccgcaacctccaaccaccacccaacgaacctaattcgccgcctaatactacctacaccctcgtcgatttcacctcccactacgt

SEQ ID NO: 18219 - DNA, 543 bp, Artificial Sequence
  chemically treated genomic DNA (Homo sapiens) CpG-island No: 18219
gtttttttgaggttattcggaacgttcgggagagtggttattttcgttttagagggggaagggtggtcggtttttaagttcgatttggttaggtgatcgcggcgcggtatatttagcggtagagacggaagaatagcgttttcgaggtcgcgggagtttgtagagaggatagtcggtttgcgtcgggatatgcggttttaggagttttttaggttcgcgttttcgttgttgttgttgttgttgttgttgttgtcgtcgtcgtcgtgttttgtttatagcgttacgcgtttcgattttatttgggagtttttggacgttcgttagttgttcgcgtggtttgattaggttaagttcggtatttttatttattggggagtgtttttcgtgtttagtttcggtagcgagtggttttggtgagtgcgtttttttttgtttcgtttgtcgcgtttttgtttttattcgtagtttttagttattatttagcgggtttggttcgtcgtttggtgttgtttgtattttcgtcggttttattttttattgcgt

SEQ ID NO: 18220 - DNA, 543 bp, Artificial Sequence
  chemically treated genomic DNA (Homo sapiens) CpG-island No: 18220
acgcaataaaaaataaaaccgacgaaaatacaaacaacaccaaacgacgaaccaaacccgctaaataataactaaaaactacgaataaaaacaaaaacgcgacaaacgaaacaaaaaaaaacgcactcaccaaaaccactcgctaccgaaactaaacacgaaaaacactccccaataaataaaaataccgaacttaacctaatcaaaccacgcgaacaactaacgaacgtccaaaaactcccaaataaaatcgaaacgcgtaacgctataaacaaaacacgacgacgacgacaacaacaacaacaacaacaacaacaacgaaaacgcgaacctaaaaaactcctaaaaccgcatatcccgacgcaaaccgactatcctctctacaaactcccgcgacctcgaaaacgctattcttccgtctctaccgctaaatataccgcgccgcgatcacctaaccaaatcgaacttaaaaaccgaccacccttccccctctaaaacgaaaataaccactctcccgaacgttccgaataacctcaaaaaaac

SEQ ID NO: 18221 - DNA, 718 bp, Artificial Sequence
  chemically treated genomic DNA (Homo sapiens) CpG-island No: 18221
ttaaggcggttatcgcgggtcggttggggtcggagggggatcgtttcgtcgaggttttcgttttttttttttttttttttttttcgcgtcgtcgagtcggagttgcgtcgtacgtttagcggtcgttcggattcgtcggtcggagttgatttagtgggttacgggtttcggattttagaattttttaagcgggggaaatttggcggcgggtaggtaggaaaggtaggtgaggtaggggcgagcgagagaattggttggtagcggggcggggagtcgggggcgcggcgttaaggtgggcgcgtggggcgggggttttaattcgtgtcgtaggtgtttacgtgtcgcgcggagttcgcgggttaggcgaggtagtttggtcgaggtttttgtttgcgttttgtcggggatggcggtcggtgtttgggatatcggcggttatttttgtgcggtttggggcgcgtttttttttttttcgtcgtttgtagtttttcgtttttgcgttgggcggagggcgggtcgggtgacgtgggagttgaatagtcgttatttagcgttcgtttcgtcggttattgttttcgcgcggaggtaggtcgtcgtttttcgggttttgtgtttttcgaggttgggggcggggttgtttgcgtagacggcggggtgattattgttgaattattttaacgggagaattttaagtgttagtttagttcgttttttagag

SEQ ID NO: 18222 - DNA, 718 bp, Artificial Sequence
  chemically treated genomic DNA (Homo sapiens) CpG-island No: 18222
ctctaaaaaacgaactaaactaacacttaaaattctcccgttaaaataattcaacaataatcaccccgccgtctacgcaaacaaccccgcccccaacctcgaaaaacacaaaacccgaaaaacgacgacctacctccgcgcgaaaacaataaccgacgaaacgaacgctaaataacgactattcaactcccacgtcacccgacccgccctccgcccaacgcaaaaacgaaaaactacaaacgacgaaaaaaaaaaaaacgcgccccaaaccgcacaaaaataaccgccgatatcccaaacaccgaccgccatccccgacaaaacgcaaacaaaaacctcgaccaaactacctcgcctaacccgcgaactccgcgcgacacgtaaacacctacgacacgaattaaaacccccgccccacgcgcccaccttaacgccgcgcccccgactccccgccccgctaccaaccaattctctcgctcgcccctacctcacctacctttcctacctacccgccgccaaatttcccccgcttaaaaaattctaaaatccgaaacccgtaacccactaaatcaactccgaccgacgaatccgaacgaccgctaaacgtacgacgcaactccgactcgacgacgcgaaaaaaaaaaaaaaaaaaaaaaaacgaaaacctcgacgaaacgatccccctccgaccccaaccgacccgcgataaccgccttaa

SEQ ID NO: 18223 - DNA, 718 bp, Artificial Sequence
  chemically treated genomic DNA (Homo sapiens) CpG-island No: 18223
ttttgggagacgggttaagttggtatttgagattttttcgttggggtggtttagtaatgattatttcgtcgtttgcgtagatagtttcgtttttagtttcggagagtataggattcgggaggcggcgatttgttttcgcgcggggatagtggtcggcggggcgggcgttaggtggcggttgtttagtttttacgttattcggttcgtttttcgtttagcgtagaagcgaagagttgtagacgacggagaaaagggaagcgcgttttaagtcgtataaaggtggtcgtcggtgttttaagtatcgatcgttattttcggtaggacgtaggtaggagtttcggttaggttatttcgtttggttcgcggatttcgcgcggtacgtgggtatttgcggtacgggttggagttttcgttttacgcgtttattttaacgtcgcgttttcggtttttcgtttcgttgttagttagttttttcgttcgtttttgttttatttgttttttttatttattcgtcgttaagtttttttcgtttggaaagttttggagttcggagttcgtggtttattgggttagtttcggtcggcgggttcgggcggtcgttgggcgtgcggcgtagtttcgattcggcggcgcggaaaaggggaaggggaggaaggggcgggagtttcggcggggcgattttttttcgattttagtcggttcgcggtagtcgttttgg

SEQ ID NO: 18224 - DNA, 718 bp, Artificial Sequence
  chemically treated genomic DNA (Homo sapiens) CpG-island No: 18224
ccaaaacgactaccgcgaaccgactaaaatcgaaaaaaaatcgccccgccgaaactcccgccccttcctccccttccccttttccgcgccgccgaatcgaaactacgccgcacgcccaacgaccgcccgaacccgccgaccgaaactaacccaataaaccacgaactccgaactccaaaactttccaaacgaaaaaaacttaacgacgaataaataaaaaaaacaaataaaacaaaaacgaacgaaaaaactaactaacaacgaaacgaaaaaccgaaaacgcgacgttaaaataaacgcgtaaaacgaaaactccaacccgtaccgcaaatacccacgtaccgcgcgaaatccgcgaaccaaacgaaataacctaaccgaaactcctacctacgtcctaccgaaaataacgatcgatacttaaaacaccgacgaccacctttatacgacttaaaacgcgcttcccttttctccgtcgtctacaactcttcgcttctacgctaaacgaaaaacgaaccgaataacgtaaaaactaaacaaccgccacctaacgcccgccccgccgaccactatccccgcgcgaaaacaaatcgccgcctcccgaatcctatactctccgaaactaaaaacgaaactatctacgcaaacgacgaaataatcattactaaaccaccccaacgaaaaaatctcaaataccaacttaacccgtctcccaaaa

SEQ ID NO: 18225 - DNA, 632 bp, Artificial Sequence
  chemically treated genomic DNA (Homo sapiens) CpG-island No: 18225
ttacgtttcgggttattggacggtgtattggtttacgtttagtatcggtagtagggcgaaggcgagtacggttagttatacgtcgagtagtatagcgcgggtggtacgcgtttttatgtggttcgtatattagtgcggcgttttgatggttagcgttcgttcgacggttatggcgttggcgatgaataacgaggagagttcgaaaatagttatggttagttcgaaaaaggtgtagagtcgtttcgacgggtcgatgtgtttttaacgttgtttggataggtatacgacgatgacgatcggggtggtgagaagttgttcgattaggtcggtgagcgttagttagtcgatgtatagtaggaaggattttttgcgtttgttttttcggcgtcggtagttgcgcgatacgagtagtatggttagtgcgttgtttacgaaattagtgagtagtatggtgatcgggaaggttacggatatcgattcgtaattttcgttagattttggagggcgcgtgaggttgtttcgcgtttcggcggaacgttcgggcgtttatatgtttgtgtaggagtggttgaggcgggtgtagaagggggtatttttttcgtagtttcgggttttttttatgttggtttcga

SEQ ID NO: 18226 - DNA, 632 bp, Artificial Sequence
  chemically treated genomic DNA (Homo sapiens) CpG-island No: 18226
tcgaaaccaacataaaaaaaacccgaaactacgaaaaaaatacccccttctacacccgcctcaaccactcctacacaaacatataaacgcccgaacgttccgccgaaacgcgaaacaacctcacgcgccctccaaaatctaacgaaaattacgaatcgatatccgtaaccttcccgatcaccatactactcactaatttcgtaaacaacgcactaaccatactactcgtatcgcgcaactaccgacgccgaaaaaacaaacgcaaaaaatccttcctactatacatcgactaactaacgctcaccgacctaatcgaacaacttctcaccaccccgatcgtcatcgtcgtatacctatccaaacaacgttaaaaacacatcgacccgtcgaaacgactctacacctttttcgaactaaccataactattttcgaactctcctcgttattcatcgccaacgccataaccgtcgaacgaacgctaaccatcaaaacgccgcactaatatacgaaccacataaaaacgcgtaccacccgcgctatactactcgacgtataactaaccgtactcgccttcgccctactaccgatactaaacgtaaaccaatacaccgtccaataacccgaaacgtaa

SEQ ID NO: 18227 - DNA, 632 bp, Artificial Sequence
  chemically treated genomic DNA (Homo sapiens) CpG-island No: 18227
tcgaagttaatatgaaggagattcggggttacggaggggatgtttttttttgtattcgttttaattatttttatataggtatgtgggcgttcgagcgtttcgtcgaggcgcggggtaattttacgcgttttttagggtttggcgaggattgcggatcggtgttcgtggttttttcgattattatgttgtttattggtttcgtgggtaacgtattggttatgttgttcgtgtcgcgtagttatcggcgtcgggagagtaagcgtaagaagttttttttgttgtgtatcggttggttggcgtttatcgatttggtcgggtagttttttattatttcggtcgttatcgtcgtgtatttgtttaagtagcgttgggagtatatcgattcgtcggggcggttttgtatttttttcgggttgattatgattgttttcgggtttttttcgttgtttatcgttagcgttatggtcgtcgagcgggcgttggttattagggcgtcgtattggtatgcgagttatatgaagacgcgtgttattcgcgttgtgttgttcggcgtgtggttggtcgtgttcgttttcgttttgttgtcggtgttgggcgtgggttagtatatcgtttagtggttcgggacgtgg

SEQ ID NO: 18228 - DNA, 632 bp, Artificial Sequence
  chemically treated genomic DNA (Homo sapiens) CpG-island No: 18228
ccacgtcccgaaccactaaacgatatactaacccacgcccaacaccgacaacaaaacgaaaacgaacacgaccaaccacacgccgaacaacacaacgcgaataacacgcgtcttcatataactcgcataccaatacgacgccctaataaccaacgcccgctcgacgaccataacgctaacgataaacaacgaaaaaaacccgaaaacaatcataatcaacccgaaaaaaatacaaaaccgccccgacgaatcgatatactcccaacgctacttaaacaaatacacgacgataacgaccgaaataataaaaaactacccgaccaaatcgataaacgccaaccaaccgatacacaacaaaaaaaacttcttacgcttactctcccgacgccgataactacgcgacacgaacaacataaccaatacgttacccacgaaaccaataaacaacataataatcgaaaaaaccacgaacaccgatccgcaatcctcgccaaaccctaaaaaacgcgtaaaattaccccgcgcctcgacgaaacgctcgaacgcccacatacctatataaaaataattaaaacgaatacaaaaaaaaacatcccctccgtaaccccgaatctccttcatattaacttcga

SEQ ID NO: 18229 - DNA, 532 bp, Artificial Sequence
  chemically treated genomic DNA (Homo sapiens) CpG-island No: 18229
ttttttcgggtatattgtgcgattaaagtcgtagtagcgttgttttcgcgcgatcgcgtacgttttttcgtagtacgatttttttcgagagcgcgatttgttacgggatcgggatcggtatcgcgaaggagatcggtagtattttttggtgaattcgtagcgtttttttcggtaacggcggttgcgggatcgcgatcggtttcgcgagtatgatcgcgagtagcgtttgtattttcgttggtggcgttttcgggaacgggatttggatttgttttttcgatttttggacgaaaatcggttcgagacgcgggaatgggatcgagagtttttggaaaaagagcggtttttagatcgcgacgatagtcggttggattcgttcgatcgcgaggtcgagggcgaattttttttttgcggcgagttcggttatatgtcgtttacgtagttggatatttttatttgcggttttagtttgcgtttttttcggaaaggatttcgtaagttttaatttaggattttttaaaaaattaagaga

SEQ ID NO: 18230 - DNA, 532 bp, Artificial Sequence
  chemically treated genomic DNA (Homo sapiens) CpG-island No: 18230
tctcttaattttttaaaaaatcctaaattaaaacttacgaaatcctttccgaaaaaaacgcaaactaaaaccgcaaataaaaatatccaactacgtaaacgacatataaccgaactcgccgcaaaaaaaaaattcgccctcgacctcgcgatcgaacgaatccaaccgactatcgtcgcgatctaaaaaccgctctttttccaaaaactctcgatcccattcccgcgtctcgaaccgattttcgtccaaaaatcgaaaaaacaaatccaaatcccgttcccgaaaacgccaccaacgaaaatacaaacgctactcgcgatcatactcgcgaaaccgatcgcgatcccgcaaccgccgttaccgaaaaaaacgctacgaattcaccaaaaaatactaccgatctccttcgcgataccgatcccgatcccgtaacaaatcgcgctctcgaaaaaaatcgtactacgaaaaaacgtacgcgatcgcgcgaaaacaacgctactacgactttaatcgcacaatatacccgaaaaaa

SEQ ID NO: 18231 - DNA, 532 bp, Artificial Sequence
  chemically treated genomic DNA (Homo sapiens) CpG-island No: 18231
ttttttggttttttaggaagttttgagttgaggtttgcgggatttttttcggagaaagcgtaggttaaagtcgtaggtgaagatgtttaattacgtgaacgatatgtggtcgggttcgtcgtaggagaaggattcgttttcgatttcgcggtcgggcgggtttagtcggttgtcgtcgcggtttaggagtcgttttttttttagaagttttcggttttattttcgcgtttcgagtcggttttcgtttaggagtcggaggagtaagtttaggtttcgttttcgaaggcgttattagcggaagtataggcgttattcgcggttatattcgcggagtcggtcgcgatttcgtagtcgtcgttatcgagagaggcgttacgggtttattaggagatattatcggtttttttcgcggtatcggtttcggtttcgtagtaggtcgcgttttcggggaaggtcgtattgcggaagggcgtacgcgatcgcgcggggatagcgttattacggttttggtcgtatagtgtattcggaggag

SEQ ID NO: 18232 - DNA, 532 bp, Artificial Sequence
  chemically treated genomic DNA (Homo sapiens) CpG-island No: 18232
ctcctccgaatacactatacgaccaaaaccgtaataacgctatccccgcgcgatcgcgtacgcccttccgcaatacgaccttccccgaaaacgcgacctactacgaaaccgaaaccgataccgcgaaaaaaaccgataatatctcctaataaacccgtaacgcctctctcgataacgacgactacgaaatcgcgaccgactccgcgaatataaccgcgaataacgcctatacttccgctaataacgccttcgaaaacgaaacctaaacttactcctccgactcctaaacgaaaaccgactcgaaacgcgaaaataaaaccgaaaacttctaaaaaaaaaacgactcctaaaccgcgacgacaaccgactaaacccgcccgaccgcgaaatcgaaaacgaatccttctcctacgacgaacccgaccacatatcgttcacgtaattaaacatcttcacctacgactttaacctacgctttctccgaaaaaaatcccgcaaacctcaactcaaaacttcctaaaaaaccaaaaaa

SEQ ID NO: 18233 - DNA, 623 bp, Artificial Sequence
  chemically treated genomic DNA (Homo sapiens) CpG-island No: 18233
agtcgcggaagtcggcgtttggttattcggaagttatagtcggggaattttcgggaggcggagttacggcgcgggcggcgatcgtcgcgataggaatcgagttttagaaatttcgttcggcgttttgaggtcgcggttttgaagcgaaacgttgcgttttttaaacgcggggttcggtacgtttttcgttttttatttttgagagattattgcggtggttttgagagatttcgttagtagaaaatttatcgtacgtcgtcgacgttttttttacgattgagagaaaggtttaatagacgtttttttttcggaacgtaagacgaagtggggtttttagtttttgttttcgaacggcgaattttataatttttattttttacgttcggatgcgtattgagggattacgttagtagacgcgttaaaagtattagaagttggttttcggcgtatgcgtagagatgtttcgtggtgggcgcggttttttttttgtttaattatcgttttgttttttttttttttaagtcgcgttttgtgtttcgagcgtttgtttttagggtgcgtatgcgcgatggggttttagggggaggtgtttgatatattagggtgtttcgttgtttttggtt

SEQ ID NO: 18234 - DNA, 623 bp, Artificial Sequence
  chemically treated genomic DNA (Homo sapiens) CpG-island No: 18234
aaccaaaaacaacgaaacaccctaatatatcaaacacctccccctaaaaccccatcgcgcatacgcaccctaaaaacaaacgctcgaaacacaaaacgcgacttaaaaaaaaaaaaaacaaaacgataattaaacaaaaaaaaaaccgcgcccaccacgaaacatctctacgcatacgccgaaaaccaacttctaatacttttaacgcgtctactaacgtaatccctcaatacgcatccgaacgtaaaaaataaaaattataaaattcgccgttcgaaaacaaaaactaaaaaccccacttcgtcttacgttccgaaaaaaaaacgtctattaaacctttctctcaatcgtaaaaaaaacgtcgacgacgtacgataaattttctactaacgaaatctctcaaaaccaccgcaataatctctcaaaaataaaaaacgaaaaacgtaccgaaccccgcgtttaaaaaacgcaacgtttcgcttcaaaaccgcgacctcaaaacgccgaacgaaatttctaaaactcgattcctatcgcgacgatcgccgcccgcgccgtaactccgcctcccgaaaattccccgactataacttccgaataaccaaacgccgacttccgcgact

SEQ ID NO: 18235 - DNA, 623 bp, Artificial Sequence
  chemically treated genomic DNA (Homo sapiens) CpG-island No: 18235
agttaagggtaacgggatattttgatgtattaaatatttttttttggagttttatcgcgtatgcgtattttggaggtaagcgttcgaggtatagggcgcggtttggggagggaggaggtagggcggtggttgggtaagagaagagtcgcgtttattacggaatatttttgcgtatgcgtcgggggttagtttttggtatttttgacgcgtttgttaacgtagttttttagtgcgtattcggacgtaggaggtggaggttgtggaattcgtcgttcgaaagtagggattaaaagttttatttcgttttacgtttcgaaaggaaggcgtttgttgagttttttttttagtcgtgagggaggcgtcgacggcgtgcggtaagttttttgttgacggggttttttaggattatcgtagtggttttttaggagtgagggacgggaaacgtgtcgggtttcgcgtttggggaacgtagcgtttcgttttaaggtcgcggttttagggcgtcgagcggggtttttagggttcggtttttgtcgcggcggtcgtcgttcgcgtcgtggtttcgtttttcggaggtttttcgattgtggttttcgggtggttaggcgtcggttttcgcgatt

SEQ ID NO: 18236 - DNA, 623 bp, Artificial Sequence
  chemically treated genomic DNA (Homo sapiens) CpG-island No: 18236
aatcgcgaaaaccgacgcctaaccacccgaaaaccacaatcgaaaaacctccgaaaaacgaaaccacgacgcgaacgacgaccgccgcgacaaaaaccgaaccctaaaaaccccgctcgacgccctaaaaccgcgaccttaaaacgaaacgctacgttccccaaacgcgaaacccgacacgtttcccgtccctcactcctaaaaaaccactacgataatcctaaaaaaccccgtcaacaaaaaacttaccgcacgccgtcgacgcctccctcacgactaaaaaaaaaactcaacaaacgccttcctttcgaaacgtaaaacgaaataaaacttttaatccctactttcgaacgacgaattccacaacctccacctcctacgtccgaatacgcactaaaaaactacgttaacaaacgcgtcaaaaataccaaaaactaacccccgacgcatacgcaaaaatattccgtaataaacgcgactcttctcttacccaaccaccgccctacctcctccctccccaaaccgcgccctatacctcgaacgcttacctccaaaatacgcatacgcgataaaactccaaaaaaaaatatttaatacatcaaaatatcccgttacccttaact

SEQ ID NO: 18237 - DNA, 616 bp, Artificial Sequence
  chemically treated genomic DNA (Homo sapiens) CpG-island No: 18237
gtcgtcgtttatagggagagaagcgcgggcgagtcgggtcggggaagtcgtcgttgtttggttttgggcgtttaggcggtcgtcgcgcgcgtttttatgtcgtttcggcgcggatgttgatgaattacgttcgttttatgtcgcgggttacgttagtttcgcgtttcgttcgtcgtttcgtttcgttcgtttgggttaggtgcgtttcgttcggcggcggttgcgggttggggtcggagagtgaggttggaggtcgttgatttgatcgtcgaggtaggtttcgcgggcgtcgcgtttagcggaaaggtggggacggatgttcggagttggttcgttagtcgtcgggagggagcgtttggttcgcggcgggcggcgggaggtaggcggggaggggtttcgtcgcggttttcgtattttttgagtcgacggtggtcgcgggcggagtcggagcggtttagttcggatatcgggatttttagcgtggtgtaggcgtcgcgttcgttgtatttcgtcgtttgttaatcggaaaatttttgcgtttagttattaatagtttttttgggttattttttgtgttaggttcgggcgatgtagcgttgtatatattgtgtttttg

SEQ ID NO: 18238 - DNA, 616 bp, Artificial Sequence
  chemically treated genomic DNA (Homo sapiens) CpG-island No: 18238
caaaaacacaatatatacaacgctacatcgcccgaacctaacacaaaaaataacccaaaaaaactattaataactaaacgcaaaaattttccgattaacaaacgacgaaatacaacgaacgcgacgcctacaccacgctaaaaatcccgatatccgaactaaaccgctccgactccgcccgcgaccaccgtcgactcaaaaaatacgaaaaccgcgacgaaacccctccccgcctacctcccgccgcccgccgcgaaccaaacgctccctcccgacgactaacgaaccaactccgaacatccgtccccacctttccgctaaacgcgacgcccgcgaaacctacctcgacgatcaaatcaacgacctccaacctcactctccgaccccaacccgcaaccgccgccgaacgaaacgcacctaacccaaacgaacgaaacgaaacgacgaacgaaacgcgaaactaacgtaacccgcgacataaaacgaacgtaattcatcaacatccgcgccgaaacgacataaaaacgcgcgcgacgaccgcctaaacgcccaaaaccaaacaacgacgacttccccgacccgactcgcccgcgcttctctccctataaacgacgac

SEQ ID NO: 18239 - DNA, 616 bp, Artificial Sequence
  chemically treated genomic DNA (Homo sapiens) CpG-island No: 18239
taggggtatagtgtgtgtaacgttgtatcgttcgagtttggtatagggagtggtttaaaaaagttgttagtgattgaacgtaagaatttttcggttagtagacgacgggatgtagcgggcgcggcgtttgtattacgttgggggtttcggtgttcgggttgggtcgtttcgatttcgttcgcggttatcgtcggtttagggggtgcgaagatcgcggcgaggttttttttcgtttgtttttcgtcgttcgtcgcggattaggcgttttttttcggcggttggcgagttagtttcggatattcgtttttattttttcgttaagcgcggcgttcgcggggtttgtttcggcggttaggttagcggtttttagttttatttttcggttttagttcgtagtcgtcgtcgagcggagcgtatttgatttaggcgggcggggcggggcggcgggcggggcgcggggttgacgtggttcgcggtatggagcgggcgtgatttattagtattcgcgtcggggcggtatgggggcgcgcgcggcggtcgtttaggcgtttagggttaggtagcggcggttttttcggttcggttcgttcgcgtttttttttttgtgggcggcggt

SEQ ID NO: 18240 - DNA, 616 bp, Artificial Sequence
  chemically treated genomic DNA (Homo sapiens) CpG-island No: 18240
accgccgcccacaaaaaaaaaaacgcgaacgaaccgaaccgaaaaaaccgccgctacctaaccctaaacgcctaaacgaccgccgcgcgcgcccccataccgccccgacgcgaatactaataaatcacgcccgctccataccgcgaaccacgtcaaccccgcgccccgcccgccgccccgccccgcccgcctaaatcaaatacgctccgctcgacgacgactacgaactaaaaccgaaaaataaaactaaaaaccgctaacctaaccgccgaaacaaaccccgcgaacgccgcgcttaacgaaaaaataaaaacgaatatccgaaactaactcgccaaccgccgaaaaaaaacgcctaatccgcgacgaacgacgaaaaacaaacgaaaaaaaacctcgccgcgatcttcgcaccccctaaaccgacgataaccgcgaacgaaatcgaaacgacccaacccgaacaccgaaacccccaacgtaatacaaacgccgcgcccgctacatcccgtcgtctactaaccgaaaaattcttacgttcaatcactaacaacttttttaaaccactccctataccaaactcgaacgatacaacgttacacacactataccccta

SEQ ID NO: 18241 - DNA, 2273 bp, Artificial Sequence
  chemically treated genomic DNA (Homo sapiens) CpG-island No: 18241
ggcggtagcgagatcggcgggtttcggcgtcgtttttttttttttattcgttcgcggtcgtcggattcgtattttcgattttaacgagtttcggttggggggaggggatcgcgcgggggggaggtcgggagtttcgagggtcgattttcggaaggagggggagtgagtcggggcggagttagtaaagttcgcgggcggggggcgggggttcgaagagagaggttagcgcgtcggggggcggtgggtgggggtaggattcgggtttttagagcgggtggggttttcggaggacgcggttttcgagagtcgtagggggcgggggtcgattgggtttcgcgcggagttagggggcggggcgcgggttatcgggttcgggggatcgggggagtagtcgggggtttcgggagtcgatttcggttcgaggggggtttaaaatttttcgagagtaatcggagttaggggcgggcggcggttcggatcgcgttttcgggggcggggaaagagtaagtaggtcggcggggaggggttgggggcgtcgataggttttaggtcgacgcgaggtcggagaggggcggttcgggggagagaaataggcgtaacggttttggggaaagggcgcggggaggacgcggaggttcgcggaggggacgcggaggcgaggttcggcggagaggatcgagcgcgggttcgagtagggggcgggggttgggttttcgggggggtcgacgaggggaaagcgggggaaggggagggcggcgtttcgggcgatcgggggtttggttgtttgaggacggtaggatcgcggagggggtggtcgggggcgattcggacgtatagttttatttattttcgggtggaaggcggcggcgtaagagttagagtttatgtttcgggcggggggcggcggcggttgcgagagtgtaggagttgggatgttggagcggggtcgttcggggttgggggttcgggcggttgcgtagggcgagggcggattcgggaggggtcgttcgggttggaggtgatggggggtttagcgcgtcgttttttaagttttgtgatttcggattggcggttttatcgtcgatcggagtggacgatgtagttttcgcggcggtagaggcgggagagtggttgtagggggcggcggcggcggcggtgagcgggaattcgatcggtttttcgatttgacgtttagttcggttcgtgtttcgggagggagggcgggagagtcgggaggtttgtcgggaaatgtagtttgggtggcgattggaagttagcggcgagggggcgtggcgcgggaggcgggcgcggtgttttgtgggagtggtagtttaaggtttcgttaatattgcgtataaaggaaattttggggattttaatttttatgaggtttcgcggcggcggtttcggtgtgtggaggcgggttttttggattcgaggtcgcgcgagcgggggaggtgcgggggttcgcgtcggttcggtcgcggggggaggggtagtgtgagcggtagcgttttggtttcggcgggcgcgggggcgggagtcgttgcggcggtgggggcggggttgacggttcgggttgcgaagggcggcggcggttggtatttattttttttcgttttttatttggggttcgcgtttttttgtggggcgggggttttcgaggtttggtcgggagtaggggcggtaggggcggggacgttgacgtcgcggtcgtttcgggtatcgtttttcgtttttcgtttttcgttgagggcggagtcgtcgttcggttttcgttttaggtcgggtttagcgaagttgttttcgcggttgcgggtttcgtgcggttttttgtttcgggttcgcggggtcgggattggatcgggtttttttttaggtatttgcgggatttattcgaggtggtcgggttcgtgtattaaaaatatcgggttagcgttgttagtgttttaaagaggtgtgcgtttagtttgttttttgttgtcgtttaagtttaattttgggatcggtcgtttttttatttttttgaatatttttcggttcgtagggcgaggcggagacgcggtgtttggcgttggtatcgattggtatttgtttagtggtgtttaattgggatgggtagtgtgtaaacgttggatcgtagagtattcgatagttgtacgtgtggaaggttggtcggatacggtggggattgtttttatgcggtgattaaaaggcggtttgacgggaatatttttaatattcgaaagtgggggaaaaaggtaagtataaaa

SEQ ID NO: 18242 - DNA, 2273 bp, Artificial Sequence
  chemically treated genomic DNA (Homo sapiens) CpG-island No: 18242
ttttatacttacctttttcccccactttcgaatattaaaaatattcccgtcaaaccgccttttaatcaccgcataaaaacaatccccaccgtatccgaccaaccttccacacgtacaactatcgaatactctacgatccaacgtttacacactacccatcccaattaaacaccactaaacaaataccaatcgataccaacgccaaacaccgcgtctccgcctcgccctacgaaccgaaaaatattcaaaaaaataaaaaaacgaccgatcccaaaattaaacttaaacgacaacaaaaaacaaactaaacgcacacctctttaaaacactaacaacgctaacccgatatttttaatacacgaacccgaccacctcgaataaatcccgcaaatacctaaaaaaaaacccgatccaatcccgaccccgcgaacccgaaacaaaaaaccgcacgaaacccgcaaccgcgaaaacaacttcgctaaacccgacctaaaacgaaaaccgaacgacgactccgccctcaacgaaaaacgaaaaacgaaaaacgatacccgaaacgaccgcgacgtcaacgtccccgcccctaccgcccctactcccgaccaaacctcgaaaacccccgccccacaaaaaaacgcgaaccccaaataaaaaacgaaaaaaaataaataccaaccgccgccgcccttcgcaacccgaaccgtcaaccccgcccccaccgccgcaacgactcccgcccccgcgcccgccgaaaccaaaacgctaccgctcacactacccctccccccgcgaccgaaccgacgcgaacccccgcacctcccccgctcgcgcgacctcgaatccaaaaaacccgcctccacacaccgaaaccgccgccgcgaaacctcataaaaattaaaatccccaaaatttcctttatacgcaatattaacgaaaccttaaactaccactcccacaaaacaccgcgcccgcctcccgcgccacgccccctcgccgctaacttccaatcgccacccaaactacatttcccgacaaacctcccgactctcccgccctccctcccgaaacacgaaccgaactaaacgtcaaatcgaaaaaccgatcgaattcccgctcaccgccgccgccgccgccccctacaaccactctcccgcctctaccgccgcgaaaactacatcgtccactccgatcgacgataaaaccgccaatccgaaatcacaaaacttaaaaaacgacgcgctaaaccccccatcacctccaacccgaacgacccctcccgaatccgccctcgccctacgcaaccgcccgaacccccaaccccgaacgaccccgctccaacatcccaactcctacactctcgcaaccgccgccgccccccgcccgaaacataaactctaactcttacgccgccgccttccacccgaaaataaataaaactatacgtccgaatcgcccccgaccaccccctccgcgatcctaccgtcctcaaacaaccaaacccccgatcgcccgaaacgccgccctccccttcccccgctttcccctcgtcgacccccccgaaaacccaacccccgccccctactcgaacccgcgctcgatcctctccgccgaacctcgcctccgcgtcccctccgcgaacctccgcgtcctccccgcgccctttccccaaaaccgttacgcctatttctctcccccgaaccgcccctctccgacctcgcgtcgacctaaaacctatcgacgcccccaacccctccccgccgacctacttactctttccccgcccccgaaaacgcgatccgaaccgccgcccgcccctaactccgattactctcgaaaaattttaaacccccctcgaaccgaaatcgactcccgaaacccccgactactcccccgatcccccgaacccgataacccgcgccccgccccctaactccgcgcgaaacccaatcgacccccgccccctacgactctcgaaaaccgcgtcctccgaaaaccccacccgctctaaaaacccgaatcctacccccacccaccgccccccgacgcgctaacctctctcttcgaacccccgccccccgcccgcgaactttactaactccgccccgactcactccccctccttccgaaaatcgaccctcgaaactcccgacctcccccccgcgcgatcccctccccccaaccgaaactcgttaaaatcgaaaatacgaatccgacgaccgcgaacgaataaaaaaaaaaaaacgacgccgaaacccgccgatctcgctaccgcc

SEQ ID NO: 18243 - DNA, 2273 bp, Artificial Sequence
  chemically treated genomic DNA (Homo sapiens) CpG-island No: 18243
ttttgtatttattttttttttttattttcgaatattaaaaatgttttcgttagatcgttttttggttatcgtataggggtagtttttatcgtgttcggttagttttttatacgtatagttgtcggatattttgcggtttagcgtttatatattgtttattttagttaaatattattaaataagtattagtcgatgttagcgttaaatatcgcgttttcgtttcgttttgcgggtcggaggatatttaggagagtgggaaaacggtcggttttaaggttaggtttaggcggtaatagaaagtaaattgaacgtatatttttttagaatattgataacgttggttcggtgtttttaatgtacgaattcggttatttcgagtgaatttcgtagatgtttagagaagagttcggtttagtttcggtttcgcgggttcggagtagggagtcgtacgaagttcgtagtcgcgaaaataatttcgttgagttcggtttggagcgggggtcgggcggcgatttcgtttttagcggggagcggggagcggggagcgatgttcggggcggtcgcgacgttagcgttttcgtttttgtcgtttttattttcggttaggtttcggggattttcgttttataaaggggcgcgaattttaagtaggagacgaggaagggtaggtgttagtcgtcgtcgtttttcgtaattcgggtcgttagtttcgtttttatcgtcgtagcgattttcgttttcgcgttcgtcgagattaaggcgttatcgtttatattgttttttttttcgcggtcgagtcggcgcgggttttcgtatttttttcgttcgcgcggtttcgagtttagaagattcgtttttatatatcggggtcgtcgtcgcggagttttatgggggttggagtttttaaggttttttttgtgcgtagtattggcggggttttggattattatttttataaggtatcgcgttcgtttttcgcgttacgttttttcgtcgttggtttttagtcgttatttagattatatttttcgataggtttttcggttttttcgttttttttttcgagatacgagtcgaattgggcgttaggtcggggagtcggtcgggttttcgtttatcgtcgtcgtcgtcgttttttgtagttattttttcgtttttatcgtcgcgggagttgtatcgtttatttcggtcggcggtggaatcgttagttcggggttatagagtttgagaagcgacgcgttgagttttttattatttttagttcgggcgatttttttcgggttcgttttcgttttgcgtagtcgttcgagtttttagtttcgggcggtttcgttttagtattttagtttttgtattttcgtagtcgtcgtcgtttttcgttcggaatatggattttgatttttgcgtcgtcgttttttattcggaggtgagtgaagttgtgcgttcgaatcgttttcgattatttttttcgcgattttgtcgtttttaggtagttagattttcggtcgttcggagcgtcgttttttttttttttcgtttttttttcgtcggttttttcgggagtttaattttcgttttttgttcgggttcgcgttcggtttttttcgtcgggtttcgttttcgcgtttttttcgcggattttcgcgtttttttcgcgttttttttttagggtcgttgcgtttatttttttttttcgggtcgttttttttcggtttcgcgtcgatttgggatttgtcggcgtttttagttttttttcgtcggtttgtttatttttttttcgttttcggggacgcggttcgagtcgtcgttcgtttttggtttcggttgttttcgaggagttttaggtttttttcggatcggggtcggttttcgaggttttcggttgttttttcgatttttcgggttcggtggttcgcgtttcgttttttgatttcgcgcggggtttagtcggttttcgttttttacggttttcgggggtcgcgtttttcgggggttttattcgttttggggattcgagttttgtttttatttatcgtttttcggcgcgttggttttttttttcgggttttcgtttttcgttcgcgggttttgttggtttcgtttcggtttatttttttttttttcggggatcggttttcggggttttcggtttttttttcgcgcggttttttttttttagtcgaggttcgttggggtcgggggtgcgggttcggcgatcgcgggcgggtgggggaggggaggcggcgtcggagttcgtcggtttcgttgtcgtt

SEQ ID NO: 18244 - DNA, 2273 bp, Artificial Sequence
  chemically treated genomic DNA (Homo sapiens) CpG-island No: 18244
aacgacaacgaaaccgacgaactccgacgccgcctcccctcccccacccgcccgcgatcgccgaacccgcacccccgaccccaacgaacctcgactaaaaaaaaaaaaccgcgcgaaaaaaaaaccgaaaaccccgaaaaccgatccccgaaaaaaaaaaaaataaaccgaaacgaaaccaacaaaacccgcgaacgaaaaacgaaaacccgaaaaaaaaaaccaacgcgccgaaaaacgataaataaaaacaaaactcgaatccccaaaacgaataaaacccccgaaaaacgcgacccccgaaaaccgtaaaaaacgaaaaccgactaaaccccgcgcgaaatcaaaaaacgaaacgcgaaccaccgaacccgaaaaatcgaaaaaacaaccgaaaacctcgaaaaccgaccccgatccgaaaaaaacctaaaactcctcgaaaacaaccgaaaccaaaaacgaacgacgactcgaaccgcgtccccgaaaacgaaaaaaaaataaacaaaccgacgaaaaaaaactaaaaacgccgacaaatcccaaatcgacgcgaaaccgaaaaaaaacgacccgaaaaaaaaaaataaacgcaacgaccctaaaaaaaaaacgcgaaaaaaacgcgaaaatccgcgaaaaaaacgcgaaaacgaaacccgacgaaaaaaaccgaacgcgaacccgaacaaaaaacgaaaattaaactcccgaaaaaaccgacgaaaaaaaaacgaaaaaaaaaaaaaacgacgctccgaacgaccgaaaatctaactacctaaaaacgacaaaatcgcgaaaaaaataatcgaaaacgattcgaacgcacaacttcactcacctccgaataaaaaacgacgacgcaaaaatcaaaatccatattccgaacgaaaaacgacgacgactacgaaaatacaaaaactaaaatactaaaacgaaaccgcccgaaactaaaaactcgaacgactacgcaaaacgaaaacgaacccgaaaaaaatcgcccgaactaaaaataataaaaaactcaacgcgtcgcttctcaaactctataaccccgaactaacgattccaccgccgaccgaaataaacgatacaactcccgcgacgataaaaacgaaaaaataactacaaaaaacgacgacgacgacgataaacgaaaacccgaccgactccccgacctaacgcccaattcgactcgtatctcgaaaaaaaaaacgaaaaaaccgaaaaacctatcgaaaaatataatctaaataacgactaaaaaccaacgacgaaaaaacgtaacgcgaaaaacgaacgcgataccttataaaaataataatccaaaaccccgccaatactacgcacaaaaaaaaccttaaaaactccaacccccataaaactccgcgacgacgaccccgatatataaaaacgaatcttctaaactcgaaaccgcgcgaacgaaaaaaatacgaaaacccgcgccgactcgaccgcgaaaaaaaaaacaatataaacgataacgccttaatctcgacgaacgcgaaaacgaaaatcgctacgacgataaaaacgaaactaacgacccgaattacgaaaaacgacgacgactaacacctacccttcctcgtctcctacttaaaattcgcgcccctttataaaacgaaaatccccgaaacctaaccgaaaataaaaacgacaaaaacgaaaacgctaacgtcgcgaccgccccgaacatcgctccccgctccccgctccccgctaaaaacgaaatcgccgcccgacccccgctccaaaccgaactcaacgaaattattttcgcgactacgaacttcgtacgactccctactccgaacccgcgaaaccgaaactaaaccgaactcttctctaaacatctacgaaattcactcgaaataaccgaattcgtacattaaaaacaccgaaccaacgttatcaatattctaaaaaaatatacgttcaatttactttctattaccgcctaaacctaaccttaaaaccgaccgttttcccactctcctaaatatcctccgacccgcaaaacgaaacgaaaacgcgatatttaacgctaacatcgactaatacttatttaataatatttaactaaaataaacaatatataaacgctaaaccgcaaaatatccgacaactatacgtataaaaaactaaccgaacacgataaaaactacccctatacgataaccaaaaaacgatctaacgaaaacatttttaatattcgaaaataaaaaaaaaaaataaatacaaaa

SEQ ID NO: 18245 - DNA, 862 bp, Artificial Sequence
  chemically treated genomic DNA (Homo sapiens) CpG-island No: 18245
gtcgagttcgtttttttcgggttgggtttagtagtcgggtcgggtgggtcgtgggtaatttcgggaggttttcggtttcggcgcgcggcgaggtcgttttcggatttggtatttgttattcgttgttttcggttcgggcgttagcggggagacgtagaagggcggagggagggagtcggtcgcggatagcggtgatttagtttgcggagtcgggggcgggcgtcgcgcgggggataggcgagttcgcgttcgcggggggcggtggcgttcggtatagaggggttaagggggcggtgtagacgttttttcgtttatttcgtttttcgagagtcgcggcgtttcgttttatttatagtagcggtgtttagcgcgtcgcgttttttcgtaggtttcggtcgcggcgttttcgataatttatcgaaggcgttatggagcgatcggcgtttttggtcgtgttttttttttcggatttcgcgtacgttttgagtttgttgcgcggtttgagttagttgcgcgtcgagcgtaagtttttggacgtgattttggaggcggcgggcgggcgcgatttttcggcgtatcgtgcggtgttggtcgtcgttagtttttattttcgcgttatgttcgcggggtagttgcgcgagagtcgcgtcgagcgggtgcgtttgtacggagtgtttttcgatatgttgtagttgttgttggattttagttatacgggtcgcgtggcggtaagcggcgataacgttgagtcgttgttgcgcgtcgtcgatttgttgtagttttcggtcgtgaaggaggcgtgcggggtttttttgtagtagtagttcgatttggttaattgtttggatatgtaggatttcgt

SEQ ID NO: 18246 - DNA, 862 bp, Artificial Sequence
  chemically treated genomic DNA (Homo sapiens) CpG-island No: 18246
acgaaatcctacatatccaaacaattaaccaaatcgaactactactacaaaaaaaccccgcacgcctccttcacgaccgaaaactacaacaaatcgacgacgcgcaacaacgactcaacgttatcgccgcttaccgccacgcgacccgtataactaaaatccaacaacaactacaacatatcgaaaaacactccgtacaaacgcacccgctcgacgcgactctcgcgcaactaccccgcgaacataacgcgaaaataaaaactaacgacgaccaacaccgcacgatacgccgaaaaatcgcgcccgcccgccgcctccaaaatcacgtccaaaaacttacgctcgacgcgcaactaactcaaaccgcgcaacaaactcaaaacgtacgcgaaatccgaaaaaaaaaacacgaccaaaaacgccgatcgctccataacgccttcgataaattatcgaaaacgccgcgaccgaaacctacgaaaaaacgcgacgcgctaaacaccgctactataaataaaacgaaacgccgcgactctcgaaaaacgaaataaacgaaaaaacgtctacaccgcccccttaacccctctataccgaacgccaccgccccccgcgaacgcgaactcgcctatcccccgcgcgacgcccgcccccgactccgcaaactaaatcaccgctatccgcgaccgactccctccctccgcccttctacgtctccccgctaacgcccgaaccgaaaacaacgaataacaaataccaaatccgaaaacgacctcgccgcgcgccgaaaccgaaaacctcccgaaattacccacgacccacccgacccgactactaaacccaacccgaaaaaaacgaactcgac

SEQ ID NO: 18247 - DNA, 862 bp, Artificial Sequence
  chemically treated genomic DNA (Homo sapiens) CpG-island No: 18247
gcgaagttttgtatgtttaggtagttggttaggtcgagttgttgttgtaggaaggtttcgtacgttttttttacggtcgggaattgtagtaggtcggcggcgcgtagtagcggtttagcgttgtcgtcgtttatcgttacgcggttcgtgtagttgaagtttagtagtagttgtagtatgtcgggaggtatttcgtgtaggcgtattcgttcggcgcggttttcgcgtagttgtttcgcgaatatggcgcggaagtaggggttggcggcggttagtatcgtacggtgcgtcgggaagtcgcgttcgttcgtcgtttttagggttacgtttaggaatttgcgttcggcgcgtagttggtttaggtcgcgtagtaggtttagggcgtgcgcggggttcgagaagggaagtacggttaggggcgtcggtcgttttatggcgttttcgataggttgtcgaggacgtcgcggtcggggtttgcggagagacgcggcgcgttaggtatcgttgttataaatagggcggggcgtcgcggttttcgaggggcgggatgggcggggagacgtttgtatcgtttttttaatttttttgtgtcgggcgttatcgtttttcgcgagcgcgggttcgtttgtttttcgcgcggcgttcgttttcggtttcgtaggttgagttatcgttgttcgcggtcggtttttttttttcgtttttttgcgttttttcgttgacgttcgggtcggggatagcgagtgataagtgttaggttcgagggcggtttcgtcgcgcgtcgggatcgggggtttttcggggttgtttacgatttattcggttcggttgttgaatttaattcgggagaggcgagttcggt

SEQ ID NO: 18248 - DNA, 862 bp, Artificial Sequence
  chemically treated genomic DNA (Homo sapiens) CpG-island No: 18248
accgaactcgcctctcccgaattaaattcaacaaccgaaccgaataaatcgtaaacaaccccgaaaaacccccgatcccgacgcgcgacgaaaccgccctcgaacctaacacttatcactcgctatccccgacccgaacgtcaacgaaaaaacgcaaaaaaacgaaaaaaaaaaaccgaccgcgaacaacgataactcaacctacgaaaccgaaaacgaacgccgcgcgaaaaacaaacgaacccgcgctcgcgaaaaacgataacgcccgacacaaaaaaattaaaaaaacgatacaaacgtctccccgcccatcccgcccctcgaaaaccgcgacgccccgccctatttataacaacgatacctaacgcgccgcgtctctccgcaaaccccgaccgcgacgtcctcgacaacctatcgaaaacgccataaaacgaccgacgcccctaaccgtacttcccttctcgaaccccgcgcacgccctaaacctactacgcgacctaaaccaactacgcgccgaacgcaaattcctaaacgtaaccctaaaaacgacgaacgaacgcgacttcccgacgcaccgtacgatactaaccgccgccaacccctacttccgcgccatattcgcgaaacaactacgcgaaaaccgcgccgaacgaatacgcctacacgaaatacctcccgacatactacaactactactaaacttcaactacacgaaccgcgtaacgataaacgacgacaacgctaaaccgctactacgcgccgccgacctactacaattcccgaccgtaaaaaaaacgtacgaaaccttcctacaacaacaactcgacctaaccaactacctaaacatacaaaacttcgc

SEQ ID NO: 18249 - DNA, 577 bp, Artificial Sequence
  chemically treated genomic DNA (Homo sapiens) CpG-island No: 18249
gagcgcggcgtagcggtttattttgcgttacgtgggcgagttgggcgtcgagtagttggagcggttgttattggcgcgtttgttgcgttatttgcgggacgacgggttgtgtgtgtttaaggaggaggtcgtttattagttggcgttgcgttgggttcgcgttgattcgtcgcgtcgcgtcgcgtattggtcgtagttgttggaggtcgtgcgtttgtttttcgtgcgtcgtttttatttgttggcgtacgtcgaggtcgagtcgttggtggcgcgttgtttattttgtttgcgtttgttgcgcgaggcgcgcgatttttaggcggcgcgttacgatcgttacgatcgcgggttttgttttcgaatgcgttttcgttcgtttatcggtttcgtcgagattttcgtgttcgtgggcggttgcgattaggattgtgacgagttggttattgtcgattgttataattcgtagacgggttagtggcgttatttggtcgagtttttagattatttgggcggaggttatagtatcgtggcgttgggtaatgatatttacgtgacgggtgagtgggttaggggt

SEQ ID NO: 18250 - DNA, 577 bp, Artificial Sequence
  chemically treated genomic DNA (Homo sapiens) CpG-island No: 18250
acccctaacccactcacccgtcacgtaaatatcattacccaacgccacgatactataacctccgcccaaataatctaaaaactcgaccaaataacgccactaacccgtctacgaattataacaatcgacaataaccaactcgtcacaatcctaatcgcaaccgcccacgaacacgaaaatctcgacgaaaccgataaacgaacgaaaacgcattcgaaaacaaaacccgcgatcgtaacgatcgtaacgcgccgcctaaaaatcgcgcgcctcgcgcaacaaacgcaaacaaaataaacaacgcgccaccaacgactcgacctcgacgtacgccaacaaataaaaacgacgcacgaaaaacaaacgcacgacctccaacaactacgaccaatacgcgacgcgacgcgacgaatcaacgcgaacccaacgcaacgccaactaataaacgacctcctccttaaacacacacaacccgtcgtcccgcaaataacgcaacaaacgcgccaataacaaccgctccaactactcgacgcccaactcgcccacgtaacgcaaaataaaccgctacgccgcgctc

SEQ ID NO: 18251 - DNA, 577 bp, Artificial Sequence
  chemically treated genomic DNA (Homo sapiens) CpG-island No: 18251
gtttttggtttatttattcgttacgtagatgttattgtttagcgttacgatgttgtagttttcgtttaggtggtttgggaattcggttaggtagcgttattgattcgtttgcgggttgtagtagtcgatagtgattagttcgttatagttttggtcgtagtcgtttacgagtacgaggatttcggcgagatcggtggacgggcgaggacgtattcggggatagggttcgcggtcgtggcggtcgtagcgcgtcgtttggaagtcgcgcgtttcgcgtagtaggcgtaggtagggtgggtagcgcgttattagcggttcggtttcgacgtgcgttaataggtagaagcggcgtacgaagggtaggcgtacggtttttagtagttgcggttagtgcgcggcgcggcgcggcgggttagcgcggatttagcgtagcgttagttggtaggcggttttttttttgggtatatatagttcgtcgtttcgtaggtagcgtagtaggcgcgttagtggtagtcgttttagttgttcggcgtttagttcgtttacgtggcgtagaatgaatcgttgcgtcgcgttt

SEQ ID NO: 18252 - DNA, 577 bp, Artificial Sequence
  chemically treated genomic DNA (Homo sapiens) CpG-island No: 18252
aaacgcgacgcaacgattcattctacgccacgtaaacgaactaaacgccgaacaactaaaacgactaccactaacgcgcctactacgctacctacgaaacgacgaactatatatacccaaaaaaaaaaccgcctaccaactaacgctacgctaaatccgcgctaacccgccgcgccgcgccgcgcactaaccgcaactactaaaaaccgtacgcctacccttcgtacgccgcttctacctattaacgcacgtcgaaaccgaaccgctaataacgcgctacccaccctacctacgcctactacgcgaaacgcgcgacttccaaacgacgcgctacgaccgccacgaccgcgaaccctatccccgaatacgtcctcgcccgtccaccgatctcgccgaaatcctcgtactcgtaaacgactacgaccaaaactataacgaactaatcactatcgactactacaacccgcaaacgaatcaataacgctacctaaccgaattcccaaaccacctaaacgaaaactacaacatcgtaacgctaaacaataacatctacgtaacgaataaataaaccaaaaac

SEQ ID NO: 18253 - DNA, 853 bp, Artificial Sequence
  chemically treated genomic DNA (Homo sapiens) CpG-island No: 18253
tcgcggtttttacgagtaatattaggtttagcgtattggggaagcggggcgcgtttatagtcgttatgagtatttcgaattgtagcgcgtttattatgtcgtaggagaggtcgaaggcgacgtagaaggcgacgagggcgtcgtaggagcgcgcgcgtgcgttgtttaggtttgtgagtttattggttagtagggttaggttgaatagatacgggacgtgcggtcgtagacgcgttaggttcgttagggcgtcgtacgtcgggcgcgttacgatgtttacgaagtttacgatggatagtaggaaggcggcgtcggtgtcgggtacgttcgcgtttttggcgtagtttattagtaggatggcggggacgaagagttcgagcgttattaggaatttggtgacggcgtatacggcgaaggcgcggtcggtgtatattgttaagtttagtaggcgtcggcggggtcggattttgggggatgtttcgcgtagttgtagtttcgtatcgttagttttcgtttcgttcggagcgttttcggcgcggtcgtcggcgttgtttttgcgcggtcgcgggttcggttcgggcggcggttttatgatagtttcgtaggcgtagtagtgtagtaggagttcgtcgagtagtaggaagtcgtcgcgttagtcgaagcgttttagtagttgttggtcgagcggcgatagcgcggataggaatacggggttgttcgtcgtcgttagttcgttggttagaggtcgtcgtcgttcgaagtatagttttagtatgatgagcgacggttggaagttgagggttaggtttaggtttgcgggcgaggcggtgttgtgtcggggttttcggagagt

SEQ ID NO: 18254 - DNA, 853 bp, Artificial Sequence
  chemically treated genomic DNA (Homo sapiens) CpG-island No: 18254
actctccgaaaaccccgacacaacaccgcctcgcccgcaaacctaaacctaaccctcaacttccaaccgtcgctcatcatactaaaactatacttcgaacgacgacgacctctaaccaacgaactaacgacgacgaacaaccccgtattcctatccgcgctatcgccgctcgaccaacaactactaaaacgcttcgactaacgcgacgacttcctactactcgacgaactcctactacactactacgcctacgaaactatcataaaaccgccgcccgaaccgaacccgcgaccgcgcaaaaacaacgccgacgaccgcgccgaaaacgctccgaacgaaacgaaaactaacgatacgaaactacaactacgcgaaacatcccccaaaatccgaccccgccgacgcctactaaacttaacaatatacaccgaccgcgccttcgccgtatacgccgtcaccaaattcctaataacgctcgaactcttcgtccccgccatcctactaataaactacgccaaaaacgcgaacgtacccgacaccgacgccgccttcctactatccatcgtaaacttcgtaaacatcgtaacgcgcccgacgtacgacgccctaacgaacctaacgcgtctacgaccgcacgtcccgtatctattcaacctaaccctactaaccaataaactcacaaacctaaacaacgcacgcgcgcgctcctacgacgccctcgtcgccttctacgtcgccttcgacctctcctacgacataataaacgcgctacaattcgaaatactcataacgactataaacgcgccccgcttccccaatacgctaaacctaatattactcgtaaaaaccgcga

SEQ ID NO: 18255 - DNA, 853 bp, Artificial Sequence
  chemically treated genomic DNA (Homo sapiens) CpG-island No: 18255
gtttttcggggatttcggtatagtatcgtttcgttcgtaggtttgggtttggtttttaatttttagtcgtcgtttattatgttggggttgtatttcgagcggcggcggtttttggttaacgggttggcggcggcgggtagtttcgtgtttttgttcgcgttgtcgtcgttcggttagtagttgttggagcgtttcggttggcgcggcggttttttgttgttcggcgggtttttgttgtattgttgcgtttgcggggttgttatgaggtcgtcgttcgggtcgggttcgcgatcgcgtagggatagcgtcggcgatcgcgtcggggacgtttcgggcgaggcggaggttgacggtgcggggttgtagttgcgcgaggtattttttagggttcggtttcgtcggcgtttgttggatttggtagtgtgtatcgatcgcgttttcgtcgtgtacgtcgttattaagtttttgatggcgttcgggtttttcgttttcgttattttgttggtgaattacgttaaggacgcgggcgtgttcgatatcgacgtcgtttttttgttgtttatcgtgggtttcgtggatatcgtggcgcgttcggcgtgcggcgttttggcgggtttggcgcgtttgcggtcgtacgtttcgtatttgtttagtttggttttgttggttaatgggtttatagatttgagtagcgtacgcgcgcgtttttacggcgttttcgtcgttttttgcgtcgttttcggttttttttacggtatggtgggcgcgttgtagttcgaggtgtttatggcggttgtgggcgcgtttcgtttttttagtgcgttgggtttggtgttgttcgtggaggtcgcgg

SEQ ID NO: 18256 - DNA, 853 bp, Artificial Sequence
  chemically treated genomic DNA (Homo sapiens) CpG-island No: 18256
ccgcgacctccacgaacaacaccaaacccaacgcactaaaaaaacgaaacgcgcccacaaccgccataaacacctcgaactacaacgcgcccaccataccgtaaaaaaaaccgaaaacgacgcaaaaaacgacgaaaacgccgtaaaaacgcgcgcgtacgctactcaaatctataaacccattaaccaacaaaaccaaactaaacaaatacgaaacgtacgaccgcaaacgcgccaaacccgccaaaacgccgcacgccgaacgcgccacgatatccacgaaacccacgataaacaacaaaaaaacgacgtcgatatcgaacacgcccgcgtccttaacgtaattcaccaacaaaataacgaaaacgaaaaacccgaacgccatcaaaaacttaataacgacgtacacgacgaaaacgcgatcgatacacactaccaaatccaacaaacgccgacgaaaccgaaccctaaaaaatacctcgcgcaactacaaccccgcaccgtcaacctccgcctcgcccgaaacgtccccgacgcgatcgccgacgctatccctacgcgatcgcgaacccgacccgaacgacgacctcataacaaccccgcaaacgcaacaatacaacaaaaacccgccgaacaacaaaaaaccgccgcgccaaccgaaacgctccaacaactactaaccgaacgacgacaacgcgaacaaaaacacgaaactacccgccgccgccaacccgttaaccaaaaaccgccgccgctcgaaatacaaccccaacataataaacgacgactaaaaattaaaaaccaaacccaaacctacgaacgaaacgatactataccgaaatccccgaaaaac

SEQ ID NO: 18257 - DNA, 737 bp, Artificial Sequence
  chemically treated genomic DNA (Homo sapiens) CpG-island No: 18257
atgtggacgtcgtagattcgtgagaaatttttttttttttattttatttcggttcgtcggttttttattgtgggtgggcgcgcgtgggtggagaggggcgcggaattgtttttaggtagtcggagttgtagtcgcgtatattttcgattatataggtggagggcgaggagttttcgaattaaagttagaggacggggtatttttttgtcgattcgcgcgtaattagcggtttagggagggaggagacgtgtataacgttacgacggacggggataggttttcggggatatattcgttcggcggggggcgggagtttcggacgttttattttttcgttttagtagtagcgcggttacggcgttgtttacgtcgtcggatagggcgtatacgacgtgtcgtaaggtttgtattcgttagtcgtttaatttcgttagttgtagttatcgtcgttttcgcgttttgtcggaagtttcgtttcggtcgtagggttcgcgttagtggttcggtcggaagttgcggtagtttattcgcgtttcgttcggtttttttttgtttcgcggcgggtttttttgttttcggtttgcgtttatttttgaggttttatcgattcgcggggcgtcgagattttgtcgggtcgcgaggggttggttttttttttgagtcgtcgttttgttttttttattcgcgtttcggttttattgttttttttttgcgttgtaaattaaaaataaaatttt

SEQ ID NO: 18258 - DNA, 737 bp, Artificial Sequence
  chemically treated genomic DNA (Homo sapiens) CpG-island No: 18258
aaaattttatttttaatttacaacgcaaaaaaaaaacaataaaaccgaaacgcgaataaaaaaaacaaaacgacgactcaaaaaaaaaaccaacccctcgcgacccgacaaaatctcgacgccccgcgaatcgataaaacctcaaaaataaacgcaaaccgaaaacaaaaaaacccgccgcgaaacaaaaaaaaaccgaacgaaacgcgaataaactaccgcaacttccgaccgaaccactaacgcgaaccctacgaccgaaacgaaacttccgacaaaacgcgaaaacgacgataactacaactaacgaaattaaacgactaacgaatacaaaccttacgacacgtcgtatacgccctatccgacgacgtaaacaacgccgtaaccgcgctactactaaaacgaaaaaataaaacgtccgaaactcccgccccccgccgaacgaatatatccccgaaaacctatccccgtccgtcgtaacgttatacacgtctcctccctccctaaaccgctaattacgcgcgaatcgacaaaaaaataccccgtcctctaactttaattcgaaaactcctcgccctccacctatataatcgaaaatatacgcgactacaactccgactacctaaaaacaattccgcgcccctctccacccacgcgcgcccacccacaataaaaaaccgacgaaccgaaataaaataaaaaaaaaaaaatttctcacgaatctacgacgtccacat

SEQ ID NO: 18259 - DNA, 737 bp, Artificial Sequence
  chemically treated genomic DNA (Homo sapiens) CpG-island No: 18259
agaattttatttttggtttatagcgtagaagaagagtagtgaggtcggggcgcgggtggggagggtaaggcggcggtttaaaaaaaaagttagtttttcgcggttcgatagagtttcggcgtttcgcgggtcggtggagttttaggggtgagcgtaggtcggagataggggaattcgtcgcgggataggggaaggtcggacggaacgcgggtaagttgtcgtagttttcggtcgggttattagcgcggattttacggtcggggcgggattttcggtaaggcgcggaagcggcggtagttgtagttggcgaagttgggcgattggcggatgtaggttttgcggtacgtcgtgtgcgttttgttcggcggcgtggatagcgtcgtggtcgcgttgttgttgaggcggagaggtgaggcgttcgaggttttcgtttttcgtcgagcgaatgtgttttcggaaatttgttttcgttcgtcgtggcgttgtgtacgttttttttttttttgggtcgttggttgcgcgcgggtcggtaggaggatatttcgttttttgattttggttcggaggtttttcgttttttatttgtgtagtcggaggtgtgcgcgattgtagtttcgattatttgggagtagtttcgcgtttttttttatttacgcgcgtttatttatagtgagaagtcggcgggtcggggtggggtggggagggaagggttttttacggatttgcggcgtttatat

SEQ ID NO: 18260 - DNA, 737 bp, Artificial Sequence
  chemically treated genomic DNA (Homo sapiens) CpG-island No: 18260
atataaacgccgcaaatccgtaaaaaacccttccctccccaccccaccccgacccgccgacttctcactataaataaacgcgcgtaaataaaaaaaaacgcgaaactactcccaaataatcgaaactacaatcgcgcacacctccgactacacaaataaaaaacgaaaaacctccgaaccaaaatcaaaaaacgaaatatcctcctaccgacccgcgcgcaaccaacgacccaaaaaaaaaaaaaacgtacacaacgccacgacgaacgaaaacaaatttccgaaaacacattcgctcgacgaaaaacgaaaacctcgaacgcctcacctctccgcctcaacaacaacgcgaccacgacgctatccacgccgccgaacaaaacgcacacgacgtaccgcaaaacctacatccgccaatcgcccaacttcgccaactacaactaccgccgcttccgcgccttaccgaaaatcccgccccgaccgtaaaatccgcgctaataacccgaccgaaaactacgacaacttacccgcgttccgtccgaccttcccctatcccgcgacgaattcccctatctccgacctacgctcacccctaaaactccaccgacccgcgaaacgccgaaactctatcgaaccgcgaaaaactaactttttttttaaaccgccgccttaccctccccacccgcgccccgacctcactactcttcttctacgctataaaccaaaaataaaattct

SEQ ID NO: 18261 - DNA, 516 bp, Artificial Sequence
  chemically treated genomic DNA (Homo sapiens) CpG-island No: 18261
gacgttttcgtttttaacgtttagaacgatatcgacgttagttttaatattttgaacgtgattttttcggcgttgttgtttggcggcgttcgcggttagtttttttcgtcggaggatttgtaggagtagatttatttgaatcggacgttgttgattattatttttacgtagcgcgtgttgtttttcgacgataatatttgtttgcgcgagttttgcgagaattatatgaagtgcgtgttcgttttgcgattcgatagtttcgcgtttttttttagttttattatcgtgttttttcggtttatttattttattaacggtttgcgttgtcgttgttcgttcggttttatcggcgattattgcgagacggagatcgatttttgttatttcgattcgtgcggcgttaacggtcgttgtcgtagtcgcgagggcggttatatttgcgagtgtttcgaggattttattggtaggtgttcgggtttattttggttttgtgtatatgtttttaggttatatggt

SEQ ID NO: 18262 - DNA, 516 bp, Artificial Sequence
  chemically treated genomic DNA (Homo sapiens) CpG-island No: 18262
accatataacctaaaaacatatacacaaaaccaaaataaacccgaacacctaccaataaaatcctcgaaacactcgcaaatataaccgccctcgcgactacgacaacgaccgttaacgccgcacgaatcgaaataacaaaaatcgatctccgtctcgcaataatcgccgataaaaccgaacgaacaacgacaacgcaaaccgttaataaaataaataaaccgaaaaaacacgataataaaactaaaaaaaaacgcgaaactatcgaatcgcaaaacgaacacgcacttcatataattctcgcaaaactcgcgcaaacaaatattatcgtcgaaaaacaacacgcgctacgtaaaaataataatcaacaacgtccgattcaaataaatctactcctacaaatcctccgacgaaaaaaactaaccgcgaacgccgccaaacaacaacgccgaaaaaatcacgttcaaaatattaaaactaacgtcgatatcgttctaaacgttaaaaacgaaaacgtc

SEQ ID NO: 18263 - DNA, 516 bp, Artificial Sequence
  chemically treated genomic DNA (Homo sapiens) CpG-island No: 18263
gttatgtgatttggggatatgtatataaagttagggtgagttcgggtatttattagtgaagttttcgaagtattcgtaggtgtagtcgttttcgcggttgcggtagcggtcgttggcgtcgtacgggtcggagtagtagaggtcgattttcgtttcgtagtagtcgtcggtgaagtcgggcgggtagcggtagcgtaggtcgttgatggggtggatgggtcggaagagtacggtggtggagttgaggaagggcgcggagttgtcgaatcgtagaacggatacgtattttatgtagttttcgtagggttcgcgtaggtagatgttgtcgtcgaagggtagtacgcgttgcgtggagatggtggttagtagcgttcgatttaggtagatttgtttttgtaggtttttcgacgggaagaattggtcgcggacgtcgttaggtagtagcgtcgagaaggttacgtttaggatgttggagttgacgtcggtgtcgttttggacgttgaagacgaagacgtt

SEQ ID NO: 18264 - DNA, 516 bp, Artificial Sequence
  chemically treated genomic DNA (Homo sapiens) CpG-island No: 18264
aacgtcttcgtcttcaacgtccaaaacgacaccgacgtcaactccaacatcctaaacgtaaccttctcgacgctactacctaacgacgtccgcgaccaattcttcccgtcgaaaaacctacaaaaacaaatctacctaaatcgaacgctactaaccaccatctccacgcaacgcgtactacccttcgacgacaacatctacctacgcgaaccctacgaaaactacataaaatacgtatccgttctacgattcgacaactccgcgcccttcctcaactccaccaccgtactcttccgacccatccaccccatcaacgacctacgctaccgctacccgcccgacttcaccgacgactactacgaaacgaaaatcgacctctactactccgacccgtacgacgccaacgaccgctaccgcaaccgcgaaaacgactacacctacgaatacttcgaaaacttcactaataaatacccgaactcaccctaactttatatacatatccccaaatcacataac

SEQ ID NO: 18265 - DNA, 535 bp, Artificial Sequence
  chemically treated genomic DNA (Homo sapiens) CpG-island No: 18265
tttggtcggttttcgagcggcgattagtaatttttcgcgggcgatagttttttttttaaagttacgcgtaattttttattcggcggcgttattttttcgagtaggtttcgtcggagttcgagtcgcgggttgattttcgttcgggaaagtggttttaagagttcgttataggggacgttagggattcgcggtaggttttgcgggttaggatgagttttaagtataggttagtgttcgcggtttcgttgagtttcgacgtttttagtagtcgcggtcgggattttagttttttcgtttatagggttttgtagttttcgaggatagattcgtttttttttcgcgtttaggtttatttggaatcgatcgtttcgtaacgtttttatttcgggagttatcgggacgcggttgggttaggtttcggggtgggttcgagacggggtcgtttttgattggtttgtttgttgttatttattcgtttttttgttgttcggtttattttaaaggaataggaagggtttcgtcgggaggggatagt

SEQ ID NO: 18266 - DNA, 535 bp, Artificial Sequence
  chemically treated genomic DNA (Homo sapiens) CpG-island No: 18266
actatcccctcccgacgaaacccttcctattcctttaaaataaaccgaacaacaaaaaaacgaataaataacaacaaacaaaccaatcaaaaacgaccccgtctcgaacccaccccgaaacctaacccaaccgcgtcccgataactcccgaaataaaaacgttacgaaacgatcgattccaaataaacctaaacgcgaaaaaaaaacgaatctatcctcgaaaactacaaaaccctataaacgaaaaaactaaaatcccgaccgcgactactaaaaacgtcgaaactcaacgaaaccgcgaacactaacctatacttaaaactcatcctaacccgcaaaacctaccgcgaatccctaacgtcccctataacgaactcttaaaaccactttcccgaacgaaaatcaacccgcgactcgaactccgacgaaacctactcgaaaaaataacgccgccgaataaaaaattacgcgtaactttaaaaaaaaaactatcgcccgcgaaaaattactaatcgccgctcgaaaaccgaccaaa

SEQ ID NO: 18267 - DNA, 535 bp, Artificial Sequence
  chemically treated genomic DNA (Homo sapiens) CpG-island No: 18267
gttattttttttcgacgagattttttttgtttttttaaaatgggtcgggtagtagaaagacgagtgagtgatagtagataggttaattagaagcggtttcgtttcgggtttatttcgaggtttggtttaatcgcgtttcggtagttttcggaataggagcgttgcgagacggtcggttttaagtgggtttgggcgcgggggagaggcgggtttgttttcgggaattgtaaggttttgtgagcgggaggattgggatttcggtcgcggttgttggaagcgtcgaagtttagcggggtcgcggatattgatttgtgtttagaatttattttggttcgtagagtttgtcgcgagtttttggcgttttttgtggcgggtttttggagttattttttcgagcggaagttagttcgcggttcggatttcggcgggatttgttcggaggaatggcgtcgtcgggtgaggagttgcgcgtggttttggggagagggttgtcgttcgcgggaggttattagtcgtcgttcgagagtcggttagg

SEQ ID NO: 18268 - DNA, 535 bp, Artificial Sequence
  chemically treated genomic DNA (Homo sapiens) CpG-island No: 18268
cctaaccgactctcgaacgacgactaataacctcccgcgaacgacaaccctctccccaaaaccacgcgcaactcctcacccgacgacgccattcctccgaacaaatcccgccgaaatccgaaccgcgaactaacttccgctcgaaaaaataactccaaaaacccgccacaaaaaacgccaaaaactcgcgacaaactctacgaaccaaaataaattctaaacacaaatcaatatccgcgaccccgctaaacttcgacgcttccaacaaccgcgaccgaaatcccaatcctcccgctcacaaaaccttacaattcccgaaaacaaacccgcctctcccccgcgcccaaacccacttaaaaccgaccgtctcgcaacgctcctattccgaaaactaccgaaacgcgattaaaccaaacctcgaaataaacccgaaacgaaaccgcttctaattaacctatctactatcactcactcgtctttctactacccgacccattttaaaaaaacaaaaaaaatctcgtcgaaaaaaaataac

SEQ ID NO: 18269 - DNA, 691 bp, Artificial Sequence
  chemically treated genomic DNA (Homo sapiens) CpG-island No: 18269
acggagatttcggtcgggttttttaaggcgtcgtggacgcggggggcggggcgagcgcggttaggtttcgtttcggttaggttcggtttcgtttttagttagatttcgttttcgtagcggcgttcgtttagtagttgtttagtcgtcggcgcgcgcggttgggagcggtagttgtgtttcggcgttttcgagttggtgtcgagcgtagcgttttaggagtttttttattttcgcgtcggtttacggtaagtgtcgcgggttgcggttagtgttgttgggtcgtcgtttgggttcggtttcgcgttttaattcggacggatcgacggtcgtcgtttttttggttcgggttttttaggaggtacgggggtggttttcgaggcggggggcggtgggaaggtttcgacgttttttcggttttggggaaattgaggtcgcgtatgtttggaggggcggggtttcgggggtatttttttttcgaacgcgtaggagagggtgcggcggtggggttcgtattgcggagcggacggggagggtattcgggcgttggcgacggtttttttcgtatttgagtcgttaagcgaggtttcgattttcgcgttttttttttcgggggagtagacgggttcggggttttttagtatttttttcgggcgggttgtattttttagcgttttcgttttttttttttttt

SEQ ID NO: 18270 - DNA, 691 bp, Artificial Sequence
  chemically treated genomic DNA (Homo sapiens) CpG-island No: 18270
aaaaaaaaaaaaaaacgaaaacgctaaaaaatacaacccgcccgaaaaaaatactaaaaaaccccgaacccgtctactcccccgaaaaaaaaaacgcgaaaatcgaaacctcgcttaacgactcaaatacgaaaaaaaccgtcgccaacgcccgaataccctccccgtccgctccgcaatacgaaccccaccgccgcaccctctcctacgcgttcgaaaaaaaaatacccccgaaaccccgcccctccaaacatacgcgacctcaatttccccaaaaccgaaaaaacgtcgaaaccttcccaccgccccccgcctcgaaaaccacccccgtacctcctaaaaaacccgaaccaaaaaaacgacgaccgtcgatccgtccgaattaaaacgcgaaaccgaacccaaacgacgacccaacaacactaaccgcaacccgcgacacttaccgtaaaccgacgcgaaaataaaaaaactcctaaaacgctacgctcgacaccaactcgaaaacgccgaaacacaactaccgctcccaaccgcgcgcgccgacgactaaacaactactaaacgaacgccgctacgaaaacgaaatctaactaaaaacgaaaccgaacctaaccgaaacgaaacctaaccgcgctcgccccgccccccgcgtccacgacgccttaaaaaacccgaccgaaatctccgt

SEQ ID NO: 18271 - DNA, 691 bp, Artificial Sequence
  chemically treated genomic DNA (Homo sapiens) CpG-island No: 18271
ggaggagggaagggacgaggacgttggggggtgtagttcgttcgggaggggtgttgggaggtttcgggttcgtttgttttttcggggagggaggcgcgggggtcgaagtttcgtttggcggtttaagtgcgggggaggtcgtcgttagcgttcggatatttttttcgttcgtttcgtagtgcggattttatcgtcgtatttttttttgcgcgttcggaggggaaatgttttcgagatttcgtttttttaagtatgcgcggttttagtttttttagggtcgaggggacgtcgagatttttttatcgtttttcgtttcggaggttattttcgtgttttttgggggattcggattaagggggcggcggtcgtcggttcgttcgggttggggcgcggggtcgagtttagacggcggtttaatagtattggtcgtagttcgcggtatttatcgtgggtcggcgcggggatgggggggtttttggggcgttgcgttcggtattagttcggggacgtcgaggtatagttatcgtttttagtcgcgcgcgtcgacgattgagtaattgttgggcggacgtcgttgcgggggcggggtttgattgggggcggggtcgggtttgatcggggcggggtttgatcgcgttcgtttcgtttttcgcgtttacggcgttttaggggattcggtcggggttttcgt

SEQ ID NO: 18272 - DNA, 691 bp, Artificial Sequence
  chemically treated genomic DNA (Homo sapiens) CpG-island No: 18272
acgaaaaccccgaccgaatcccctaaaacgccgtaaacgcgaaaaacgaaacgaacgcgatcaaaccccgccccgatcaaacccgaccccgcccccaatcaaaccccgcccccgcaacgacgtccgcccaacaattactcaatcgtcgacgcgcgcgactaaaaacgataactatacctcgacgtccccgaactaataccgaacgcaacgccccaaaaacccccccatccccgcgccgacccacgataaataccgcgaactacgaccaatactattaaaccgccgtctaaactcgaccccgcgccccaacccgaacgaaccgacgaccgccgcccccttaatccgaatcccccaaaaaacacgaaaataacctccgaaacgaaaaacgataaaaaaatctcgacgtcccctcgaccctaaaaaaactaaaaccgcgcatacttaaaaaaacgaaatctcgaaaacatttcccctccgaacgcgcaaaaaaaaatacgacgataaaatccgcactacgaaacgaacgaaaaaaatatccgaacgctaacgacgacctcccccgcacttaaaccgccaaacgaaacttcgacccccgcgcctccctccccgaaaaaacaaacgaacccgaaacctcccaacacccctcccgaacgaactacaccccccaacgtcctcgtcccttccctcctcc

SEQ ID NO: 18273 - DNA, 630 bp, Artificial Sequence
  chemically treated genomic DNA (Homo sapiens) CpG-island No: 18273
tacgtttcgtttattttgtagcgcggcgtcgattttttcggcgaaggtttttagggagcgcgtcgggaggtgtcgagggcggtcgtttttcgttttcggttcgcgcgttgtttttttgcggtttatggcgcggatttggggtgtcggggattttttattttacggtcgcgtttttcggttttttaatgggttgtgcggttgttagcgtttgcgtcggacgttattttcggttttcgtggttacgtgatcgttattttacgtgatcgcgcggcggtcgttgcggcgcgatggcggcggggttggcgcggtttttgttgtttttcgggttttcggtcggcggtgagtggttcggtcgttcgcgtttttaggtttcgcgcgcgttttgtatttcggttttttcgtttacggtttcgtttttcgtagggttcgcgtcggtaggtgtagcgaagatgaaggtggtggaggagtttaacgcgtttgggtgagtagtttcgcgggttggcggttcgagcgggggacggttcgggttcgtttttcgttgattttgtcgtttttcgtagggtgaataattcgtttttgttttaggttagtcgtttttaggttaagagggattttttattcgtgtttggt

SEQ ID NO: 18274 - DNA, 630 bp, Artificial Sequence
  chemically treated genomic DNA (Homo sapiens) CpG-island No: 18274
accaaacacgaataaaaaatccctcttaacctaaaaacgactaacctaaaacaaaaacgaattattcaccctacgaaaaacgacaaaatcaacgaaaaacgaacccgaaccgtcccccgctcgaaccgccaacccgcgaaactactcacccaaacgcgttaaactcctccaccaccttcatcttcgctacacctaccgacgcgaaccctacgaaaaacgaaaccgtaaacgaaaaaaccgaaatacaaaacgcgcgcgaaacctaaaaacgcgaacgaccgaaccactcaccgccgaccgaaaacccgaaaaacaacaaaaaccgcgccaaccccgccgccatcgcgccgcaacgaccgccgcgcgatcacgtaaaataacgatcacgtaaccacgaaaaccgaaaataacgtccgacgcaaacgctaacaaccgcacaacccattaaaaaaccgaaaaacgcgaccgtaaaataaaaaatccccgacaccccaaatccgcgccataaaccgcaaaaaaacaacgcgcgaaccgaaaacgaaaaacgaccgccctcgacacctcccgacgcgctccctaaaaaccttcgccgaaaaaatcgacgccgcgctacaaaataaacgaaacgta

SEQ ID NO: 18275 - DNA, 630 bp, Artificial Sequence
  chemically treated genomic DNA (Homo sapiens) CpG-island No: 18275
attagatacgggtgaaggattttttttggtttggaggcgattggtttgaggtaagaacgggttgtttattttacgggaagcggtaaggttagcggggaacgggttcgggtcgtttttcgttcgagtcgttagttcgcgaggttgtttatttaaacgcgttgggtttttttattatttttattttcgttgtatttgtcggcgcgggttttacggggagcgagatcgtgagcggggaggtcggggtgtagagcgcgcgcggggtttggggacgcggacggtcgggttatttatcgtcggtcgagagttcgaggagtaataggagtcgcgttagtttcgtcgttatcgcgtcgtagcggtcgtcgcgcggttacgtgaagtgacggttacgtgattacggggatcggaagtggcgttcggcgtaagcgttggtagtcgtatagtttattgggaggtcgaggggcgcggtcgtggggtggggagttttcggtattttaggttcgcgttatgggtcgtaggagggtagcgcgcgggtcgggggcggaaggcggtcgttttcggtatttttcgacgcgttttttggaggttttcgtcgaggaggtcggcgtcgcgttgtagggtgagcgaggcgtg

SEQ ID NO: 18276 - DNA, 630 bp, Artificial Sequence
  chemically treated genomic DNA (Homo sapiens) CpG-island No: 18276
cacgcctcgctcaccctacaacgcgacgccgacctcctcgacgaaaacctccaaaaaacgcgtcgaaaaataccgaaaacgaccgccttccgcccccgacccgcgcgctaccctcctacgacccataacgcgaacctaaaataccgaaaactccccaccccacgaccgcgcccctcgacctcccaataaactatacgactaccaacgcttacgccgaacgccacttccgatccccgtaatcacgtaaccgtcacttcacgtaaccgcgcgacgaccgctacgacgcgataacgacgaaactaacgcgactcctattactcctcgaactctcgaccgacgataaataacccgaccgtccgcgtccccaaaccccgcgcgcgctctacaccccgacctccccgctcacgatctcgctccccgtaaaacccgcgccgacaaatacaacgaaaataaaaataataaaaaaacccaacgcgtttaaataaacaacctcgcgaactaacgactcgaacgaaaaacgacccgaacccgttccccgctaaccttaccgcttcccgtaaaataaacaacccgttcttacctcaaaccaatcgcctccaaaccaaaaaaaatccttcacccgtatctaat

SEQ ID NO: 18277 - DNA, 1114 bp, Artificial Sequence
  chemically treated genomic DNA (Homo sapiens) CpG-island No: 18277
gggcgcggtgttgtagggaacggaggtttattagggcggtcgggattgaggcgtaggcgttgagtttttatttaagttcgtcgaagtgtgtagagtttggagacgggatcgaggttatcggaagtttacggttgcggggatatgattaagttatagcgcgttgggggaagcgattattgtcgtttcgcggattttatcggtttggtcgggagttttttttgttcggtttattcgcgttttcggttcgaagttcggttttttttgacgttacggtttttgcgttttttggcggcgcggttgcggcgggacgcgcgggtatcgtttttttcggttggagggcgggattttcggtgagtgagtgacgggcgtagtttcggtagcggcggcggcggagttttgaggcgatagtagttgcgggaggcgacgggttgcggtttgcggaatttgaggtagttggggagggtcgggcgcgtcggtcggatagcgagtcgcgttggcggcggcggtggtcgcgatgatggagatttagatggacgagggcggcggcgtggtggtgtattaggacgattattgtttcggttcggtgatgtcggagcgggtgtcgggtttggcgggttttatttatcgcgagttcgagcgttttatttattgttacgacgaggaggtggttaaggagtttatgtcgttggtggtgaacgtgttggagaatttagattcggtgtttagcgagaattaggagtacgaggtggagttggagttgttgcgcgaggataacgagtagttgtttatttagtacgagcgtgagaaggcgttgcgtaggtaggcggaggaggtgcgtgggtcgcgggattcgttcgtattttcgtttcggatttttagttagtttcgggtttcggatttaatattcgtttcgattttagatttcgtttcggtatttcggatcgcgggatttttggatttttagatttcgtttcgagattcgtttggattttatatttttcgtttcgggatttttttattttttttgttcgtcgtgagatatttttttagagtattttttcgtttgtttcgggattttatttcgattttcggggattttttttttcgtttaggt

SEQ ID NO: 18278 - DNA, 1114 bp, Artificial Sequence
  chemically treated genomic DNA (Homo sapiens) CpG-island No: 18278
acctaaacgaaaaaaaaaatccccgaaaatcgaaataaaatcccgaaacaaacgaaaaaatactctaaaaaaatatctcacgacgaacaaaaaaaataaaaaaatcccgaaacgaaaaatataaaatccaaacgaatctcgaaacgaaatctaaaaatccaaaaatcccgcgatccgaaataccgaaacgaaatctaaaatcgaaacgaatattaaatccgaaacccgaaactaactaaaaatccgaaacgaaaatacgaacgaatcccgcgacccacgcacctcctccgcctacctacgcaacgccttctcacgctcgtactaaataaacaactactcgttatcctcgcgcaacaactccaactccacctcgtactcctaattctcgctaaacaccgaatctaaattctccaacacgttcaccaccaacgacataaactccttaaccacctcctcgtcgtaacaataaataaaacgctcgaactcgcgataaataaaacccgccaaacccgacacccgctccgacatcaccgaaccgaaacaataatcgtcctaatacaccaccacgccgccgccctcgtccatctaaatctccatcatcgcgaccaccgccgccgccaacgcgactcgctatccgaccgacgcgcccgaccctccccaactacctcaaattccgcaaaccgcaacccgtcgcctcccgcaactactatcgcctcaaaactccgccgccgccgctaccgaaactacgcccgtcactcactcaccgaaaatcccgccctccaaccgaaaaaaacgatacccgcgcgtcccgccgcaaccgcgccgccaaaaaacgcaaaaaccgtaacgtcaaaaaaaaccgaacttcgaaccgaaaacgcgaataaaccgaacaaaaaaaactcccgaccaaaccgataaaatccgcgaaacgacaataatcgcttcccccaacgcgctataacttaatcatatccccgcaaccgtaaacttccgataacctcgatcccgtctccaaactctacacacttcgacgaacttaaataaaaactcaacgcctacgcctcaatcccgaccgccctaataaacctccgttccctacaacaccgcgccc

SEQ ID NO: 18279 - DNA, 1114 bp, Artificial Sequence
  chemically treated genomic DNA (Homo sapiens) CpG-island No: 18279
gtttgggcggaaaagggggttttcgggagtcggggtggggtttcggggtaggcgggggagtgttttagggaggtgttttacggcgggtagagggggtggggaagtttcggggcgggggatatggggtttaggcgggtttcggggcggggtttgggggtttaggggtttcgcggttcggggtgtcggagcggggtttggggtcgggacgggtgttgggttcggggttcggggttggttgggggttcgggacggggatgcgggcgggtttcgcggtttacgtatttttttcgtttgtttgcgtagcgtttttttacgttcgtattgggtgagtagttgttcgttgttttcgcgtagtagttttagttttatttcgtgtttttggttttcgttgagtatcgagtttaggttttttagtacgtttattattagcggtatgagttttttgattattttttcgtcgtagtagtggatgaggcgttcgaattcgcggtagatggagttcgttaggttcgatattcgtttcgatattatcgagtcggagtagtagtcgttttggtatattattacgtcgtcgttttcgtttatttggatttttattatcgcggttatcgtcgtcgttagcgcggttcgttattcggtcggcgcgttcggttttttttagttgttttaggtttcgtaggtcgtagttcgtcgtttttcgtagttgttgtcgttttagggtttcgtcgtcgtcgttgtcgaggttgcgttcgttatttatttatcggaagtttcgttttttagtcggagggggcggtgttcgcgcgtttcgtcgtagtcgcgtcgttagggggcgtaggggtcgtgacgttagaggaagtcgggtttcgggtcggaagcgcgggtgagtcgggtagagggagttttcggttaggtcggtgggattcgcggggcggtagtggtcgttttttttagcgcgttgtagtttgattatgttttcgtaatcgtgggttttcggtgatttcgatttcgtttttaggttttgtatatttcggcggatttaggtgaaggtttagcgtttgcgttttaatttcggtcgttttgatgagttttcgttttttatagtatcgcgttt

SEQ ID NO: 18280 - DNA, 1114 bp, Artificial Sequence
  chemically treated genomic DNA (Homo sapiens) CpG-island No: 18280
aaacgcgatactataaaaaacgaaaactcatcaaaacgaccgaaattaaaacgcaaacgctaaaccttcacctaaatccgccgaaatatacaaaacctaaaaacgaaatcgaaatcaccgaaaacccacgattacgaaaacataatcaaactacaacgcgctaaaaaaaacgaccactaccgccccgcgaatcccaccgacctaaccgaaaactccctctacccgactcacccgcgcttccgacccgaaacccgacttcctctaacgtcacgacccctacgccccctaacgacgcgactacgacgaaacgcgcgaacaccgccccctccgactaaaaaacgaaacttccgataaataaataacgaacgcaacctcgacaacgacgacgacgaaaccctaaaacgacaacaactacgaaaaacgacgaactacgacctacgaaacctaaaacaactaaaaaaaaccgaacgcgccgaccgaataacgaaccgcgctaacgacgacgataaccgcgataataaaaatccaaataaacgaaaacgacgacgtaataatataccaaaacgactactactccgactcgataatatcgaaacgaatatcgaacctaacgaactccatctaccgcgaattcgaacgcctcatccactactacgacgaaaaaataatcaaaaaactcataccgctaataataaacgtactaaaaaacctaaactcgatactcaacgaaaaccaaaaacacgaaataaaactaaaactactacgcgaaaacaacgaacaactactcacccaatacgaacgtaaaaaaacgctacgcaaacaaacgaaaaaaatacgtaaaccgcgaaacccgcccgcatccccgtcccgaacccccaaccaaccccgaaccccgaacccaacacccgtcccgaccccaaaccccgctccgacaccccgaaccgcgaaacccctaaacccccaaaccccgccccgaaacccgcctaaaccccatatcccccgccccgaaacttccccaccccctctacccgccgtaaaacacctccctaaaacactcccccgcctaccccgaaaccccaccccgactcccgaaaacccccttttccgcccaaac

SEQ ID NO: 18281 - DNA, 1022 bp, Artificial Sequence
  chemically treated genomic DNA (Homo sapiens) CpG-island No: 18281
gcgcggaattagagagcgatttcgcggcgggtattttttatcgagtcgttgtcgtgaattaggtttttgcgcggaagaggcgcgtgtgagcgtgggaaagagattttcggtacgggtattacgtaggttgaatagggggaggtcggacggggttgggatcgttttcggggcgggttttatttgttaatttcgatgtagaaattttcgcggatggtgtcgggcggggcgtcggtcgggttcgtggtttcgatgagcgttcgcgaggtgcgtattacgtttagtttttgttaaatttgtgcggaggaacgggcgcggtattacgcgggggtgggggtttcggagtcgttcgttcgtttttcggatatttattatggttattatcggttcggaggttatatatttgataaggcggtcgtagaacgggcgtttacgtagttcggcgtagtgtttacgtagtagtttttcggaggtttgcggaagggttaggtcgtttgcgttcgtattcggtatttaggcgtttttaggttttcgttttttttttttttatatcgcgttttcgttcgtttatcgcgtttttatttgtattagttttagcgttattaatttgaagttttttttttcgaagcgtcgtataatttcgtttattagtcgtcgttgtacgtcgttcggttttacggttaggaaggtgcgttcgtgtgcgtcggtgtaggttgcggggtaggcggggacgggtcgttaggtcggtttagtatcggttattcgttttcggttcgcgtcgcgcggtttattcgcggggaagaggttagcgaagatggttagtattaggtagattatgatggcggtgcgggagcgggattcgcggggcggggcggtggcgttcggggcggggtttgcgtttaaagaggtttggtcggggcgttgcggttttcgcggggaggttgttttatttgtatttcggaattcggtagtcgtggggggtcggagggtagttgcggaggttaagttttttttagtagttcgga

SEQ ID NO: 18282 - DNA, 1022 bp, Artificial Sequence
  chemically treated genomic DNA (Homo sapiens) CpG-island No: 18282
tccgaactactaaaaaaaacttaacctccgcaactaccctccgaccccccacgactaccgaattccgaaatacaaataaaacaacctccccgcgaaaaccgcaacgccccgaccaaacctctttaaacgcaaaccccgccccgaacgccaccgccccgccccgcgaatcccgctcccgcaccgccatcataatctacctaatactaaccatcttcgctaacctcttccccgcgaataaaccgcgcgacgcgaaccgaaaacgaataaccgatactaaaccgacctaacgacccgtccccgcctaccccgcaacctacaccgacgcacacgaacgcaccttcctaaccgtaaaaccgaacgacgtacaacgacgactaataaacgaaattatacgacgcttcgaaaaaaaaaacttcaaattaataacgctaaaactaatacaaataaaaacgcgataaacgaacgaaaacgcgatataaaaaaaaaaaaaacgaaaacctaaaaacgcctaaataccgaatacgaacgcaaacgacctaacccttccgcaaacctccgaaaaactactacgtaaacactacgccgaactacgtaaacgcccgttctacgaccgccttatcaaatatataacctccgaaccgataataaccataataaatatccgaaaaacgaacgaacgactccgaaacccccacccccgcgtaataccgcgcccgttcctccgcacaaatttaacaaaaactaaacgtaatacgcacctcgcgaacgctcatcgaaaccacgaacccgaccgacgccccgcccgacaccatccgcgaaaatttctacatcgaaattaacaaataaaacccgccccgaaaacgatcccaaccccgtccgacctccccctattcaacctacgtaatacccgtaccgaaaatctctttcccacgctcacacgcgcctcttccgcgcaaaaacctaattcacgacaacgactcgataaaaaatacccgccgcgaaatcgctctctaattccgcgc

SEQ ID NO: 18283 - DNA, 1022 bp, Artificial Sequence
  chemically treated genomic DNA (Homo sapiens) CpG-island No: 18283
ttcgagttgttggaggagatttggttttcgtagttgtttttcggttttttacggttgtcgggtttcggggtgtaagtgaagtagttttttcgcggaggtcgtagcgtttcgattaggtttttttaagcgtaggtttcgtttcgggcgttatcgtttcgtttcgcggatttcgttttcgtatcgttattatgatttgtttggtgttgattattttcgttaatttttttttcgcgggtgagtcgcgcggcgcgggtcgggggcgggtggtcggtgttgggtcggtttgacggttcgttttcgtttgtttcgtagtttgtatcggcgtatacgaacgtatttttttggtcgtgaagtcggacggcgtgtagcggcggttggtgggcgagattgtgcggcgtttcgagaggaagggttttaagttggtggcgttgaagttggtgtaggtgggggcgcggtgagcgagcgggggcgcggtgtggggggaaggggagcggggatttggggacgtttaggtgtcgggtgcgggcgtaggcggtttgattttttcgtaggttttcgaggagttgttgcgtgagtattacgtcgagttgcgtgaacgttcgttttacggtcgttttgttaagtatatggttttcgggtcggtggtggttatggtgagtattcgggaagcgggcgggcggtttcgggatttttattttcgcgtgatatcgcgttcgttttttcgtataggtttggtaggggttggacgtggtgcgtatttcgcgggcgtttatcggagttacgaattcggtcgacgtttcgttcggtattattcgcggggatttttgtatcgaggttggtaagtaaggttcgtttcggggacggttttagtttcgttcggtttttttttgtttagtttgcgtggtattcgtgtcggaggttttttttttacgtttatacgcgtttttttcgcgtaggaatttgatttacggtagcgattcggtggagagtgttcgtcgcgagatcgttttttggtttcgcgt

SEQ ID NO: 18284 - DNA, 1022 bp, Artificial Sequence
  chemically treated genomic DNA (Homo sapiens) CpG-island No: 18284
acgcgaaaccaaaaaacgatctcgcgacgaacactctccaccgaatcgctaccgtaaatcaaattcctacgcgaaaaaaacgcgtataaacgtaaaaaaaaaacctccgacacgaataccacgcaaactaaacaaaaaaaaaccgaacgaaactaaaaccgtccccgaaacgaaccttacttaccaacctcgatacaaaaatccccgcgaataataccgaacgaaacgtcgaccgaattcgtaactccgataaacgcccgcgaaatacgcaccacgtccaacccctaccaaacctatacgaaaaaacgaacgcgatatcacgcgaaaataaaaatcccgaaaccgcccgcccgcttcccgaatactcaccataaccaccaccgacccgaaaaccatatacttaacaaaacgaccgtaaaacgaacgttcacgcaactcgacgtaatactcacgcaacaactcctcgaaaacctacgaaaaaatcaaaccgcctacgcccgcacccgacacctaaacgtccccaaatccccgctccccttccccccacaccgcgcccccgctcgctcaccgcgcccccacctacaccaacttcaacgccaccaacttaaaacccttcctctcgaaacgccgcacaatctcgcccaccaaccgccgctacacgccgtccgacttcacgaccaaaaaaatacgttcgtatacgccgatacaaactacgaaacaaacgaaaacgaaccgtcaaaccgacccaacaccgaccacccgcccccgacccgcgccgcgcgactcacccgcgaaaaaaaaattaacgaaaataatcaacaccaaacaaatcataataacgatacgaaaacgaaatccgcgaaacgaaacgataacgcccgaaacgaaacctacgcttaaaaaaacctaatcgaaacgctacgacctccgcgaaaaaactacttcacttacaccccgaaacccgacaaccgtaaaaaaccgaaaaacaactacgaaaaccaaatctcctccaacaactcgaa

SEQ ID NO: 18285 - DNA, 1278 bp, Artificial Sequence
  chemically treated genomic DNA (Homo sapiens) CpG-island No: 18285
tttgcgtcgtgtagtcgggtcgtattcgcgtgaggcgttagtagtacggttcgtcgtgttgttatagttaggatttgcgcgtgattaggcggtttaggtcgaagagcgggaggcggtcgagtagttgtaagaggcggttttcgcggcgtacgtcggtttaggttcggatcggtagtcggcgtttagagaacggtcgcgttaaggtttcgtagtttatcgcgtagagttgggagtcgcgcggtttgtttagttgttttcgtagggcgcgtacgcggcgggttagtttcgcgattagtcgcggacgtattttttttcgcgttatggcgggttcgcgtttttagcggttcggtcggaagttatcggaagaggtcggtgttttaggttaaagtgttcggtcgcggtcggaagcgaggaagaggtcggttcggttatggcgcgggttggattcgggagggcgggggttttttgttagggtcggggtcggggacggggcgggagcggttagcggcgatttttaatttgggagattttagatttcgacgttgaggatttcgtcggttcggaggtcgtcgcgagagttcgggatttagcgggtgagcgtagggcggttgtcgaggcgttgcggttgttgcggtcggagtaggtgttgaagcgtttcgcggtgtgcgtggatataggtgcggcggagggtacgggcgatattcggggtaggaaaggttttttttcgttaggcggcgttttttgttcgattgggcggggcgcgcgtgtcgaggggtttggggtcgggttcgttttttagtcgggggtttgtgtcgaatggagatttttcggttcggttattcgtttaggtagggcgttcgcgagggtggaaggaagtagtgatcgcgtttttttttttcggttttagttattttggaagacgtcggtgtcgacgttttgatggaggttttggaggttttgggttgcgagtgtcgtatcgagttttagcgttcggttcgtagtttgcggtggattcgagcgagtttcgatttttgttttcgtagcgtgagtggtcgcgggttttcgagggttagtcgcgagttggttgttttgtttttatgattttagttttggagttgtttttgaggtagttgttttgggtcgtgcgcgtttcgcggatgggtaaagtaaggatggagaacgggaagtggaggtgtttaagtcgttttgttggtatagagtcgagttggttggagaaggtttcgtttcgatttaggttgtggtttggatttttgtcgg

SEQ ID NO: 18286 - DNA, 1278 bp, Artificial Sequence
  chemically treated genomic DNA (Homo sapiens) CpG-island No: 18286
ccgacaaaaatccaaaccacaacctaaatcgaaacgaaaccttctccaaccaactcgactctataccaacaaaacgacttaaacacctccacttcccgttctccatccttactttacccatccgcgaaacgcgcacgacccaaaacaactacctcaaaaacaactccaaaactaaaatcataaaaacaaaacaaccaactcgcgactaaccctcgaaaacccgcgaccactcacgctacgaaaacaaaaatcgaaactcgctcgaatccaccgcaaactacgaaccgaacgctaaaactcgatacgacactcgcaacccaaaacctccaaaacctccatcaaaacgtcgacaccgacgtcttccaaaataactaaaaccgaaaaaaaaaaacgcgatcactacttccttccaccctcgcgaacgccctacctaaacgaataaccgaaccgaaaaatctccattcgacacaaacccccgactaaaaaacgaacccgaccccaaacccctcgacacgcgcgccccgcccaatcgaacaaaaaacgccgcctaacgaaaaaaaacctttcctaccccgaatatcgcccgtaccctccgccgcacctatatccacgcacaccgcgaaacgcttcaacacctactccgaccgcaacaaccgcaacgcctcgacaaccgccctacgctcacccgctaaatcccgaactctcgcgacgacctccgaaccgacgaaatcctcaacgtcgaaatctaaaatctcccaaattaaaaatcgccgctaaccgctcccgccccgtccccgaccccgaccctaacaaaaaacccccgccctcccgaatccaacccgcgccataaccgaaccgacctcttcctcgcttccgaccgcgaccgaacactttaacctaaaacaccgacctcttccgataacttccgaccgaaccgctaaaaacgcgaacccgccataacgcgaaaaaaaatacgtccgcgactaatcgcgaaactaacccgccgcgtacgcgccctacgaaaacaactaaacaaaccgcgcgactcccaactctacgcgataaactacgaaaccttaacgcgaccgttctctaaacgccgactaccgatccgaacctaaaccgacgtacgccgcgaaaaccgcctcttacaactactcgaccgcctcccgctcttcgacctaaaccgcctaatcacgcgcaaatcctaactataacaacacgacgaaccgtactactaacgcctcacgcgaatacgacccgactacacgacgcaaa

SEQ ID NO: 18287 - DNA, 1278 bp, Artificial Sequence
  chemically treated genomic DNA (Homo sapiens) CpG-island No: 18287
tcggtaggaatttagattatagtttgaatcgagacggaattttttttagttagttcggttttatattagtagaacggtttgggtatttttatttttcgttttttatttttgttttatttattcgcgagacgcgtacggtttagggtagttgttttagggatagttttagggttgaaattatggaagtaaaatagttaattcgcggttggttttcgggaattcgcgattatttacgttgcgggggtaggggtcgggattcgttcgggtttatcgtaggttgcgggtcgggcgttggggttcgatgcggtattcgtagtttagggtttttagggtttttattaggacgtcggtatcggcgttttttaggatggttgggatcgggggagaggagcgcggttattgtttttttttattttcgcgagcgttttatttgggcgggtggtcggatcggggagtttttattcggtataaattttcgattgggaggcgggttcggttttaggtttttcggtacgcgcgtttcgtttagtcggatagagggcgtcgtttggcggagaaaggttttttttatttcgagtatcgttcgtgtttttcgtcgtatttgtgtttacgtatatcgcgaggcgttttagtatttgtttcggtcgtagtagtcgtaacgtttcggtagtcgttttgcgtttattcgttgggtttcgggttttcgcggcggttttcgagtcggcggagtttttagcgtcggagtttgagattttttaggttggaggtcgtcgttgatcgttttcgtttcgttttcggtttcggttttggtaagagattttcgttttttcgggtttaattcgcgttatggtcggatcgatttttttttcgttttcggtcgcgatcgaatattttagtttgggatatcggtttttttcggtgattttcggtcggatcgttgaggacgcggattcgttatggcgcggaagaaggtgcgttcgcggttgatcgcggagttggttcgtcgcgtgcgcgttttgcgggagtaattgaataggtcgcgcgatttttagttttacgcggtggattacgagattttgacgcggtcgttttttggacgtcggttgtcggttcgggtttgggtcgacgtgcgtcgcgagagtcgttttttgtagttgttcggtcgtttttcgtttttcggtttgggtcgtttggttacgcgtaagttttggttgtggtagtacgacgagtcgtgttattggcgttttacgcgggtgcggttcgattatacggcgtagg

SEQ ID NO: 18288 - DNA, 1278 bp, Artificial Sequence
  chemically treated genomic DNA (Homo sapiens) CpG-island No: 18288
cctacgccgtataatcgaaccgcacccgcgtaaaacgccaataacacgactcgtcgtactaccacaaccaaaacttacgcgtaaccaaacgacccaaaccgaaaaacgaaaaacgaccgaacaactacaaaaaacgactctcgcgacgcacgtcgacccaaacccgaaccgacaaccgacgtccaaaaaacgaccgcgtcaaaatctcgtaatccaccgcgtaaaactaaaaatcgcgcgacctattcaattactcccgcaaaacgcgcacgcgacgaaccaactccgcgatcaaccgcgaacgcaccttcttccgcgccataacgaatccgcgtcctcaacgatccgaccgaaaatcaccgaaaaaaaccgatatcccaaactaaaatattcgatcgcgaccgaaaacgaaaaaaaaatcgatccgaccataacgcgaattaaacccgaaaaaacgaaaatctcttaccaaaaccgaaaccgaaaacgaaacgaaaacgatcaacgacgacctccaacctaaaaaatctcaaactccgacgctaaaaactccgccgactcgaaaaccgccgcgaaaacccgaaacccaacgaataaacgcaaaacgactaccgaaacgttacgactactacgaccgaaacaaatactaaaacgcctcgcgatatacgtaaacacaaatacgacgaaaaacacgaacgatactcgaaataaaaaaaacctttctccgccaaacgacgccctctatccgactaaacgaaacgcgcgtaccgaaaaacctaaaaccgaacccgcctcccaatcgaaaatttataccgaataaaaactccccgatccgaccacccgcccaaataaaacgctcgcgaaaataaaaaaaaacaataaccgcgctcctctcccccgatcccaaccatcctaaaaaacgccgataccgacgtcctaataaaaaccctaaaaaccctaaactacgaataccgcatcgaaccccaacgcccgacccgcaacctacgataaacccgaacgaatcccgacccctacccccgcaacgtaaataatcgcgaattcccgaaaaccaaccgcgaattaactattttacttccataatttcaaccctaaaactatccctaaaacaactaccctaaaccgtacgcgtctcgcgaataaataaaacaaaaataaaaaacgaaaaataaaaatacccaaaccgttctactaatataaaaccgaactaactaaaaaaaattccgtctcgattcaaactataatctaaattcctaccga

SEQ ID NO: 18289 - DNA, 829 bp, Artificial Sequence
  chemically treated genomic DNA (Homo sapiens) CpG-island No: 18289
tcgcgatatagttcggttttgtcgtgatatagtatatttaaggcgtcgcggtttttcggggttagggatacgcgaggataagttatagattgttcggaatttaggatagggcgggggagtcgtcgacgttagggaaattttcgtattacgcgggttgagtgtaggcgggttaggttaggacgtaggggtcggttttttttcgtttcgtttttttgtttttttttgtttcgtttcgtttcgtttttttgtttcgtttttttgttttttttcggggtatcgatttcgtttagttaggggacgtaggcggttcgagttcgcgttgggaagcggcgagcgttcggtagaggtaggtttcgagaaggcgacgttttcgtttcgtttcgggtttttgagaagttcgggtttatttcgcggttgttatattcggtttcgtgacgcgggggacgtatttggcggggggcgtatttaagggagggttcgtttttgatcgtcgagtaacgagattcgtattttggcggcgtacggttgttacgcgttggggtcgtcgttaatgttgatttacggttcgcggtcgtttcgcgtcgtcgtcggggatttaaattcggttcgcgtttcgtttttttcgcgttggtttcgtttcgtaacgtgattcggtttcgttttcgtcgtattggttacgtttttcgcgttgtttttttttaatttttttttcgattcgggcgtattcggttttcgcggtttttggttacgagttgggcgggtaagtgggcgcgggtagcgggggttagaggtttttaggtagaaagttttagagttgtttcgttgttcg

SEQ ID NO: 18290 - DNA, 829 bp, Artificial Sequence
  chemically treated genomic DNA (Homo sapiens) CpG-island No: 18290
cgaacaacgaaacaactctaaaactttctacctaaaaacctctaacccccgctacccgcgcccacttacccgcccaactcgtaaccaaaaaccgcgaaaaccgaatacgcccgaatcgaaaaaaaaattaaaaaaaaacaacgcgaaaaacgtaaccaatacgacgaaaacgaaaccgaatcacgttacgaaacgaaaccaacgcgaaaaaaacgaaacgcgaaccgaatttaaatccccgacgacgacgcgaaacgaccgcgaaccgtaaatcaacattaacgacgaccccaacgcgtaacaaccgtacgccgccaaaatacgaatctcgttactcgacgatcaaaaacgaaccctcccttaaatacgccccccgccaaatacgtcccccgcgtcacgaaaccgaatataacaaccgcgaaataaacccgaacttctcaaaaacccgaaacgaaacgaaaacgtcgccttctcgaaacctacctctaccgaacgctcgccgcttcccaacgcgaactcgaaccgcctacgtcccctaactaaacgaaatcgataccccgaaaaaaaacaaaaaaacgaaacaaaaaaacgaaacgaaacgaaacaaaaaaaaacaaaaaaacgaaacgaaaaaaaaccgacccctacgtcctaacctaacccgcctacactcaacccgcgtaatacgaaaatttccctaacgtcgacgactcccccgccctatcctaaattccgaacaatctataacttatcctcgcgtatccctaaccccgaaaaaccgcgacgccttaaatatactatatcacgacaaaaccgaactatatcgcga

SEQ ID NO: 18291 - DNA, 829 bp, Artificial Sequence
  chemically treated genomic DNA (Homo sapiens) CpG-island No: 18291
cgggtagcggggtagttttggggttttttgtttgaagatttttggttttcgttgttcgcgtttatttgttcgtttagttcgtagttaggagtcgcggggatcgggtgcgttcgagtcggggggaaggttgggggagggtagcgcggggggcgtggttagtgcgacgggggcggggtcgagttacgttgcggggcggggttagcgcggagggggcggggcgcgggtcgggtttgaattttcggcggcggcgcggggcggtcgcggatcgtgagttagtattggcggcggttttagcgcgtggtagtcgtgcgtcgttaaggtgcgggtttcgttattcggcggttaggagcgggtttttttttaggtgcgtttttcgttaggtgcgtttttcgcgttacggagtcgggtgtgatagtcgcggggtgggttcgggttttttagaggttcggagcgaggcgaaggcgtcgttttttcggaatttgtttttgtcgggcgttcgtcgttttttagcgcgggttcgggtcgtttgcgttttttagttaggcggggtcggtgtttcgagggagggtaggggagcggggtaggagagcggagcggagcggggtaggagagggtaggggaacggggcgggggagggtcgatttttgcgttttggtttggttcgtttgtatttagttcgcgtggtacgggaatttttttggcgtcggcggttttttcgttttgttttgagtttcgagtagtttgtagtttgttttcgcgtgtttttgatttcgggggatcgcggcgttttgaatgtgttgtgttacggtagagtcgggttgtgtcgcgg

SEQ ID NO: 18292 - DNA, 829 bp, Artificial Sequence
  chemically treated genomic DNA (Homo sapiens) CpG-island No: 18292
ccgcgacacaacccgactctaccgtaacacaacacattcaaaacgccgcgatcccccgaaatcaaaaacacgcgaaaacaaactacaaactactcgaaactcaaaacaaaacgaaaaaaccgccgacgccaaaaaaattcccgtaccacgcgaactaaatacaaacgaaccaaaccaaaacgcaaaaatcgaccctcccccgccccgttcccctaccctctcctaccccgctccgctccgctctcctaccccgctcccctaccctccctcgaaacaccgaccccgcctaactaaaaaacgcaaacgacccgaacccgcgctaaaaaacgacgaacgcccgacaaaaacaaattccgaaaaaacgacgccttcgcctcgctccgaacctctaaaaaacccgaacccaccccgcgactatcacacccgactccgtaacgcgaaaaacgcacctaacgaaaaacgcacctaaaaaaaaacccgctcctaaccgccgaataacgaaacccgcaccttaacgacgcacgactaccacgcgctaaaaccgccgccaatactaactcacgatccgcgaccgccccgcgccgccgccgaaaattcaaacccgacccgcgccccgccccctccgcgctaaccccgccccgcaacgtaactcgaccccgcccccgtcgcactaaccacgccccccgcgctaccctcccccaaccttccccccgactcgaacgcacccgatccccgcgactcctaactacgaactaaacgaacaaataaacgcgaacaacgaaaaccaaaaatcttcaaacaaaaaaccccaaaactaccccgctacccg

SEQ ID NO: 18293 - DNA, 1761 bp, Artificial Sequence
  chemically treated genomic DNA (Homo sapiens) CpG-island No: 18293
atttttgtatatagtcggggtataattaatttttgtatatagtcggcgtttaattaattattgtatatagtcggtatttaattaattatagtatatagtcgtcgtttaattaattatagtatatagtcggtatttaattaatttttgtatatagtcggcgtttaattaattatagtatatagtcggcgtttaattaatttttgtatatagtcggcgtttaattaatttttgtatatagtcggcgtttaataaattattgtatatagtcggcgtttaattaattatagtatatagtcggcgtttaattaattatagtatatagtcggcgtttaattaatttttgtatatagtcggcgtttaattaattatagtatatagtcggcgtttaattaattatagtatatagtcggcgtttaattaattatagtatatagtcggtatttaattaatttttgtatatagtcggcgtttaattaattatagtatatagtcggcgtttaattaatttttgtatatagtcggcgtttaattaatttttgtatatagtcggcgtttaataaattattgtatatagtcggcgtttaattaattatagtatatagtcggcgtttaattaatttttgtatatagtcggcgtttaattaatttttgtatatagtcggcgtttaattaatttttgtatatagtcggcgtttaattaattattgtatatagtcggcgtttaattaattatagtatatagtcggcgtttaattaatttttgtatatagtcggtgtttaataaattatagtatatagtcggcgtttaattaatttttgtatatagtcggcgtttaattaattatagtatatagtcggcgtttaattaattatagtatatagtcggcgtttaattaatttttgtatatagtcggcgtttaataaattattgtatatagtcggcgtttaattaatttttgtatatagttagcgtttaataaattattgtatatagtcggcgttgaagtttcgttgttcgtttattttattatatttatatttatttatatatatatatttatatttatttttatatatatatatatagatatatatatatacgcgcgcgcgcgttcggtgtttagtcgcggggttttttattcggttatagttcggcggtcggtttgattaggtggtcgttgaaggtgatgtagaggttttcgtgttcgtcgtagatggcgttgtttcggtcgcgttggaatatgcgtatttagacggcgtcgttcgtcgttagtagtagtattaggttttgggtttgtatgacgttgcgttcgttgggttgcgcgtagagtacggtcgcgggtcgtcggtttagtatgatgtgtaggtaggtttttttgtagttttaggtgtgtacgttgaggttgaggaagtagacgtcgggtatcgtgtagaggaagcggttcgcggttaggtcgaaggcgtcgtttaggtttattagtttcgtgtcgaagggtatcgtttggaagtggtcggagttgtgtaggttttcgcgtcggtttacggagaaggcggcgtaggtacgtcggtacgcggcgttcggcggttttatttgttttttttggtttttgcggttttgtaggtttcgggcgtttggcggtttttttttttcgtttttgtcggttcgatttcggacgtcggttttattttttttatttgtaggggataaacgaaagttacgggtcggggtcgggttgggtaggttttttttattttagtatt

SEQ ID NO: 18294 - DNA, 1761 bp, Artificial Sequence
  chemically treated genomic DNA (Homo sapiens) CpG-island No: 18294
aatactaaaataaaaaaaacctacccaacccgaccccgacccgtaactttcgtttatcccctacaaataaaaaaaataaaaccgacgtccgaaatcgaaccgacaaaaacgaaaaaaaaaaaccgccaaacgcccgaaacctacaaaaccgcaaaaaccaaaaaaaacaaataaaaccgccgaacgccgcgtaccgacgtacctacgccgccttctccgtaaaccgacgcgaaaacctacacaactccgaccacttccaaacgatacccttcgacacgaaactaataaacctaaacgacgccttcgacctaaccgcgaaccgcttcctctacacgatacccgacgtctacttcctcaacctcaacgtacacacctaaaactacaaaaaaacctacctacacatcatactaaaccgacgacccgcgaccgtactctacgcgcaacccaacgaacgcaacgtcatacaaacccaaaacctaatactactactaacgacgaacgacgccgtctaaatacgcatattccaacgcgaccgaaacaacgccatctacgacgaacacgaaaacctctacatcaccttcaacgaccacctaatcaaaccgaccgccgaactataaccgaataaaaaaccccgcgactaaacaccgaacgcgcgcgcgcgtatatatatatatctatatatatatatataaaaataaatataaatatatatatataaataaatataaatataataaaataaacgaacaacgaaacttcaacgccgactatatacaataatttattaaacgctaactatatacaaaaattaattaaacgccgactatatacaataatttattaaacgccgactatatacaaaaattaattaaacgccgactatatactataattaattaaacgccgactatatactataattaattaaacgccgactatatacaaaaattaattaaacgccgactatatactataatttattaaacaccgactatatacaaaaattaattaaacgccgactatatactataattaattaaacgccgactatatacaataattaattaaacgccgactatatacaaaaattaattaaacgccgactatatacaaaaattaattaaacgccgactatatacaaaaattaattaaacgccgactatatactataattaattaaacgccgactatatacaataatttattaaacgccgactatatacaaaaattaattaaacgccgactatatacaaaaattaattaaacgccgactatatactataattaattaaacgccgactatatacaaaaattaattaaataccgactatatactataattaattaaacgccgactatatactataattaattaaacgccgactatatactataattaattaaacgccgactatatacaaaaattaattaaacgccgactatatactataattaattaaacgccgactatatactataattaattaaacgccgactatatacaataatttattaaacgccgactatatacaaaaattaattaaacgccgactatatacaaaaattaattaaacgccgactatatactataattaattaaacgccgactatatacaaaaattaattaaataccgactatatactataattaattaaacgacgactatatactataattaattaaataccgactatatacaataattaattaaacgccgactatatacaaaaattaattataccccgactatatacaaaaat

SEQ ID NO: 18295 - DNA, 1761 bp, Artificial Sequence
  chemically treated genomic DNA (Homo sapiens) CpG-island No: 18295
ggtgttggaatgggggaggtttgtttagttcggtttcgattcgtggttttcgtttgttttttgtaggtgagaagggtgaggtcggcgttcgaggtcgggtcggtaggagcgggaaagaggggtcgttaggcgttcggggtttgtagggtcgtagaggttagaaggggtaggtggggtcgtcgggcgtcgcgtgtcgacgtgtttacgtcgtttttttcgtgggtcggcgcgagggtttgtatagtttcgattatttttaggcggtgtttttcgatacggagttggtgaatttggacggcgttttcgatttggtcgcgggtcgttttttttgtacggtgttcggcgtttatttttttagttttaacgtgtatatttggaattataaggagatttatttgtatattatgttgaatcggcggttcgcggtcgtgttttacgcgtagtttagcgagcgtagcgttatgtaggtttagagtttgatgttgttgttggcggcgggcgacgtcgtttgggtgcgtatgttttagcgcgatcgggataacgttatttacggcgagtacggagatttttatattatttttagcggttatttggttaagtcggtcgtcgagttgtagtcgggtgaggggtttcgcggttgagtatcgggcgcgcgcgcgcgtgtgtgtgtgtgtttgtgtgtgtgtgtgtgggggtgggtgtgggtgtgtgtgtgtgggtgggtgtgggtgtggtggggtgggcgggtagcggagttttagcgtcgattgtgtgtagtgatttgttgagcgttgattgtgtgtagggattggttgagcgtcgattgtgtgtagtgatttgttgagcgtcgattgtgtgtagggattggttgagcgtcgattgtgtgttgtgattggttgagcgtcgattgtgtgttgtgattggttgagcgtcgattgtgtgtagggattgattgagcgtcgattgtgtgttgtgatttgttgagtatcgattgtgtgtagggattggttgagcgtcgattgtgtgttgtgattggttgagcgtcgattgtgtgtagtgattggttgagcgtcgattgtgtgtagggattggttgagcgtcgattgtgtgtagggattgattgagcgtcgattgtgtgtagggattggttgagcgtcgattgtgtgttgtgattggttgagcgtcgattgtgtgtagtgatttgttgagcgtcgattgtgtgtagggattggttgagcgtcgattgtgtgtagggattgattgagcgtcgattgtgtgttgtgattggttgagcgtcgattgtgtgtagggattggttgagtgtcgattgtgtgttgtgattggttgagcgtcgattgtgtgttgtgattggttgagcgtcgattgtgtgttgtgattggttgagcgtcgattgtgtgtagggattggttgagcgtcgattgtgtgttgtgattggttgagcgtcgattgtgtgttgtgattggttgagcgtcgattgtgtgtagtgatttgttgagcgtcgattgtgtgtagggattggttgagcgtcgattgtgtgtagggattgattgagcgtcgattgtgtgttgtgattggttgagcgtcgattgtgtgtagggattggttgagtgtcgattgtgtgttgtgattggttgagcgacgattgtgtgttgtgattggttgagtgtcgattgtgtgtagtgattgattgagcgtcgattgtgtgtagggattggttgtgtttcgattgtgtgtagggat

SEQ ID NO: 18296 - DNA, 1761 bp, Artificial Sequence
  chemically treated genomic DNA (Homo sapiens) CpG-island No: 18296
atccctacacacaatcgaaacacaaccaatccctacacacaatcgacgctcaatcaatcactacacacaatcgacactcaaccaatcacaacacacaatcgtcgctcaaccaatcacaacacacaatcgacactcaaccaatccctacacacaatcgacgctcaaccaatcacaacacacaatcgacgctcaatcaatccctacacacaatcgacgctcaaccaatccctacacacaatcgacgctcaacaaatcactacacacaatcgacgctcaaccaatcacaacacacaatcgacgctcaaccaatcacaacacacaatcgacgctcaaccaatccctacacacaatcgacgctcaaccaatcacaacacacaatcgacgctcaaccaatcacaacacacaatcgacgctcaaccaatcacaacacacaatcgacactcaaccaatccctacacacaatcgacgctcaaccaatcacaacacacaatcgacgctcaatcaatccctacacacaatcgacgctcaaccaatccctacacacaatcgacgctcaacaaatcactacacacaatcgacgctcaaccaatcacaacacacaatcgacgctcaaccaatccctacacacaatcgacgctcaatcaatccctacacacaatcgacgctcaaccaatccctacacacaatcgacgctcaaccaatcactacacacaatcgacgctcaaccaatcacaacacacaatcgacgctcaaccaatccctacacacaatcgatactcaacaaatcacaacacacaatcgacgctcaatcaatccctacacacaatcgacgctcaaccaatcacaacacacaatcgacgctcaaccaatcacaacacacaatcgacgctcaaccaatccctacacacaatcgacgctcaacaaatcactacacacaatcgacgctcaaccaatccctacacacaatcaacgctcaacaaatcactacacacaatcgacgctaaaactccgctacccgcccaccccaccacacccacacccacccacacacacacacccacacccacccccacacacacacacacaaacacacacacacacgcgcgcgcgcgcccgatactcaaccgcgaaacccctcacccgactacaactcgacgaccgacttaaccaaataaccgctaaaaataatataaaaatctccgtactcgccgtaaataacgttatcccgatcgcgctaaaacatacgcacccaaacgacgtcgcccgccgccaacaacaacatcaaactctaaacctacataacgctacgctcgctaaactacgcgtaaaacacgaccgcgaaccgccgattcaacataatatacaaataaatctccttataattccaaatatacacgttaaaactaaaaaaataaacgccgaacaccgtacaaaaaaaacgacccgcgaccaaatcgaaaacgccgtccaaattcaccaactccgtatcgaaaaacaccgcctaaaaataatcgaaactatacaaaccctcgcgccgacccacgaaaaaaacgacgtaaacacgtcgacacgcgacgcccgacgaccccacctaccccttctaacctctacgaccctacaaaccccgaacgcctaacgacccctctttcccgctcctaccgacccgacctcgaacgccgacctcacccttctcacctacaaaaaacaaacgaaaaccacgaatcgaaaccgaactaaacaaacctcccccattccaacacc

SEQ ID NO: 18297 - DNA, 857 bp, Artificial Sequence
  chemically treated genomic DNA (Homo sapiens) CpG-island No: 18297
gtcgggtcgttagtgttttttgtaggaggggcgtgtaggtagcgggcgttttggagttattgttcgagttaggtacgttattaataatttcgttatttagtcgcgttcgagagcgtaggttcggatcgttgtcgggcgtttttagttttcgggtcggggtagagttcgagttcgattcggatcgcgacggttttttttttttttcgttacgtgatttcgtttttttttttatttagcgggtagtagagggttcggtttggcgggtcgggggttaggaaaaagtcgaaaatatcgaggtcgggtcgtttttttttcgtttaaaatagttttcggtcggggttgttacgtatttcgtcgggttcggggcgcgggaaggggcggtcggtttggttttcgttcggttagacgtggttattcggtcgggttggatcgggtgggggtcgagggcgggtcgcgcggtcggtcggtatgtggttttttttcggggagttttggtagttcgggttgcgcgttgcgcggggatgatggagagtttttggaattttttgtagttggagagcgcggtcggtcgggggagcgagttaagcgcgtagttcgggtaggggcgtttggcgttcgattttagggggcgttttcgcggcgagggtggtggggggagatttcgtcgttcggttttagattgcgggagtggagagagtatttttcgttttttcggttttttttttcgggtttggcgggggtttagtttcgtttttttcggtttgcgcggcggagaagggttaggtgtaggtaacgttttttttttagtcgtttggttttttttttcgttcgttattttttttaggagttagaaattt

SEQ ID NO: 18298 - DNA, 857 bp, Artificial Sequence
  chemically treated genomic DNA (Homo sapiens) CpG-island No: 18298
aaatttctaactcctaaaaaaaataacgaacgaaaaaaaaaaccaaacgactaaaaaaaaaacgttacctacacctaacccttctccgccgcgcaaaccgaaaaaaacgaaactaaacccccgccaaacccgaaaaaaaaaaccgaaaaaacgaaaaatactctctccactcccgcaatctaaaaccgaacgacgaaatctccccccaccaccctcgccgcgaaaacgccccctaaaatcgaacgccaaacgcccctacccgaactacgcgcttaactcgctcccccgaccgaccgcgctctccaactacaaaaaattccaaaaactctccatcatccccgcgcaacgcgcaacccgaactaccaaaactccccgaaaaaaaaccacataccgaccgaccgcgcgacccgccctcgacccccacccgatccaacccgaccgaataaccacgtctaaccgaacgaaaaccaaaccgaccgccccttcccgcgccccgaacccgacgaaatacgtaacaaccccgaccgaaaactattttaaacgaaaaaaaaacgacccgacctcgatattttcgactttttcctaacccccgacccgccaaaccgaaccctctactacccgctaaataaaaaaaaaaacgaaatcacgtaacgaaaaaaaaaaaaaaccgtcgcgatccgaatcgaactcgaactctaccccgacccgaaaactaaaaacgcccgacaacgatccgaacctacgctctcgaacgcgactaaataacgaaattattaataacgtacctaactcgaacaataactccaaaacgcccgctacctacacgcccctcctacaaaaaacactaacgacccgac

SEQ ID NO: 18299 - DNA, 857 bp, Artificial Sequence
  chemically treated genomic DNA (Homo sapiens) CpG-island No: 18299
gagtttttggtttttggaggaggtgacgggcggagagggaaattaggcggttgggggaggggcgttgtttgtatttggttttttttcgtcgcgtaagtcgggaggggcgggattggattttcgttagattcgaaaagagaggtcgaggaggcgaggggtgttttttttattttcgtagtttggggtcgggcggcgaggtttttttttattattttcgtcgcggaggcgttttttagggtcgggcgttaggcgtttttgttcgagttgcgcgtttagttcgttttttcggtcggtcgcgttttttagttgtaggaaattttagaagttttttattattttcgcgtagcgcgtagttcgggttgttaaggtttttcgaaggagagttatatgtcggtcggtcgcgcggttcgttttcggtttttattcggtttaattcggtcgggtagttacgtttggtcgggcgggggttaagtcggtcgttttttttcgcgtttcgggttcggcggaatgcgtggtagtttcgatcgggggttattttgagcgggaggggagcggttcggtttcggtgttttcggtttttttttggttttcggttcgttaggtcgggttttttgttgttcgttgaatgggagggggggcggggttacgtggcggggggaggggagggtcgtcgcgattcgggtcgggttcgggttttgtttcggttcggggattggaggcgttcggtagcggttcggatttgcgttttcggacgcggttgagtggcggggttattaatagcgtgtttggttcgggtagtggttttagggcgttcgttatttgtacgttttttttgtagagagtattggcggttcggt

SEQ ID NO: 18300 - DNA, 857 bp, Artificial Sequence
  chemically treated genomic DNA (Homo sapiens) CpG-island No: 18300
accgaaccgccaatactctctacaaaaaaaacgtacaaataacgaacgccctaaaaccactacccgaaccaaacacgctattaataaccccgccactcaaccgcgtccgaaaacgcaaatccgaaccgctaccgaacgcctccaatccccgaaccgaaacaaaacccgaacccgacccgaatcgcgacgaccctcccctccccccgccacgtaaccccgccccccctcccattcaacgaacaacaaaaaacccgacctaacgaaccgaaaaccaaaaaaaaaccgaaaacaccgaaaccgaaccgctcccctcccgctcaaaataacccccgatcgaaactaccacgcattccgccgaacccgaaacgcgaaaaaaaacgaccgacttaacccccgcccgaccaaacgtaactacccgaccgaattaaaccgaataaaaaccgaaaacgaaccgcgcgaccgaccgacatataactctccttcgaaaaaccttaacaacccgaactacgcgctacgcgaaaataataaaaaacttctaaaatttcctacaactaaaaaacgcgaccgaccgaaaaaacgaactaaacgcgcaactcgaacaaaaacgcctaacgcccgaccctaaaaaacgcctccgcgacgaaaataataaaaaaaaacctcgccgcccgaccccaaactacgaaaataaaaaaaacacccctcgcctcctcgacctctcttttcgaatctaacgaaaatccaatcccgcccctcccgacttacgcgacgaaaaaaaaccaaatacaaacaacgcccctcccccaaccgcctaatttccctctccgcccgtcacctcctccaaaaaccaaaaactc

SEQ ID NO: 18301 - DNA, 627 bp, Artificial Sequence
  chemically treated genomic DNA (Homo sapiens) CpG-island No: 18301
cgcgtttggaaagcgtttgcgtattttttttattgggggtggtgttaaagcgggaaggtgggcgtggttttagggaacgtttgcgcgttgttttttcgaaggggtggggcgatttttgaattggagttagtgggcgtggttttagaggcgtttgcgcggaggcggttggagggaggttcgatttttttttgttcgggttcgttattttgttaggtagcggtagtggcggcggtagcggcggttggagtttttgattgggtttcggagttcggtattggagttaattagcgcgggtagcgaatcgggggagcgaggtacggtgagtgtgaggagttaatatttagcggtttagagtcggttttagcgtttcgattggcgggtttcgttgattatttaggagaggtttaggcgttcgtcgagttcggggagtcgagttgagtttagtcgagtcgggcggttagcggtttcggttcggggtttgcgagcgtttcggggtattttcggtcgaggtttgtaggggtcgtttcgcgcggggatggcgtttcggggagtaggtatttcggggtttcgattttcgtagggtgttagggttagttgggaatgcgtttttgtttttcgatttaggtt

SEQ ID NO: 18302 - DNA, 627 bp, Artificial Sequence
  chemically treated genomic DNA (Homo sapiens) CpG-island No: 18302
aacctaaatcgaaaaacaaaaacgcattcccaactaaccctaacaccctacgaaaatcgaaaccccgaaatacctactccccgaaacgccatccccgcgcgaaacgacccctacaaacctcgaccgaaaataccccgaaacgctcgcaaaccccgaaccgaaaccgctaaccgcccgactcgactaaactcaactcgactccccgaactcgacgaacgcctaaacctctcctaaataatcaacgaaacccgccaatcgaaacgctaaaaccgactctaaaccgctaaatattaactcctcacactcaccgtacctcgctcccccgattcgctacccgcgctaattaactccaataccgaactccgaaacccaatcaaaaactccaaccgccgctaccgccgccactaccgctacctaacaaaataacgaacccgaacaaaaaaaaatcgaacctccctccaaccgcctccgcgcaaacgcctctaaaaccacgcccactaactccaattcaaaaatcgccccaccccttcgaaaaaacaacgcgcaaacgttccctaaaaccacgcccaccttcccgctttaacaccacccccaataaaaaaaatacgcaaacgctttccaaacgcg

SEQ ID NO: 18303 - DNA, 627 bp, Artificial Sequence
  chemically treated genomic DNA (Homo sapiens) CpG-island No: 18303
ggtttgagtcggggaatagggacgtatttttaattggttttggtattttgcgagggtcggagtttcgaggtgtttgtttttcgaggcgttattttcgcgcggggcggtttttgtaggtttcggtcgggagtgtttcgaggcgttcgtaggtttcgggtcggggtcgttggtcgttcggttcggttaggtttagttcgatttttcgggttcgacgggcgtttgggttttttttgagtggttagcgagattcgttaatcggggcgttggggtcggttttgggtcgttggatattggttttttatatttatcgtgtttcgttttttcggttcgttgttcgcgttgattggttttagtatcggatttcgaaatttaattagaggttttagtcgtcgttgtcgtcgttattgtcgttgtttagtaaaatggcgaattcgaataaaggggaatcgggtttttttttaatcgttttcgcgtaggcgtttttgaggttacgtttattaattttagtttagggatcgttttattttttcggaggagtaacgcgtaggcgttttttgaagttacgtttattttttcgttttgatattatttttagtgaaaggaatacgtaggcgttttttagacgcg

SEQ ID NO: 18304 - DNA, 627 bp, Artificial Sequence
  chemically treated genomic DNA (Homo sapiens) CpG-island No: 18304
cgcgtctaaaaaacgcctacgtattcctttcactaaaaataatatcaaaacgaaaaaataaacgtaacttcaaaaaacgcctacgcgttactcctccgaaaaaataaaacgatccctaaactaaaattaataaacgtaacctcaaaaacgcctacgcgaaaacgattaaaaaaaaacccgattcccctttattcgaattcgccattttactaaacaacgacaataacgacgacaacgacgactaaaacctctaattaaatttcgaaatccgatactaaaaccaatcaacgcgaacaacgaaccgaaaaaacgaaacacgataaatataaaaaaccaatatccaacgacccaaaaccgaccccaacgccccgattaacgaatctcgctaaccactcaaaaaaaacccaaacgcccgtcgaacccgaaaaatcgaactaaacctaaccgaaccgaacgaccaacgaccccgacccgaaacctacgaacgcctcgaaacactcccgaccgaaacctacaaaaaccgccccgcgcgaaaataacgcctcgaaaaacaaacacctcgaaactccgaccctcgcaaaataccaaaaccaattaaaaatacgtccctattccccgactcaaacc

SEQ ID NO: 18305 - DNA, 709 bp, Artificial Sequence
  chemically treated genomic DNA (Homo sapiens) CpG-island No: 18305
ttacgcgcgcgcgtatacgcgcgtattcggttttttttttcgttttatatatatatatatatatatacgtatatatatatatatacggattatacgttttaatttgggagggagtcgggcgggttgcggagatagcgtagggttagtagtggagaaaatttagcggttagaggcgtttaggaattcggcggtcgtgcgtatcgttttcgtcgagtttttcggcgcggtagtttttagtggcgaatcgcggagttgtaggagtcgaaggtagtttttgcgttcgttgttttgttcgttgtcgagcgtattcgttttcgagacgattaatatcgtcgcggaaattagagggatttacggttttggtaggggtggcgcggggacgtacggtggggcgggagtgggttggggtcgtagtcgcggagggaggtgggtaggtcgcgagtttcggaatcgggagggcggttttcgcggtttagcggtacgggtagtttttgcggaaggcgagtcgggcggttagggttgtatttttgtagttggcgacggcgttgttattttacgtgtttagcgcgttttgtagtcgttagttcgtcgtttgttggaggaaaattcgatcgcgtcggttttaggttgggagtgggggttggggcgatcgcgtttatttagttttggggtttagtttagattttcgaattttggtaagggatttatg

SEQ ID NO: 18306 - DNA, 709 bp, Artificial Sequence
  chemically treated genomic DNA (Homo sapiens) CpG-island No: 18306
cataaatcccttaccaaaattcgaaaatctaaactaaaccccaaaactaaataaacgcgatcgccccaacccccactcccaacctaaaaccgacgcgatcgaattttcctccaacaaacgacgaactaacgactacaaaacgcgctaaacacgtaaaataacaacgccgtcgccaactacaaaaatacaaccctaaccgcccgactcgccttccgcaaaaactacccgtaccgctaaaccgcgaaaaccgccctcccgattccgaaactcgcgacctacccacctccctccgcgactacgaccccaacccactcccgccccaccgtacgtccccgcgccacccctaccaaaaccgtaaatccctctaatttccgcgacgatattaatcgtctcgaaaacgaatacgctcgacaacgaacaaaacaacgaacgcaaaaactaccttcgactcctacaactccgcgattcgccactaaaaactaccgcgccgaaaaactcgacgaaaacgatacgcacgaccgccgaattcctaaacgcctctaaccgctaaattttctccactactaaccctacgctatctccgcaacccgcccgactccctcccaaattaaaacgtataatccgtatatatatatatatacgtatatatatatatatatatataaaacgaaaaaaaaaaccgaatacgcgcgtatacgcgcgcgcgtaa

SEQ ID NO: 18307 - DNA, 709 bp, Artificial Sequence
  chemically treated genomic DNA (Homo sapiens) CpG-island No: 18307
tataggttttttattaggattcgagaatttgaattgggttttaggattgggtgggcgcgatcgttttagtttttatttttagtttagggtcggcgcggtcgggtttttttttagtaggcggcgggttgacggttgtagggcgcgttaggtacgtgaggtggtagcgtcgtcgttagttgtagaggtgtagttttggtcgttcggttcgtttttcgtaggggttgttcgtgtcgttggatcgcggagatcgttttttcggtttcggggttcgcggtttgtttattttttttcgcgattgcggttttagtttattttcgttttatcgtgcgttttcgcgttatttttgttaggatcgtgaatttttttggttttcgcggcggtgttggtcgtttcggaagcgggtgcgttcggtagcgggtagggtagcgggcgtagaggttgttttcggtttttgtagtttcgcggttcgttattgggggttgtcgcgtcggagagttcggcggggacggtgcgtacggtcgtcgggtttttgggcgtttttggtcgttgggttttttttattgttggttttgcgttgttttcgtagttcgttcgatttttttttagattggagcgtgtgattcgtgtgtgtgtgtgtgtgcgtgtgtgtgtgtgtgtgtgtgtggagcggagagagaaatcgggtacgcgcgtatgcgcgcgcgcgtgg

SEQ ID NO: 18308 - DNA, 709 bp, Artificial Sequence
  chemically treated genomic DNA (Homo sapiens) CpG-island No: 18308
ccacgcgcgcgcgcatacgcgcgtacccgatttctctctccgctccacacacacacacacacacacacgcacacacacacacacacgaatcacacgctccaatctaaaaaaaaatcgaacgaactacgaaaacaacgcaaaaccaacaataaaaaaaacccaacgaccaaaaacgcccaaaaacccgacgaccgtacgcaccgtccccgccgaactctccgacgcgacaacccccaataacgaaccgcgaaactacaaaaaccgaaaacaacctctacgcccgctaccctacccgctaccgaacgcacccgcttccgaaacgaccaacaccgccgcgaaaaccaaaaaaattcacgatcctaacaaaaataacgcgaaaacgcacgataaaacgaaaataaactaaaaccgcaatcgcgaaaaaaaataaacaaaccgcgaaccccgaaaccgaaaaaacgatctccgcgatccaacgacacgaacaacccctacgaaaaacgaaccgaacgaccaaaactacacctctacaactaacgacgacgctaccacctcacgtacctaacgcgccctacaaccgtcaacccgccgcctactaaaaaaaaacccgaccgcgccgaccctaaactaaaaataaaaactaaaacgatcgcgcccacccaatcctaaaacccaattcaaattctcgaatcctaataaaaaacctata

SEQ ID NO: 18309 - DNA, 657 bp, Artificial Sequence
  chemically treated genomic DNA (Homo sapiens) CpG-island No: 18309
gcggtcgttcgtttcgggcgcgagacggatatttagtcgttcgtagaaggcggttgtcgttttatttcgcgggggcgttttcgggtcgtagtcggcggagggagggttttgttcgtttcggtttttcggcggcggtttttggcgtttaggtgatagattttgggttcgacgtatcgcgcggaggcgaaggtagaagatcgagagtaggcgggacggttttcggttcggcggtttcgtttttttcgttgttttttttttcgtttcgatgcggcggcggcggattttacggtcgcgttgtcgcggcggttttcgtttttttttgtcggtttggtgtattggtttttttttatttgtgattaaaatttgcgtcgtcgcggagtatgtttagtttttgcgttcgttagttcgtcgtttttgggcgcgattttgcgttttaggttttatagattacgggcgaaggcggggagaggaggcggtgtagcggcggaggcgtggtttgaagttcggtgggaatcgcgggggtttaggaggcgtgtgtaagggtgattgggtcgtagttgaggggagtagttcgcgagaagggggcgtgcggtcggtttcgttttacgtaaacgcgatatattaaaatgtatttttttttttaattagaagagataa

SEQ ID NO: 18310 - DNA, 657 bp, Artificial Sequence
  chemically treated genomic DNA (Homo sapiens) CpG-island No: 18310
ttatctcttctaattaaaaaaaaaaatacattttaatatatcgcgtttacgtaaaacgaaaccgaccgcacgcccccttctcgcgaactactcccctcaactacgacccaatcacccttacacacgcctcctaaacccccgcgattcccaccgaacttcaaaccacgcctccgccgctacaccgcctcctctccccgccttcgcccgtaatctataaaacctaaaacgcaaaatcgcgcccaaaaacgacgaactaacgaacgcaaaaactaaacatactccgcgacgacgcaaattttaatcacaaataaaaaaaaaccaatacaccaaaccgacaaaaaaaaacgaaaaccgccgcgacaacgcgaccgtaaaatccgccgccgccgcatcgaaacgaaaaaaaaaacaacgaaaaaaacgaaaccgccgaaccgaaaaccgtcccgcctactctcgatcttctaccttcgcctccgcgcgatacgtcgaacccaaaatctatcacctaaacgccaaaaaccgccgccgaaaaaccgaaacgaacaaaaccctccctccgccgactacgacccgaaaacgcccccgcgaaataaaacgacaaccgccttctacgaacgactaaatatccgtctcgcgcccgaaacgaacgaccgc

SEQ ID NO: 18311 - DNA, 657 bp, Artificial Sequence
  chemically treated genomic DNA (Homo sapiens) CpG-island No: 18311
ttattttttttgattaggaaaaaaaatgtattttgatatgtcgcgtttgcgtaaagcgaggtcgatcgtacgtttttttttcgcgagttgttttttttaattgcgatttaattatttttgtatacgttttttgagttttcgcggtttttatcgggttttaggttacgttttcgtcgttgtatcgtttttttttttcgttttcgttcgtagtttataaaatttggagcgtaggatcgcgtttaggagcggcgagttagcggacgtaaagattgggtatgtttcgcggcggcgtaggttttggttataagtaggaagaagttagtgtattagatcggtaaagagaagcgggagtcgtcgcggtagcgcggtcgtggggttcgtcgtcgtcgtatcggagcgggaggaggagtagcggggagggcgaggtcgtcgggtcgagagtcgtttcgtttgttttcggttttttgttttcgttttcgcgcggtgcgtcggatttagggtttgttatttgggcgttaggggtcgtcgtcggggagtcggagcgggtaggatttttttttcgtcgattgcggttcgagagcgttttcgcggggtggagcggtagtcgttttttgcgggcggttgagtgttcgtttcgcgttcggagcgggcgatcgt

SEQ ID NO: 18312 - DNA, 657 bp, Artificial Sequence
  chemically treated genomic DNA (Homo sapiens) CpG-island No: 18312
acgatcgcccgctccgaacgcgaaacgaacactcaaccgcccgcaaaaaacgactaccgctccaccccgcgaaaacgctctcgaaccgcaatcgacgaaaaaaaaatcctacccgctccgactccccgacgacgacccctaacgcccaaataacaaaccctaaatccgacgcaccgcgcgaaaacgaaaacaaaaaaccgaaaacaaacgaaacgactctcgacccgacgacctcgccctccccgctactcctcctcccgctccgatacgacgacgacgaaccccacgaccgcgctaccgcgacgactcccgcttctctttaccgatctaatacactaacttcttcctacttataaccaaaacctacgccgccgcgaaacatacccaatctttacgtccgctaactcgccgctcctaaacgcgatcctacgctccaaattttataaactacgaacgaaaacgaaaaaaaaaaacgatacaacgacgaaaacgtaacctaaaacccgataaaaaccgcgaaaactcaaaaaacgtatacaaaaataattaaatcgcaattaaaaaaaacaactcgcgaaaaaaaaacgtacgatcgacctcgctttacgcaaacgcgacatatcaaaatacattttttttcctaatcaaaaaaaataa

SEQ ID NO: 18313 - DNA, 591 bp, Artificial Sequence
  chemically treated genomic DNA (Homo sapiens) CpG-island No: 18313
agggattgcgttttcgtttttaggatcgttaatattttcgtttcgtttagtgggttttcgttttcgttttatttgaggatttcggagaggttgtattacggtttagtcgtcgttttgggtcgcgttttttcggcggttggttcggagggggtttaagttgagtaaatttttttttcgattcgtcggggttttgttatcgttttcgggagacgtggaagggaagcgaggattttataatagagtggttttcgagttgtttgtacggtagggagacgcgaatagttatttgtaggcgatttaggcggtggcgttggcggttacggggttttcgcgtatggttacgtttttttttcgttcgcggcgagaataggcgcggcgtatggtttgcgtgcgtgtgacgtggttcgtcgtcggtggacggttcgtacgtcgtgaaaggttatatttataaagggcggggttttattgcgggttacgtgggtgattaaaggcggtgtttagtttggaaggaacgcgaggtttgagttgggcggggtttgagattcgggtggatcggttagatttcgtgtttttttttttttttattatttt

SEQ ID NO: 18314 - DNA, 591 bp, Artificial Sequence
  chemically treated genomic DNA (Homo sapiens) CpG-island No: 18314
aaaataataaaaaaaaaaaaaaacacgaaatctaaccgatccacccgaatctcaaaccccgcccaactcaaacctcgcgttccttccaaactaaacaccgcctttaatcacccacgtaacccgcaataaaaccccgccctttataaatataacctttcacgacgtacgaaccgtccaccgacgacgaaccacgtcacacgcacgcaaaccatacgccgcgcctattctcgccgcgaacgaaaaaaaaacgtaaccatacgcgaaaaccccgtaaccgccaacgccaccgcctaaatcgcctacaaataactattcgcgtctccctaccgtacaaacaactcgaaaaccactctattataaaatcctcgcttcccttccacgtctcccgaaaacgataacaaaaccccgacgaatcgaaaaaaaaatttactcaacttaaaccccctccgaaccaaccgccgaaaaaacgcgacccaaaacgacgactaaaccgtaatacaacctctccgaaatcctcaaataaaacgaaaacgaaaacccactaaacgaaacgaaaatattaacgatcctaaaaacgaaaacgcaatccct

SEQ ID NO: 18315 - DNA, 591 bp, Artificial Sequence
  chemically treated genomic DNA (Homo sapiens) CpG-island No: 18315
gagatggtgaggaaagggagaaatacgaggtttagtcggtttattcgggttttaagtttcgtttaatttaggtttcgcgttttttttaggttgggtatcgtttttggttatttacgtggttcgtagtaaggtttcgttttttgtgggtgtggttttttacggcgtgcgggtcgtttatcggcggcgagttacgttatacgtacgtaggttatgcgtcgcgtttgttttcgtcgcgggcggaaaaggggcgtggttatgcgcgaggatttcgtagtcgttagcgttatcgtttgagtcgtttgtaggtggttgttcgcgtttttttgtcgtgtaggtagttcgaaagttattttgttgtggggttttcgttttttttttacgtttttcggaagcggtagtagggtttcggcgggtcggggaggaggtttatttagtttgggtttttttcgggttagtcgtcgagggggcgcggtttaggacggcggttaggtcgtagtgtagttttttcggagtttttaggtgaggcggaggcgagggtttattggacgagacgggggtgttaacggttttaggagcgggggcgtagttttt

SEQ ID NO: 18316 - DNA, 591 bp, Artificial Sequence
  chemically treated genomic DNA (Homo sapiens) CpG-island No: 18316
aaaaactacgcccccgctcctaaaaccgttaacacccccgtctcgtccaataaaccctcgcctccgcctcacctaaaaactccgaaaaaactacactacgacctaaccgccgtcctaaaccgcgccccctcgacgactaacccgaaaaaaacccaaactaaataaacctcctccccgacccgccgaaaccctactaccgcttccgaaaaacgtaaaaaaaaaacgaaaaccccacaacaaaataactttcgaactacctacacgacaaaaaaacgcgaacaaccacctacaaacgactcaaacgataacgctaacgactacgaaatcctcgcgcataaccacgccccttttccgcccgcgacgaaaacaaacgcgacgcataacctacgtacgtataacgtaactcgccgccgataaacgacccgcacgccgtaaaaaaccacacccacaaaaaacgaaaccttactacgaaccacgtaaataaccaaaaacgatacccaacctaaaaaaaacgcgaaacctaaattaaacgaaacttaaaacccgaataaaccgactaaacctcgtatttctccctttcctcaccatctc

SEQ ID NO: 18317 - DNA, 778 bp, Artificial Sequence
  chemically treated genomic DNA (Homo sapiens) CpG-island No: 18317
cgtttggtggcgttttttgttcgtagtttcgcgtcgttttaggtgagttttgcgcgttttttattttggggttcgcgggaggggttggagcgtaggcggagggtcggtcggggtaggggaggatcgggattcgggtttcgattgtagttttttcgcggtggggtcgtatttttaggtattttcgtcgtttttgttcgcgcgcggcgagcggtttttgggcgtgtcgttcggaggcgcggagtttgttcggcgcgttttagttttgtagattcggtttcggcggaggcggtcggatcgcggagatgcggggagggggtagggcgcggggtaggtgattttatttcgtttttgtttttttgtttcggggagtaatgatattacgcggttttttttaggcgtcgatataaagagcggggcggagaggtagttgcggggggagtcggcggtcgttgttgtcgtttagggttttggggtttcgtcggttaggttcgtcgttcgcggttagtgttttttttttttttttttttttgtcgtcgtttttttagtcgtcgtcgtttttttagtcgtcgtcgttcgcgtcgttcgcgtttttcgcgcgtttttgagttcgcgtcgggtcgcgtcggtttttttttatgcgggcggcgcgggttttgggaggggcgttcggagttagtcgcgtagtatgtattggggggttggttttgtttcgtttaggtcgtgcgtggtggatttgagttggaattagagtattttttttttcggttggtgggtcggg

SEQ ID NO: 18318 - DNA, 778 bp, Artificial Sequence
  chemically treated genomic DNA (Homo sapiens) CpG-island No: 18318
cccgacccaccaaccgaaaaaaaaaatactctaattccaactcaaatccaccacgcacgacctaaacgaaacaaaaccaaccccccaatacatactacgcgactaactccgaacgcccctcccaaaacccgcgccgcccgcataaaaaaaaaccgacgcgacccgacgcgaactcaaaaacgcgcgaaaaacgcgaacgacgcgaacgacgacgactaaaaaaacgacgacgactaaaaaaacgacgacaaaaaaaaaaaaaaaaaaaaaacactaaccgcgaacgacgaacctaaccgacgaaaccccaaaaccctaaacgacaacaacgaccgccgactccccccgcaactacctctccgccccgctctttatatcgacgcctaaaaaaaaccgcgtaatatcattactccccgaaacaaaaaaacaaaaacgaaataaaatcacctaccccgcgccctaccccctccccgcatctccgcgatccgaccgcctccgccgaaaccgaatctacaaaactaaaacgcgccgaacaaactccgcgcctccgaacgacacgcccaaaaaccgctcgccgcgcgcgaacaaaaacgacgaaaatacctaaaaatacgaccccaccgcgaaaaaactacaatcgaaacccgaatcccgatcctcccctaccccgaccgaccctccgcctacgctccaacccctcccgcgaaccccaaaataaaaaacgcgcaaaactcacctaaaacgacgcgaaactacgaacaaaaaacgccaccaaacg

SEQ ID NO: 18319 - DNA, 778 bp, Artificial Sequence
  chemically treated genomic DNA (Homo sapiens) CpG-island No: 18319
ttcggtttattagtcgaagaaggagatgttttggttttagtttagatttattacgtacggtttggacgaagtaaagttaattttttagtgtatgttgcgcggttggtttcgggcgttttttttagggttcgcgtcgttcgtatgggaaggggtcggcgcggttcggcgcgggtttagaggcgcgcggagggcgcgggcggcgcgggcggcggcgattgaggaggcggcggcgattgaggaggcggcggtagaggaggaggaggaggaagggtattggtcgcggacggcgggtttggtcggcggggttttagagttttgggcggtagtagcggtcgtcggtttttttcgtagttgttttttcgtttcgttttttgtgtcggcgtttggagaaggtcgcgtgatgttattgtttttcggggtagggaaatagaggcgggataaagttatttatttcgcgttttgtttttttttcgtattttcgcggttcggtcgttttcgtcggggtcggatttgtagggttgaggcgcgtcgggtaggtttcgcgttttcgggcggtacgtttaaaaatcgttcgtcgcgcgcgggtaagggcggcggaggtgtttggaaatgcggttttatcgcgaggaagttgtagtcggggttcggatttcggtttttttttatttcggtcggtttttcgtttgcgttttagtttttttcgcgggttttagagtagggaacgcgtaggatttatttggggcggcgcggagttgcgggtaggagacgttattaggcg

SEQ ID NO: 18320 - DNA, 778 bp, Artificial Sequence
  chemically treated genomic DNA (Homo sapiens) CpG-island No: 18320
cgcctaataacgtctcctacccgcaactccgcgccgccccaaataaatcctacgcgttccctactctaaaacccgcgaaaaaaactaaaacgcaaacgaaaaaccgaccgaaataaaaaaaaaccgaaatccgaaccccgactacaacttcctcgcgataaaaccgcatttccaaacacctccgccgcccttacccgcgcgcgacgaacgatttttaaacgtaccgcccgaaaacgcgaaacctacccgacgcgcctcaaccctacaaatccgaccccgacgaaaacgaccgaaccgcgaaaatacgaaaaaaaaacaaaacgcgaaataaataactttatcccgcctctatttccctaccccgaaaaacaataacatcacgcgaccttctccaaacgccgacacaaaaaacgaaacgaaaaaacaactacgaaaaaaaccgacgaccgctactaccgcccaaaactctaaaaccccgccgaccaaacccgccgtccgcgaccaatacccttcctcctcctcctcctctaccgccgcctcctcaatcgccgccgcctcctcaatcgccgccgcccgcgccgcccgcgccctccgcgcgcctctaaacccgcgccgaaccgcgccgaccccttcccatacgaacgacgcgaaccctaaaaaaaacgcccgaaaccaaccgcgcaacatacactaaaaaattaactttacttcgtccaaaccgtacgtaataaatctaaactaaaaccaaaacatctccttcttcgactaataaaccgaa

SEQ ID NO: 18321 - DNA, 1032 bp, Artificial Sequence
  chemically treated genomic DNA (Homo sapiens) CpG-island No: 18321
cggacggaaggttcgtagggttaacggaagcggagagaataggataaaaaggaaaggtcggagagtttttttagcggcgttcggtgttcgtagattttcgtataggtttttcgaatttattcgggtttcgtcgattttaaagaaagcgcgtttttttcgagagcgttttttcggttttttcgtcgcgcgtttcggttcgtagggcgggaggatttaggcggatagatttattttttcgcgtttggtgtgggtacggtgtcgtgtttcgcggcgtttgttagcgcgtataggtgggatcgtagtatagagaacgttttcgagcgttttgttttagtttcggcgtggggcgagtcgttcgcgttcgtattcgtattttttttttcgcgttcgaggagtcgggttgtatttcggagtcggcggagttggaggtcgcgggcggagcgcgggttgtttcggtagttttttttcggtattaggttcgagatttaacggtagttttttttgatcgtttttcggtcgcgcgttcgcgcgggtgttatggtcgagcggcggttttcgacgaagtttttcggagttgacggttttattttttagtttaaggggcggtagtagttttgagtagtagtaaggcggcggcggcggagggagcgcgggtggtagtcggcgtagaggcggatgtagaaggagatatcggtggttaggattcgcgcgatgggaagaggaaggcgtcggttatttataattagaacgtgggttgatcgtgacgttataatggcgcggttagttaatcgggattcgaaggatgaattaagcgttatgatgttatgcggttcgggagttaatcgcgggataatagaattttcgtgatcgtaaattttagaattcgatgcggtggagagtttaggtcggggttggtttttcggttttacgtgtttttgggaaattttttttttttttttttttaataagtttgcgtggaacgtagagtttgcgtaatagtttcggtgaagttgtcgatgttttgaattttgg

SEQ ID NO: 18322 - DNA, 1032 bp, Artificial Sequence
  chemically treated genomic DNA (Homo sapiens) CpG-island No: 18322
ccaaaattcaaaacatcgacaacttcaccgaaactattacgcaaactctacgttccacgcaaacttattaaaaaaaaaaaaaaaaaaaatttcccaaaaacacgtaaaaccgaaaaaccaaccccgacctaaactctccaccgcatcgaattctaaaatttacgatcacgaaaattctattatcccgcgattaactcccgaaccgcataacatcataacgcttaattcatccttcgaatcccgattaactaaccgcgccattataacgtcacgatcaacccacgttctaattataaataaccgacgccttcctcttcccatcgcgcgaatcctaaccaccgatatctccttctacatccgcctctacgccgactaccacccgcgctccctccgccgccgccgccttactactactcaaaactactaccgccccttaaactaaaaaataaaaccgtcaactccgaaaaacttcgtcgaaaaccgccgctcgaccataacacccgcgcgaacgcgcgaccgaaaaacgatcaaaaaaaactaccgttaaatctcgaacctaataccgaaaaaaaactaccgaaacaacccgcgctccgcccgcgacctccaactccgccgactccgaaatacaacccgactcctcgaacgcgaaaaaaaaaatacgaatacgaacgcgaacgactcgccccacgccgaaactaaaacaaaacgctcgaaaacgttctctatactacgatcccacctatacgcgctaacaaacgccgcgaaacacgacaccgtacccacaccaaacgcgaaaaaataaatctatccgcctaaatcctcccgccctacgaaccgaaacgcgcgacgaaaaaaccgaaaaaacgctctcgaaaaaaacgcgctttctttaaaatcgacgaaacccgaataaattcgaaaaacctatacgaaaatctacgaacaccgaacgccgctaaaaaaactctccgacctttcctttttatcctattctctccgcttccgttaaccctacgaaccttccgtccg

SEQ ID NO: 18323 - DNA, 1032 bp, Artificial Sequence
  chemically treated genomic DNA (Homo sapiens) CpG-island No: 18323
ttagagtttagggtatcgataattttatcggggttattgcgtaggttttgcgttttacgtaggtttattaggaagaaaggggaaaaaaattttttagagatacgtggaatcgaggggttaatttcggtttaggttttttatcgtatcggattttggaatttacgattacgaaagttttattgtttcgcgattggttttcgggtcgtatgatattatagcgtttgatttatttttcgggtttcgattggttggtcgcgttattgtgacgttacggttagtttacgttttgattgtagatagtcggcgtttttttttttttatcgcgcgggttttagttatcggtgtttttttttatattcgtttttgcgtcggttgttattcgcgtttttttcgtcgtcgtcgttttgttgttgtttaaagttgttgtcgttttttgggttaaaaggtaaagtcgttagtttcgggaaatttcgtcgggggtcgtcgttcggttatgatattcgcgcgagcgcgcggtcgggaagcggttagagagaattgtcgttaggtttcggatttggtgtcgagaaagagttgtcggggtaattcgcgtttcgttcgcggtttttagtttcgtcggtttcggggtatagttcggtttttcgggcgcggggaaaggggtgcgggtgcgggcgcgggcggttcgttttacgtcgaggttgaggtagggcgttcgggagcgttttttgtgttgcggttttatttgtgcgcgttgataggcgtcgcggggtacgatatcgtgtttatattagacgcggagggatggatttgttcgtttgggttttttcgttttgcgggtcggagcgcgcggcgggagagtcgggggagcgttttcggagggagcgcgttttttttggagtcggcgaaattcgggtgagttcgaagagtttgtgcgagggtttgcgggtatcgggcgtcgttggggggatttttcggttttttttttttgttttgtttttttcgttttcgttaattttgcggatttttcgttcg

SEQ ID NO: 18324 - DNA, 1032 bp, Artificial Sequence
  chemically treated genomic DNA (Homo sapiens) CpG-island No: 18324
cgaacgaaaaatccgcaaaattaacgaaaacgaaaaaaacaaaacaaaaaaaaaaaaccgaaaaatccccccaacgacgcccgatacccgcaaaccctcgcacaaactcttcgaactcacccgaatttcgccgactccaaaaaaaacgcgctccctccgaaaacgctcccccgactctcccgccgcgcgctccgacccgcaaaacgaaaaaacccaaacgaacaaatccatccctccgcgtctaatataaacacgatatcgtaccccgcgacgcctatcaacgcgcacaaataaaaccgcaacacaaaaaacgctcccgaacgccctacctcaacctcgacgtaaaacgaaccgcccgcgcccgcacccgcacccctttccccgcgcccgaaaaaccgaactataccccgaaaccgacgaaactaaaaaccgcgaacgaaacgcgaattaccccgacaactctttctcgacaccaaatccgaaacctaacgacaattctctctaaccgcttcccgaccgcgcgctcgcgcgaatatcataaccgaacgacgacccccgacgaaatttcccgaaactaacgactttaccttttaacccaaaaaacgacaacaactttaaacaacaacaaaacgacgacgacgaaaaaaacgcgaataacaaccgacgcaaaaacgaatataaaaaaaaacaccgataactaaaacccgcgcgataaaaaaaaaaaaacgccgactatctacaatcaaaacgtaaactaaccgtaacgtcacaataacgcgaccaaccaatcgaaacccgaaaaataaatcaaacgctataatatcatacgacccgaaaaccaatcgcgaaacaataaaactttcgtaatcgtaaattccaaaatccgatacgataaaaaacctaaaccgaaattaacccctcgattccacgtatctctaaaaaatttttttcccctttcttcctaataaacctacgtaaaacgcaaaacctacgcaataaccccgataaaattatcgataccctaaactctaa

SEQ ID NO: 18325 - DNA, 621 bp, Artificial Sequence
  chemically treated genomic DNA (Homo sapiens) CpG-island No: 18325
cgttcgggataggagggtaagtgtaggcgatgggggagggggttgtgtttcgaggattttttgtgggaatttacgaaggcgtacggagttttagtttcggttttcgttgtacgttcggtttgttagttttggatattttaaattttggcggtcgggacggtcgagtggattgtattgcgagttggcgggcgcgcgtagaggttttaggttgtaagcgtttcgcggggtgggtagacgcgattcgtcgatgcgttcgtcgggttcgggtatagggggcgttttttttttggtttcgttttgtagcgggcgtttttcgtcgtcggagtttagggtagttgtcgcgttcgtcggtggttaagacggaggcggtagttcggaggtttaggttattcgcgtttggttatacgttttattttttttcgcgtttttttgttatatttttcgttttattatatataagggtttaaatttttcgagcgttttttgtttggaggcgcggaggtagtgggagtcgttattttcggggttcgtgtagtttaggcgggtagtgaggatgagcgtgttattttggattgcgcgttggtttgttgtttttgtatttaatttagcgtttgatattaa

SEQ ID NO: 18326 - DNA, 621 bp, Artificial Sequence
  chemically treated genomic DNA (Homo sapiens) CpG-island No: 18326
ttaatatcaaacgctaaattaaatacaaaaacaacaaaccaacgcgcaatccaaaataacacgctcatcctcactacccgcctaaactacacgaaccccgaaaataacgactcccactacctccgcgcctccaaacaaaaaacgctcgaaaaatttaaacccttatatataataaaacgaaaaatataacaaaaaaacgcgaaaaaaaataaaacgtataaccaaacgcgaataacctaaacctccgaactaccgcctccgtcttaaccaccgacgaacgcgacaactaccctaaactccgacgacgaaaaacgcccgctacaaaacgaaaccaaaaaaaaaacgccccctatacccgaacccgacgaacgcatcgacgaatcgcgtctacccaccccgcgaaacgcttacaacctaaaacctctacgcgcgcccgccaactcgcaatacaatccactcgaccgtcccgaccgccaaaatttaaaatatccaaaactaacaaaccgaacgtacaacgaaaaccgaaactaaaactccgtacgccttcgtaaattcccacaaaaaatcctcgaaacacaaccccctcccccatcgcctacacttaccctcctatcccgaacg

SEQ ID NO: 18327 - DNA, 621 bp, Artificial Sequence
  chemically treated genomic DNA (Homo sapiens) CpG-island No: 18327
ttagtgttaggcgttgggttaggtgtagaggtagtaggttagcgcgtagtttagagtagtacgtttatttttattgttcgtttaggttatacgaatttcggaggtggcggtttttattgttttcgcgtttttaaataaagggcgttcggagagtttgagtttttgtgtgtggtggggcggagggtgtggtaggagggcgcgggaagaaatgaggcgtgtagttagacgcgggtggtttaagttttcgagttgtcgttttcgttttagttatcggcgggcgcgatagttgttttgagtttcggcggcgaggggcgttcgttgtaaagcgaaattaaggaaagggcgttttttatgttcgagttcggcgagcgtatcggcgagtcgcgtttgtttatttcgcggagcgtttgtagtttagggtttttgcgcgcgttcgttagttcgtagtgtagtttattcggtcgtttcggtcgttaggatttagggtgtttagggttggtaggtcgggcgtgtagcgagggtcggggttgaggtttcgtgcgttttcgtgggtttttatagagggttttcgaaatatagtttttttttttatcgtttatatttgtttttttgtttcgagcg

SEQ ID NO: 18328 - DNA, 621 bp, Artificial Sequence
  chemically treated genomic DNA (Homo sapiens) CpG-island No: 18328
cgctcgaaacaaaaaaacaaatataaacgataaaaaaaaaaactatatttcgaaaaccctctataaaaacccacgaaaacgcacgaaacctcaaccccgaccctcgctacacgcccgacctaccaaccctaaacaccctaaatcctaacgaccgaaacgaccgaataaactacactacgaactaacgaacgcgcgcaaaaaccctaaactacaaacgctccgcgaaataaacaaacgcgactcgccgatacgctcgccgaactcgaacataaaaaacgccctttccttaatttcgctttacaacgaacgcccctcgccgccgaaactcaaaacaactatcgcgcccgccgataactaaaacgaaaacgacaactcgaaaacttaaaccacccgcgtctaactacacgcctcatttcttcccgcgccctcctaccacaccctccgccccaccacacacaaaaactcaaactctccgaacgccctttatttaaaaacgcgaaaacaataaaaaccgccacctccgaaattcgtataacctaaacgaacaataaaaataaacgtactactctaaactacgcgctaacctactacctctacacctaacccaacgcctaacactaa

SEQ ID NO: 18329 - DNA, 1056 bp, Artificial Sequence
  chemically treated genomic DNA (Homo sapiens) CpG-island No: 18329
tttcgtttaacgagtgtttcgttaaggtgtcgcgcgacgataagaagtcgggtaagggtagttattggacgttggattcggatttttataatatgttcgagaacggtagttttttgcggcggcggcggcgttttaagaagaaggacgcggtgaaggataaggaggagaaggataggttgtattttaaggagtcgttttcgttcggtcgttagttttcgttcgcgtcgtcggagtaggtcgacggtaacgcgttcggttcgtagtcgtcgttcgtgcgtatttaggatattaagatcgagaacggtacgtgtttttcgtcgttttagtttttgttttcggtcgtcgttttgggtagcggtagcgtcgtcgcggtgtttaagatcgagagtttcgatagtagtagtagtagtttgtttagcgggagtagtttttcgggtagtttgtcgtcggcgcggtcgtttagtttggacggtgcggatttcgcgtcgtcgtcgttcgcgtttttcgtttcgtcgtcgtattatagttagggttttagcgtggataatattatgacgtcgttgcgggggtcgtcgtagagcgcggtcgcggagtttagtttcggttttttggtttcggcggtcgcgttttcgcgcgcggggatcgtattttcgttggcgttcggcgtttattcgttcggttagagttttttttatagttttttttgtagttagatttttagcgcgggtagttcgggcggcggcggcggcgcgggggtcgcggggggcgcgggcggcgtcgggatttattattgtaatttgtaagttatgagtttgtacgcggtcggcgagcgcgggggttatttgtagggcgcgttcgggggcgcgggcggttcggtcgtggacgattttttgttcgattattttttgttttcggttattagtagtagttcgtcgtttttgagttacggcggcggcggcggcggcggcgggggaggttaggaggtcggttattattttgcggtttattaaggtcgttttatttcgtggtatttgaattaggcgggcggagatttgg

SEQ ID NO: 18330 - DNA, 1056 bp, Artificial Sequence
  chemically treated genomic DNA (Homo sapiens) CpG-island No: 18330
ccaaatctccgcccgcctaattcaaataccacgaaataaaacgaccttaataaaccgcaaaataataaccgacctcctaacctcccccgccgccgccgccgccgccgccgtaactcaaaaacgacgaactactactaataaccgaaaacaaaaaataatcgaacaaaaaatcgtccacgaccgaaccgcccgcgcccccgaacgcgccctacaaataacccccgcgctcgccgaccgcgtacaaactcataacttacaaattacaataataaatcccgacgccgcccgcgccccccgcgacccccgcgccgccgccgccgcccgaactacccgcgctaaaaatctaactacaaaaaaaactataaaaaaaactctaaccgaacgaataaacgccgaacgccaacgaaaatacgatccccgcgcgcgaaaacgcgaccgccgaaaccaaaaaaccgaaactaaactccgcgaccgcgctctacgacgacccccgcaacgacgtcataatattatccacgctaaaaccctaactataatacgacgacgaaacgaaaaacgcgaacgacgacgacgcgaaatccgcaccgtccaaactaaacgaccgcgccgacgacaaactacccgaaaaactactcccgctaaacaaactactactactactatcgaaactctcgatcttaaacaccgcgacgacgctaccgctacccaaaacgacgaccgaaaacaaaaactaaaacgacgaaaaacacgtaccgttctcgatcttaatatcctaaatacgcacgaacgacgactacgaaccgaacgcgttaccgtcgacctactccgacgacgcgaacgaaaactaacgaccgaacgaaaacgactccttaaaatacaacctatccttctcctccttatccttcaccgcgtccttcttcttaaaacgccgccgccgccgcaaaaaactaccgttctcgaacatattataaaaatccgaatccaacgtccaataactacccttacccgacttcttatcgtcgcgcgacaccttaacgaaacactcgttaaacgaaa

SEQ ID NO: 18331 - DNA, 1056 bp, Artificial Sequence
  chemically treated genomic DNA (Homo sapiens) CpG-island No: 18331
ttaggttttcgttcgtttggtttaggtattacgaggtgaggcggttttggtgggtcgtagggtggtggtcggttttttggtttttttcgtcgtcgtcgtcgtcgtcgtcgtgatttagggacgacgagttgttgttggtgatcggaggtagagagtagtcgggtagggggtcgtttacggtcgagtcgttcgcgttttcgggcgcgttttgtaagtggttttcgcgttcgtcggtcgcgtataggtttatggtttgtaggttgtagtggtaggtttcggcgtcgttcgcgtttttcgcggttttcgcgtcgtcgtcgtcgttcgagttgttcgcgttggaggtttggttgtagggggagttgtagagggagttttggtcgggcgagtaggcgtcgagcgttagcgggggtgcgattttcgcgcgcgaggacgcggtcgtcgaggttagaaggtcggagttgagtttcgcggtcgcgttttgcggcgattttcgtagcgacgttatgatgttgtttacgttgaagttttggttatggtgcggcggcggggcggagggcgcgggcggcggcggcgcggaattcgtatcgtttaggttgagcggtcgcgtcgacggtaggttgttcggggggttgttttcgttggataggttgttgttgttgttgtcggggttttcgattttgggtatcgcggcggcgttgtcgttgtttagggcggcggtcggggataggggttggggcggcgaggggtacgtatcgttttcggttttgatgttttggatgcgtacgggcggcggttgcggatcgggcgcgttgtcgtcggtttgtttcggcggcgcgggcgggggttggcggtcgggcgggggcggttttttgaggtgtagtttgttttttttttttttgttttttatcgcgtttttttttttgaagcgtcgtcgtcgtcgtaggaagttgtcgttttcgaatatgttgtaggagttcgggtttagcgtttagtagttgtttttgttcggttttttgtcgtcgcgcggtattttgacgaagtattcgttgagcgaga

SEQ ID NO: 18332 - DNA, 1056 bp, Artificial Sequence
  chemically treated genomic DNA (Homo sapiens) CpG-island No: 18332
tctcgctcaacgaatacttcgtcaaaataccgcgcgacgacaaaaaaccgaacaaaaacaactactaaacgctaaacccgaactcctacaacatattcgaaaacgacaacttcctacgacgacgacgacgcttcaaaaaaaaaaacgcgataaaaaacaaaaaaaaaaaaaacaaactacacctcaaaaaaccgcccccgcccgaccgccaacccccgcccgcgccgccgaaacaaaccgacgacaacgcgcccgatccgcaaccgccgcccgtacgcatccaaaacatcaaaaccgaaaacgatacgtacccctcgccgccccaacccctatccccgaccgccgccctaaacaacgacaacgccgccgcgatacccaaaatcgaaaaccccgacaacaacaacaacaacctatccaacgaaaacaaccccccgaacaacctaccgtcgacgcgaccgctcaacctaaacgatacgaattccgcgccgccgccgcccgcgccctccgccccgccgccgcaccataaccaaaacttcaacgtaaacaacatcataacgtcgctacgaaaatcgccgcaaaacgcgaccgcgaaactcaactccgaccttctaacctcgacgaccgcgtcctcgcgcgcgaaaatcgcacccccgctaacgctcgacgcctactcgcccgaccaaaactccctctacaactccccctacaaccaaacctccaacgcgaacaactcgaacgacgacgacgacgcgaaaaccgcgaaaaacgcgaacgacgccgaaacctaccactacaacctacaaaccataaacctatacgcgaccgacgaacgcgaaaaccacttacaaaacgcgcccgaaaacgcgaacgactcgaccgtaaacgaccccctacccgactactctctacctccgatcaccaacaacaactcgtcgtccctaaatcacgacgacgacgacgacgacgacgaaaaaaaccaaaaaaccgaccaccaccctacgacccaccaaaaccgcctcacctcgtaatacctaaaccaaacgaacgaaaacctaa

SEQ ID NO: 18333 - DNA, 834 bp, Artificial Sequence
  chemically treated genomic DNA (Homo sapiens) CpG-island No: 18333
gttagtttcgttgggtttttcgcgggttgggtcggggtgtcgggaagcgcgcgttgagggagggtggtaggcgcgcggtgtcggggacggggacggggcggggggcgtcgagtcgggagaagcgttttcggggtttcggtcgagaagttcggaggagttcgttttttcgttcggttatttcgcgttttcgtttggcgtcgtagggtttcgtcgagtttttatttttttttcgttggttttttttgttgtgaagacgtacgtgtgtttaggagcgtagttggggtggaaaggttagaggtattttattgtttacgggtgatagttcgtttcgcgtcggttcgtagtttttaggcgcgggattcggagttgcgcgtttgtagggttattttcggtttattcgtttcggtttggtcgtattagatttgttcgggtcggcgttgcggttttaggcggttttttcggtagggttgcgttttcgcgcggtgtgtgaggtttgtagaggttattagtcgtttggtagtggtcgtgcggggagtcgttcggttttaaggatgttagaagttttcgggcgagttgtaggtttagcgtgtttcgagtttacgtgtttgcgattttttattttttttgggtttcggttttgcggttcggaggaggtggcggtcgtagttagtttcggtttaggtttaggtcggtagtggaaagttcggcgggtttttttgtatcgtttttagcggcgggagcgagttgggaaagagtcgattcgttttcggttgggggttttgtcgagtttggtttgtcgaggagtgggtcgagagtagtttttgtttttttttg

SEQ ID NO: 18334 - DNA, 834 bp, Artificial Sequence
  chemically treated genomic DNA (Homo sapiens) CpG-island No: 18334
caaaaaaaaacaaaaactactctcgacccactcctcgacaaaccaaactcgacaaaacccccaaccgaaaacgaatcgactctttcccaactcgctcccgccgctaaaaacgatacaaaaaaacccgccgaactttccactaccgacctaaacctaaaccgaaactaactacgaccgccacctcctccgaaccgcaaaaccgaaacccaaaaaaaataaaaaatcgcaaacacgtaaactcgaaacacgctaaacctacaactcgcccgaaaacttctaacatccttaaaaccgaacgactccccgcacgaccactaccaaacgactaataacctctacaaacctcacacaccgcgcgaaaacgcaaccctaccgaaaaaaccgcctaaaaccgcaacgccgacccgaacaaatctaatacgaccaaaccgaaacgaataaaccgaaaataaccctacaaacgcgcaactccgaatcccgcgcctaaaaactacgaaccgacgcgaaacgaactatcacccgtaaacaataaaatacctctaacctttccaccccaactacgctcctaaacacacgtacgtcttcacaacaaaaaaaaccaacgaaaaaaaaataaaaactcgacgaaaccctacgacgccaaacgaaaacgcgaaataaccgaacgaaaaaacgaactcctccgaacttctcgaccgaaaccccgaaaacgcttctcccgactcgacgccccccgccccgtccccgtccccgacaccgcgcgcctaccaccctccctcaacgcgcgcttcccgacaccccgacccaacccgcgaaaaacccaacgaaactaac

SEQ ID NO: 18335 - DNA, 834 bp, Artificial Sequence
  chemically treated genomic DNA (Homo sapiens) CpG-island No: 18335
taaggaaggataggggttgttttcggtttatttttcggtaggttagattcggtagggtttttagtcgggagcgggtcgatttttttttagttcgttttcgtcgttgggaacggtgtagaaaagttcgtcgagttttttattgtcgatttgggtttaggtcggggttgattgcggtcgttatttttttcgggtcgtaaagtcgagatttaaggagagtggagagtcgtaggtacgtgggttcggaatacgttgagtttgtagttcgttcgagggtttttggtatttttgaggtcgagcgatttttcgtacggttattgttaagcgattggtggtttttgtaaattttatatatcgcgcgaggacgtagttttgtcggggaggtcgtttggggtcgtagcgtcggttcgggtaggtttggtgcggttaggtcgaggcgggtgggtcgggggtggttttgtaaacgcgtagtttcgggtttcgcgtttggaggttgcgggtcggcgcggggcgagttgttattcgtgagtaatgaagtgtttttgatttttttattttagttgcgtttttaaatatacgtgcgtttttataataaaggaggttagcgaggaggaagtgagagttcggcggggttttgcggcgttaggcggagacgcggggtgatcgggcgagggagcgggttttttcgagtttttcggtcggagtttcgagggcgtttttttcggttcggcgtttttcgtttcgttttcgttttcggtatcgcgcgtttgttatttttttttagcgcgcgtttttcggtatttcgatttagttcgcgaggaatttagcgaaattaat

SEQ ID NO: 18336 - DNA, 834 bp, Artificial Sequence
  chemically treated genomic DNA (Homo sapiens) CpG-island No: 18336
attaatttcgctaaattcctcgcgaactaaatcgaaataccgaaaaacgcgcgctaaaaaaaaataacaaacgcgcgataccgaaaacgaaaacgaaacgaaaaacgccgaaccgaaaaaaacgccctcgaaactccgaccgaaaaactcgaaaaaacccgctccctcgcccgatcaccccgcgtctccgcctaacgccgcaaaaccccgccgaactctcacttcctcctcgctaacctcctttattataaaaacgcacgtatatttaaaaacgcaactaaaataaaaaaatcaaaaacacttcattactcacgaataacaactcgccccgcgccgacccgcaacctccaaacgcgaaacccgaaactacgcgtttacaaaaccacccccgacccacccgcctcgacctaaccgcaccaaacctacccgaaccgacgctacgaccccaaacgacctccccgacaaaactacgtcctcgcgcgatatataaaatttacaaaaaccaccaatcgcttaacaataaccgtacgaaaaatcgctcgacctcaaaaataccaaaaaccctcgaacgaactacaaactcaacgtattccgaacccacgtacctacgactctccactctccttaaatctcgactttacgacccgaaaaaaataacgaccgcaatcaaccccgacctaaacccaaatcgacaataaaaaactcgacgaacttttctacaccgttcccaacgacgaaaacgaactaaaaaaaaatcgacccgctcccgactaaaaaccctaccgaatctaacctaccgaaaaataaaccgaaaacaacccctatccttcctta

SEQ ID NO: 18337 - DNA, 500 bp, Artificial Sequence
  chemically treated genomic DNA (Homo sapiens) CpG-island No: 18337
tacgtttttttgttcgcggttcgttattttcgttcgggtttcgggttgtgtagtttttttttaggtttgttcgggtttatgtttttttcgaagcggcgggagtcggtgtagttttaatttttattgcgtgttttaggtcgttaattagttttgttcgcgtgtcgttggttcggaggttgtcgcgttagtttttgcgtgcgtttgagcgcgttggagtatttgcgaggttagggttgtcgacggcgagaggatattttgaggaatacggtgttttagtttcgttttcgtttttcgttcgagttggaggttggggcgcgttgagtcgtagcgtttggataagtgcgcgggtcggagtcgtttaggtttgtattcgggggttcgcggtcgacgtatgcgtacgcgcggtggcgggtttgtaggttcgaaggttcggttttttttttaaattcggagcggggaagtttaggggttgagagtttcggttcgggtcgtaggagttg

SEQ ID NO: 18338 - DNA, 500 bp, Artificial Sequence
  chemically treated genomic DNA (Homo sapiens) CpG-island No: 18338
caactcctacgacccgaaccgaaactctcaacccctaaacttccccgctccgaatttaaaaaaaaaaccgaaccttcgaacctacaaacccgccaccgcgcgtacgcatacgtcgaccgcgaacccccgaatacaaacctaaacgactccgacccgcgcacttatccaaacgctacgactcaacgcgccccaacctccaactcgaacgaaaaacgaaaacgaaactaaaacaccgtattcctcaaaatatcctctcgccgtcgacaaccctaacctcgcaaatactccaacgcgctcaaacgcacgcaaaaactaacgcgacaacctccgaaccaacgacacgcgaacaaaactaattaacgacctaaaacacgcaataaaaattaaaactacaccgactcccgccgcttcgaaaaaaacataaacccgaacaaacctaaaaaaaaactacacaacccgaaacccgaacgaaaataacgaaccgcgaacaaaaaaacgta

SEQ ID NO: 18339 - DNA, 500 bp, Artificial Sequence
  chemically treated genomic DNA (Homo sapiens) CpG-island No: 18339
tagtttttgcgattcgggtcgaggtttttagtttttgggttttttcgtttcgggtttgagggaggggtcgggttttcgggtttgtagattcgttatcgcgcgtgcgtatgcgtcggtcgcgagttttcgggtgtaggtttgggcggtttcggttcgcgtatttgtttaggcgttgcggtttagcgcgttttaatttttagttcgggcggagagcgggggcgggattgaagtatcgtgttttttaaagtattttttcgtcgtcggtagttttggtttcgtaaatgttttagcgcgtttaggcgtacgtagagattggcgcggtagttttcgggttaacggtacgcgagtaaagttggttggcgatttgggatacgtagtagaagttgaggttgtatcgattttcgtcgtttcgggggaggtatgggttcgggtaggtttaggaggaagttgtatagttcgaggttcgggcgggagtggcgggtcgcgggtaagggaacgta

SEQ ID NO: 18340 - DNA, 500 bp, Artificial Sequence
  chemically treated genomic DNA (Homo sapiens) CpG-island No: 18340
tacgttcccttacccgcgacccgccactcccgcccgaacctcgaactatacaacttcctcctaaacctacccgaacccatacctcccccgaaacgacgaaaatcgatacaacctcaacttctactacgtatcccaaatcgccaaccaactttactcgcgtaccgttaacccgaaaactaccgcgccaatctctacgtacgcctaaacgcgctaaaacatttacgaaaccaaaactaccgacgacgaaaaaatactttaaaaaacacgatacttcaatcccgcccccgctctccgcccgaactaaaaattaaaacgcgctaaaccgcaacgcctaaacaaatacgcgaaccgaaaccgcccaaacctacacccgaaaactcgcgaccgacgcatacgcacgcgcgataacgaatctacaaacccgaaaacccgacccctccctcaaacccgaaacgaaaaaacccaaaaactaaaaacctcgacccgaatcgcaaaaacta

SEQ ID NO: 18341 - DNA, 692 bp, Artificial Sequence
  chemically treated genomic DNA (Homo sapiens) CpG-island No: 18341
cgtcgtcgtagtcgtatttatgtcgagtttgggagaagttttaagtagttttgtaaagagttgtcggggggatcgtcgcgaaatttacgacggaggagcgggtcgggtttcgcggggtgaggacggtgagaggatagtcgttcgttcgtttttttttttttttcgcggtcgttaaattattttaggggcgaaagcgtcgttagcgtcgtcggtcggtcgcggcggtagttttttatgttcggcggaggttgtttttgttagttaagagttattttgttcggggagggacgggggcggagtcgggggtgacgtcgtttcgcgggtttcgggcgtttttgaggaatgcgggttcgggcgcggcgtcgttatcgttttttgtcggagagacgcgcgttagtttcggtcgcgcgtttcgcgtcgtttttgttcgtagtttgggtttcgtcgttagtcgttgttcggagggagcgagcgagaaaggggagtcggcgtagttcgttgttttgttttagaatttagaatttgagaggcgagagttcggtaagtcgtgcgattagacgatcgaggacgcgcgtagagaaattttcgtcgttcgaggagaggcgttttggggtttcgttttaaggtggaggttttttcgagcggttgttgattgaaaggggagtgtggaagcgttttgaggaaatattcgt

SEQ ID NO: 18342 - DNA, 692 bp, Artificial Sequence
  chemically treated genomic DNA (Homo sapiens) CpG-island No: 18342
acgaatatttcctcaaaacgcttccacactcccctttcaatcaacaaccgctcgaaaaaacctccaccttaaaacgaaaccccaaaacgcctctcctcgaacgacgaaaatttctctacgcgcgtcctcgatcgtctaatcgcacgacttaccgaactctcgcctctcaaattctaaattctaaaacaaaacaacgaactacgccgactcccctttctcgctcgctccctccgaacaacgactaacgacgaaacccaaactacgaacaaaaacgacgcgaaacgcgcgaccgaaactaacgcgcgtctctccgacaaaaaacgataacgacgccgcgcccgaacccgcattcctcaaaaacgcccgaaacccgcgaaacgacgtcacccccgactccgcccccgtccctccccgaacaaaataactcttaactaacaaaaacaacctccgccgaacataaaaaactaccgccgcgaccgaccgacgacgctaacgacgctttcgcccctaaaataatttaacgaccgcgaaaaaaaaaaaaaaacgaacgaacgactatcctctcaccgtcctcaccccgcgaaacccgacccgctcctccgtcgtaaatttcgcgacgatccccccgacaactctttacaaaactacttaaaacttctcccaaactcgacataaatacgactacgacgacg

SEQ ID NO: 18343 - DNA, 692 bp, Artificial Sequence
  chemically treated genomic DNA (Homo sapiens) CpG-island No: 18343
gcgggtgtttttttagggcgtttttatattttttttttaattagtaatcgttcggggggatttttattttgggacggaattttaggacgttttttttcggacggcgggggtttttttgcgcgcgttttcggtcgtttggtcgtacggtttatcgaattttcgttttttaaattttgagttttggaatagggtagcgagttgcgtcggtttttttttttcgttcgtttttttcgagtagcggttggcggcggggtttaggttgcgaataaaggcggcgcggggcgcgcggtcggggttggcgcgcgttttttcggtaggaggcggtggcggcgtcgcgttcgagttcgtattttttagaagcgttcggagttcgcggggcgacgttattttcggtttcgttttcgttttttttcgagtaaagtaatttttgattaataggagtagttttcgtcgagtatggagagttgtcgtcgcggtcggtcggcgacgttggcgacgttttcgtttttgaggtagtttggcgatcgcgaagaaggaaaaagggcgggcgggcggttgtttttttatcgtttttatttcgcgaggttcggttcgttttttcgtcgtggatttcgcggcgattttttcggtagttttttgtaaagttgtttgaaattttttttaaattcggtatggatacgattgcggcggcg

SEQ ID NO: 18344 - DNA, 692 bp, Artificial Sequence
  chemically treated genomic DNA (Homo sapiens) CpG-island No: 18344
cgccgccgcaatcgtatccataccgaatttaaaaaaaatttcaaacaactttacaaaaaactaccgaaaaaatcgccgcgaaatccacgacgaaaaaacgaaccgaacctcgcgaaataaaaacgataaaaaaacaaccgcccgcccgccctttttccttcttcgcgatcgccaaactacctcaaaaacgaaaacgtcgccaacgtcgccgaccgaccgcgacgacaactctccatactcgacgaaaactactcctattaatcaaaaattactttactcgaaaaaaaacgaaaacgaaaccgaaaataacgtcgccccgcgaactccgaacgcttctaaaaaatacgaactcgaacgcgacgccgccaccgcctcctaccgaaaaaacgcgcgccaaccccgaccgcgcgccccgcgccgcctttattcgcaacctaaaccccgccgccaaccgctactcgaaaaaaacgaacgaaaaaaaaaaaccgacgcaactcgctaccctattccaaaactcaaaatttaaaaaacgaaaattcgataaaccgtacgaccaaacgaccgaaaacgcgcgcaaaaaaacccccgccgtccgaaaaaaaacgtcctaaaattccgtcccaaaataaaaatccccccgaacgattactaattaaaaaaaaaatataaaaacgccctaaaaaaacacccgc

SEQ ID NO: 18345 - DNA, 1117 bp, Artificial Sequence
  chemically treated genomic DNA (Homo sapiens) CpG-island No: 18345
cgggtaatttcgcgagcgtaggttgcgggacgaggatttttatgttcgtcgttttcgaattttcgttcgtttttgcggtttcggtgttgcggggacgtatttcgggcgttcgggtgtatggtttcggttagtcgaggggtcgcgcgacgattatagtcggcgtggagaaggcggcgggcgtcggtatttcgcggcgtttttaggttcgggttgcgtcgtcggggagggtttcgttttttatattttaatggggagaagttcgcgagcgatcggtcggtttttttttttattttagagatttcgcgtcgcggcgatttttttcgcgttttttacgttttcgttttcgcgtcggggagtcgtttggatttcggcgttcggcgcggggttttttgagggaacggagcgttgcgtggttttttttatttttttagcgcgttaggttttttatttcggaggagcggcggttgtttcgcggcgttttttcgcgtatgttcgtttcggttggtttagcgtcgcgggtttaggggttcggatatcgcgtaggcgttttttgttggttcgcgttttcgttagtattttgtttcgtatcggatcgtcgtcgtcgcggttgtcgtcgtcgtttttatatatagtataggtcgtcgggtcgtgaggtcgtcgcgtttcgtttcgttttttttcgtagttaattagggcgcgcgtcgtttaaaggggcgatgtcgtggtcgaggcgttgcgtcgggtttatcgtggcgtatcgcggcgttgtagggagtcggttttgtttttcggagaggcgttttcgggttgatcgcggtcgtagtttcgtttttttgtttgagtcgtgcggtagttttgggagttttttaacgtcgagttttttttagaagttcgcggcgattcgggtttcggtcgttgtttttgttcgaattgagggtatatcgcgtttcgcgcgggattttttataaatttaggtttcgggtaagattgtgtgttttttttttttcgcgggtcgtcgttggtcgtgtgggtcgaagaagttttggagggggagaggggagtcgttttcgattgggtttgcggcgtgggagggatagtgagggatatttagggattg

SEQ ID NO: 18346 - DNA, 1117 bp, Artificial Sequence
  chemically treated genomic DNA (Homo sapiens) CpG-island No: 18346
caatccctaaatatccctcactatccctcccacgccgcaaacccaatcgaaaacgactcccctctccccctccaaaacttcttcgacccacacgaccaacgacgacccgcgaaaaaaaaaaaacacacaatcttacccgaaacctaaatttataaaaaatcccgcgcgaaacgcgatataccctcaattcgaacaaaaacaacgaccgaaacccgaatcgccgcgaacttctaaaaaaaactcgacgttaaaaaactcccaaaactaccgcacgactcaaacaaaaaaacgaaactacgaccgcgatcaacccgaaaacgcctctccgaaaaacaaaaccgactccctacaacgccgcgatacgccacgataaacccgacgcaacgcctcgaccacgacatcgcccctttaaacgacgcgcgccctaattaactacgaaaaaaaacgaaacgaaacgcgacgacctcacgacccgacgacctatactatatataaaaacgacgacgacaaccgcgacgacgacgatccgatacgaaacaaaatactaacgaaaacgcgaaccaacaaaaaacgcctacgcgatatccgaacccctaaacccgcgacgctaaaccaaccgaaacgaacatacgcgaaaaaacgccgcgaaacaaccgccgctcctccgaaataaaaaacctaacgcgctaaaaaaataaaaaaaaccacgcaacgctccgttccctcaaaaaaccccgcgccgaacgccgaaatccaaacgactccccgacgcgaaaacgaaaacgtaaaaaacgcgaaaaaaatcgccgcgacgcgaaatctctaaaataaaaaaaaaaaccgaccgatcgctcgcgaacttctccccattaaaatataaaaaacgaaaccctccccgacgacgcaacccgaacctaaaaacgccgcgaaataccgacgcccgccgccttctccacgccgactataatcgtcgcgcgacccctcgactaaccgaaaccatacacccgaacgcccgaaatacgtccccgcaacaccgaaaccgcaaaaacgaacgaaaattcgaaaacgacgaacataaaaatcctcgtcccgcaacctacgctcgcgaaattacccg

SEQ ID NO: 18347 - DNA, 1117 bp, Artificial Sequence
  chemically treated genomic DNA (Homo sapiens) CpG-island No: 18347
tagtttttaagtgttttttattgttttttttacgtcgtaagtttagtcgagagcggtttttttttttttttttagggttttttcggtttatacggttagcggcggttcgcggagaggaaaaaatatataattttgttcggagtttgaatttatgggaaatttcgcgcgaagcgcgatgtgtttttagttcgggtaggaatagcggtcgaggttcgggtcgtcgcgggtttttgaggaaagttcggcgttgagaggtttttagggttgtcgtacggtttaggtagaggagcggagttgcggtcgcggttagttcggagacgttttttcgggagataaagtcggttttttgtagcgtcgcgatacgttacggtgggttcggcgtaacgtttcggttacggtatcgtttttttaagcggcgcgcgttttgattggttgcgggaggaggcggggcgggacgcggcgattttacggttcggcggtttatgttatatatagaggcggcggcggtagtcgcggcgacggcggttcggtgcgaggtagagtgttagcgggagcgcgagttagtaagaggcgtttgcgcgatgttcgggtttttgagttcgcggcgttgagttagtcgggacggatatgcgcgggagggcgtcgcggggtagtcgtcgttttttcggggtaaggggtttggcgcgttgagggggtggggagggttacgtagcgtttcgtttttttagggggtttcgcgtcgggcgtcgggatttaggcggtttttcgacgcgagggcgggggcgtggagggcgcggggagggtcgtcgcgacgcggagtttttgggatggagggagaggtcggtcggtcgttcgcgggtttttttttattgaggtgtggagagcgggatttttttcggcggcgtagttcgggtttggggacgtcgcgaagtgtcggcgttcgtcgttttttttacgtcggttgtggtcgtcgcgcggtttttcggttggtcggggttatgtattcgagcgttcgggatacgttttcgtagtatcgggatcgtaggagcggacgggggttcgggagcggcgagtatgaaggttttcgtttcgtagtttgcgttcgcggggttgttcg

SEQ ID NO: 18348 - DNA, 1117 bp, Artificial Sequence
  chemically treated genomic DNA (Homo sapiens) CpG-island No: 18348
cgaacaaccccgcgaacgcaaactacgaaacgaaaaccttcatactcgccgctcccgaacccccgtccgctcctacgatcccgatactacgaaaacgtatcccgaacgctcgaatacataaccccgaccaaccgaaaaaccgcgcgacgaccacaaccgacgtaaaaaaaacgacgaacgccgacacttcgcgacgtccccaaacccgaactacgccgccgaaaaaaatcccgctctccacacctcaataaaaaaaaacccgcgaacgaccgaccgacctctccctccatcccaaaaactccgcgtcgcgacgaccctccccgcgccctccacgcccccgccctcgcgtcgaaaaaccgcctaaatcccgacgcccgacgcgaaaccccctaaaaaaacgaaacgctacgtaaccctccccaccccctcaacgcgccaaaccccttaccccgaaaaaacgacgactaccccgcgacgccctcccgcgcatatccgtcccgactaactcaacgccgcgaactcaaaaacccgaacatcgcgcaaacgcctcttactaactcgcgctcccgctaacactctacctcgcaccgaaccgccgtcgccgcgactaccgccgccgcctctatatataacataaaccgccgaaccgtaaaatcgccgcgtcccgccccgcctcctcccgcaaccaatcaaaacgcgcgccgcttaaaaaaacgataccgtaaccgaaacgttacgccgaacccaccgtaacgtatcgcgacgctacaaaaaaccgactttatctcccgaaaaaacgtctccgaactaaccgcgaccgcaactccgctcctctacctaaaccgtacgacaaccctaaaaacctctcaacgccgaactttcctcaaaaacccgcgacgacccgaacctcgaccgctattcctacccgaactaaaaacacatcgcgcttcgcgcgaaatttcccataaattcaaactccgaacaaaattatatattttttcctctccgcgaaccgccgctaaccgtataaaccgaaaaaaccctaaaaaaaaaaaaaaaaaccgctctcgactaaacttacgacgtaaaaaaaacaataaaaaacacttaaaaacta

SEQ ID NO: 18349 - DNA, 780 bp, Artificial Sequence
  chemically treated genomic DNA (Homo sapiens) CpG-island No: 18349
gttcggcgacgtcgttttcggtaggttttttatggtcgggacgtatagttcgattttgaagacgttggaggatttgattttggatttcgggtatggggtcggggattcgtgtcgttcgtttagtttttcgttttttaagtttaattcgtaggcgtttaatttttcggcgtagtagtatcgcggggcggtttggtggtgttatttcggttttatgaatagtcgttataatagttgggatacggtgaatacggtgttgttcgaggatttcgaagtggtcgattttttttcgcgttgttcgcggtttttcgagttggaggagtttttttggatcgaaggagacgtggttcgggtgtttcgtaaaggcgttggcggtcggcggttgttttagtttttcgtcgaggcggtgaggcgtttggtcgggttgtttcgtagggtattgattcgcgtggttcgcgaggcgtagcgtttgagcgtgttgtacgttaagtgtattcgttttgaggtgtagagcgtcgtgcgtttggtgtatagttgggcgttggtcgagagttgcgcgttggtagtcgttaaggcgttgtttttgtatagtatgagcgtcggcgacgggttgcgtcggggtaagttcgcgcgttgcggttttatttttttagtgggtcgtttttttcgttggatggtggatattcgaattttcgtgcgtatttacgagtacgtagttattttttttatcgtttgtatggagaatttggtggaggagattcgggttagggtgatggttagtta

SEQ ID NO: 18350 - DNA, 780 bp, Artificial Sequence
  chemically treated genomic DNA (Homo sapiens) CpG-island No: 18350
taactaaccatcaccctaacccgaatctcctccaccaaattctccatacaaacgataaaaaaaataactacgtactcgtaaatacgcacgaaaattcgaatatccaccatccaacgaaaaaaacgacccactaaaaaaataaaaccgcaacgcgcgaacttaccccgacgcaacccgtcgccgacgctcatactatacaaaaacaacgccttaacgactaccaacgcgcaactctcgaccaacgcccaactatacaccaaacgcacgacgctctacacctcaaaacgaatacacttaacgtacaacacgctcaaacgctacgcctcgcgaaccacgcgaatcaataccctacgaaacaacccgaccaaacgcctcaccgcctcgacgaaaaactaaaacaaccgccgaccgccaacgcctttacgaaacacccgaaccacgtctccttcgatccaaaaaaactcctccaactcgaaaaaccgcgaacaacgcgaaaaaaaatcgaccacttcgaaatcctcgaacaacaccgtattcaccgtatcccaactattataacgactattcataaaaccgaaataacaccaccaaaccgccccgcgatactactacgccgaaaaattaaacgcctacgaattaaacttaaaaaacgaaaaactaaacgaacgacacgaatccccgaccccatacccgaaatccaaaatcaaatcctccaacgtcttcaaaatcgaactatacgtcccgaccataaaaaacctaccgaaaacgacgtcgccgaac

SEQ ID NO: 18351 - DNA, 780 bp, Artificial Sequence
  chemically treated genomic DNA (Homo sapiens) CpG-island No: 18351
tggttggttattattttggttcggattttttttattaggttttttatgtaggcggtgagggagatggttgcgtattcgtggatgcgtacggagattcgggtgtttattatttagcggaaaaagcgatttattgagaaggtgaggtcgtagcgcgcggatttgtttcggcgtagttcgtcgtcggcgtttatgttgtatagggatagcgttttgacggttgttagcgcgtagttttcggttagcgtttagttgtgtattaggcgtacggcgttttgtattttaaagcgggtgtatttggcgtgtagtacgtttaggcgttgcgtttcgcgggttacgcggattagtgttttgcggagtagttcggttaggcgttttatcgtttcggcggagaattggggtagtcgtcggtcgttagcgtttttgcggagtattcgggttacgtttttttcggtttaggggaatttttttagttcggggagtcgcggatagcgcgagaagaggtcggttatttcggggttttcgggtagtatcgtgtttatcgtgttttagttgttgtggcggttgtttatggagtcggagtagtattattaggtcgtttcgcggtgttgttgcgtcgaagagttgagcgtttgcgagttggatttggaggacgagaggttgagcgagcggtacgagttttcggttttatattcggagtttaaggttaagttttttagcgtttttagagtcgagttgtacgtttcggttatggggagtttgtcgagggcggcgtcgtcgagt

SEQ ID NO: 18352 - DNA, 780 bp, Artificial Sequence
  chemically treated genomic DNA (Homo sapiens) CpG-island No: 18352
actcgacgacgccgccctcgacaaactccccataaccgaaacgtacaactcgactctaaaaacgctaaaaaacttaaccttaaactccgaatataaaaccgaaaactcgtaccgctcgctcaacctctcgtcctccaaatccaactcgcaaacgctcaactcttcgacgcaacaacaccgcgaaacgacctaataatactactccgactccataaacaaccgccacaacaactaaaacacgataaacacgatactacccgaaaaccccgaaataaccgacctcttctcgcgctatccgcgactccccgaactaaaaaaattcccctaaaccgaaaaaaacgtaacccgaatactccgcaaaaacgctaacgaccgacgactaccccaattctccgccgaaacgataaaacgcctaaccgaactactccgcaaaacactaatccgcgtaacccgcgaaacgcaacgcctaaacgtactacacgccaaatacacccgctttaaaatacaaaacgccgtacgcctaatacacaactaaacgctaaccgaaaactacgcgctaacaaccgtcaaaacgctatccctatacaacataaacgccgacgacgaactacgccgaaacaaatccgcgcgctacgacctcaccttctcaataaatcgctttttccgctaaataataaacacccgaatctccgtacgcatccacgaatacgcaaccatctccctcaccgcctacataaaaaacctaataaaaaaaatccgaaccaaaataataaccaacca

SEQ ID NO: 18353 - DNA, 501 bp, Artificial Sequence
  chemically treated genomic DNA (Homo sapiens) CpG-island No: 18353
aggtggttcgcgggaggcggttgggaggcgggtttcgggttttcgcgtgtcggttacgagggagtcgcgtttataggtttttgagtgtagtgcgggtcggtaggtaacgttgggttcggtttttttttattttcgttggcggggattttcgttcgttttaggaggttttcgattttatagtatttcgtcgttttgggcgttcgttttttgtgaggttttttcggtgatattagttttttttttcgtttttattttgtgtgtttacgtcgagtagttgttaagtcgtttttttatgtcgtttttttttgttcgtagcgttattggcggtggtgtgtttagaaagtttcgaaaaacgcggtttcgtagatttggtttgtttttttagaacgcgttgcgttaaggcgtgttatttttttgtttggtttttaagtttatttttttaaagttcgggatgcgttcggatgtttttatcgttttttttttttgaggtgtttgtgtgtg

SEQ ID NO: 18354 - DNA, 501 bp, Artificial Sequence
  chemically treated genomic DNA (Homo sapiens) CpG-island No: 18354
cacacacaaacacctcaaaaaaaaaaaacgataaaaacatccgaacgcatcccgaactttaaaaaaataaacttaaaaaccaaacaaaaaaataacacgccttaacgcaacgcgttctaaaaaaacaaaccaaatctacgaaaccgcgtttttcgaaactttctaaacacaccaccgccaataacgctacgaacaaaaaaaaacgacataaaaaaacgacttaacaactactcgacgtaaacacacaaaataaaaacgaaaaaaaaaactaatatcaccgaaaaaacctcacaaaaaacgaacgcccaaaacgacgaaatactataaaatcgaaaacctcctaaaacgaacgaaaatccccgccaacgaaaataaaaaaaaaccgaacccaacgttacctaccgacccgcactacactcaaaaacctataaacgcgactccctcgtaaccgacacgcgaaaacccgaaacccgcctcccaaccgcctcccgcgaaccacct

SEQ ID NO: 18355 - DNA, 501 bp, Artificial Sequence
  chemically treated genomic DNA (Homo sapiens) CpG-island No: 18355
tatatataaatattttaggagaaaggaacggtgagggtattcgggcgtatttcgggttttagaaagatgggtttgaaaattagataaggaaatggtacgttttggcgtagcgcgttttgaaaggataggttaagtttgcggggtcgcgtttttcggggttttttagatatattatcgttaatgacgttgcggatagggaggaacgatatggagagacgatttggtagttgttcggcgtaaatatataaagtgagggcgggaagaggggttggtgttatcggagagattttatagaggacgggcgtttagagcggcgggatgttgtggggtcggaagttttttgaggcgaacggggattttcgttagcggagatgaggaaaggtcgggtttagcgttgtttgtcggttcgtattgtatttaaagatttatgggcgcggttttttcgtggtcgatacgcgagggttcgggattcgttttttagtcgtttttcgcgagttattt

SEQ ID NO: 18356 - DNA, 501 bp, Artificial Sequence
  chemically treated genomic DNA (Homo sapiens) CpG-island No: 18356
aaataactcgcgaaaaacgactaaaaaacgaatcccgaaccctcgcgtatcgaccacgaaaaaaccgcgcccataaatctttaaatacaatacgaaccgacaaacaacgctaaacccgacctttcctcatctccgctaacgaaaatccccgttcgcctcaaaaaacttccgaccccacaacatcccgccgctctaaacgcccgtcctctataaaatctctccgataacaccaacccctcttcccgccctcactttatatatttacgccgaacaactaccaaatcgtctctccatatcgttcctccctatccgcaacgtcattaacgataatatatctaaaaaaccccgaaaaacgcgaccccgcaaacttaacctatcctttcaaaacgcgctacgccaaaacgtaccatttccttatctaattttcaaacccatctttctaaaacccgaaatacgcccgaataccctcaccgttcctttctcctaaaatatttatatata

SEQ ID NO: 18357 - DNA, 1022 bp, Artificial Sequence
  chemically treated genomic DNA (Homo sapiens) CpG-island No: 18357
attcggtcgttaaggaggttgagtgaaacgcggatacggttttagttcgagggttcgttgttgttttttttcgagtttaaggcgtgtaaagagtttagaagaggcgggagtcgaggtaggataagttttgcgcgttttcgggagttcgtagatttagttcgggttaggagagtcggaagtagtcgcggtcgggttcgtttgcggttttttcggagtagttttcgttttttttttttcgtttttcgtcgggcggggcggggtacgagtataaaagattttaattttcgagcgggcgcgggtttatttagttaattattggtttagatttggttcgcggagagagtagatagggaacgtcgggagtaggatcgggcgcggagggttggggtcggggattcggggcggcgggttcgagtgggagaaaggagcggcggagggggtttagagttattcgggttttcgggatttttcgaagggtagaaataagtttttaaaaataggtagcggtttgtcggaagaagtgagtgaacggaaaggtataaagtatatatttttttcgtatttttaaggagacgttcgtagtttttatttattcgcgtcgagaggtttggaggaagtcgcgcggttgggaaggaggcggtattgtcgtattcggggacgtaagggagggaggaaaagggcggttgcggcgggaagaggttgggtatacgcgcgggagtcgtcgtcgtcgtcgtcgtcgtcgttatcgtttttttagtttttttgggtttcgttgtttcgagttggcgtcgttcgcgcgtttcgtcgtattgatagcggcgcgagtttcgtaatcgcgagttttgttttcggtcggtattattgaggcgcgcgggggtgggggtattcggagcggtttttcgtagttcggtttcgttcgtcgtttcggttttggtttcgggtttttttttttttttgttttttgggaaggatacggtgatacgagtacgaggagtttgtagtttcgtttagaaatagttcgg

SEQ ID NO: 18358 - DNA, 1022 bp, Artificial Sequence
  chemically treated genomic DNA (Homo sapiens) CpG-island No: 18358
ccgaactatttctaaacgaaactacaaactcctcgtactcgtatcaccgtatccttcccaaaaaacaaaaaaaaaaaaaaacccgaaaccaaaaccgaaacgacgaacgaaaccgaactacgaaaaaccgctccgaatacccccacccccgcgcgcctcaataataccgaccgaaaacaaaactcgcgattacgaaactcgcgccgctatcaatacgacgaaacgcgcgaacgacgccaactcgaaacaacgaaacccaaaaaaactaaaaaaacgataacgacgacgacgacgacgacgacgactcccgcgcgtatacccaacctcttcccgccgcaaccgcccttttcctccctcccttacgtccccgaatacgacaataccgcctccttcccaaccgcgcgacttcctccaaacctctcgacgcgaataaataaaaactacgaacgtctccttaaaaatacgaaaaaaatatatactttatacctttccgttcactcacttcttccgacaaaccgctacctatttttaaaaacttatttctacccttcgaaaaatcccgaaaacccgaataactctaaaccccctccgccgctcctttctcccactcgaacccgccgccccgaatccccgaccccaaccctccgcgcccgatcctactcccgacgttccctatctactctctccgcgaaccaaatctaaaccaataattaactaaataaacccgcgcccgctcgaaaattaaaatcttttatactcgtaccccgccccgcccgacgaaaaacgaaaaaaaaaaaacgaaaactactccgaaaaaaccgcaaacgaacccgaccgcgactacttccgactctcctaacccgaactaaatctacgaactcccgaaaacgcgcaaaacttatcctacctcgactcccgcctcttctaaactctttacacgccttaaactcgaaaaaaaacaacaacgaaccctcgaactaaaaccgtatccgcgtttcactcaacctccttaacgaccgaat

SEQ ID NO: 18359 - DNA, 1022 bp, Artificial Sequence
  chemically treated genomic DNA (Homo sapiens) CpG-island No: 18359
tcgggttgtttttgggcggggttgtagatttttcgtgttcgtgttatcgtgttttttttaggagatagagaaggaggagagttcggaattagggtcggagcggcgggcggagtcgagttgcggggagtcgtttcgggtgtttttattttcgcgcgttttagtggtgtcggtcgagggtagggttcgcggttgcggggttcgcgtcgttgttagtgcggcggggcgcgcgagcggcgttagttcggggtagcggaatttagagaagttgagggggcggtagcggcggcgacggcgacgacgacgattttcgcgcgtgtgtttagttttttttcgtcgtagtcgtttttttttttttttttttacgttttcgagtgcggtagtatcgttttttttttagtcgcgcggttttttttagatttttcggcgcgggtgagtggggattgcgggcgtttttttaggggtgcggggagggtgtgtgttttgtgttttttcgtttatttatttttttcggtaggtcgttgtttatttttagaaatttatttttgtttttcggggagtttcgggagttcgagtaattttaggtttttttcgtcgttttttttttttattcggattcgtcgtttcgggttttcggttttagtttttcgcgttcggttttgttttcggcgttttttgtttgtttttttcgcgggttaagtttgggttagtagttggttgggtgggttcgcgttcgttcggaagttggagttttttgtgttcgtgtttcgtttcgttcggcgaggggcggagggaggggaacggaggttgtttcggggaggtcgtaggcgggttcggtcgcggttgttttcggtttttttaattcggattgggtttacgggttttcggaggcgcgtagagtttgttttgtttcggttttcgttttttttgggttttttgtacgttttgggttcggagagaaataataacgggttttcgaattggggtcgtattcgcgttttatttagtttttttggcggtcgagt

SEQ ID NO: 18360 - DNA, 1022 bp, Artificial Sequence
  chemically treated genomic DNA (Homo sapiens) CpG-island No: 18360
actcgaccgccaaaaaaactaaataaaacgcgaatacgaccccaattcgaaaacccgttattatttctctccgaacccaaaacgtacaaaaaacccaaaaaaaacgaaaaccgaaacaaaacaaactctacgcgcctccgaaaacccgtaaacccaatccgaattaaaaaaaccgaaaacaaccgcgaccgaacccgcctacgacctccccgaaacaacctccgttcccctccctccgcccctcgccgaacgaaacgaaacacgaacacaaaaaactccaacttccgaacgaacgcgaacccacccaaccaactactaacccaaacttaacccgcgaaaaaaacaaacaaaaaacgccgaaaacaaaaccgaacgcgaaaaactaaaaccgaaaacccgaaacgacgaatccgaataaaaaaaaaaaacgacgaaaaaaacctaaaattactcgaactcccgaaactccccgaaaaacaaaaataaatttctaaaaataaacaacgacctaccgaaaaaaataaataaacgaaaaaacacaaaacacacaccctccccgcacccctaaaaaaacgcccgcaatccccactcacccgcgccgaaaaatctaaaaaaaaccgcgcgactaaaaaaaaaacgatactaccgcactcgaaaacgtaaaaaaaaaaaaaaaaaaacgactacgacgaaaaaaaactaaacacacgcgcgaaaatcgtcgtcgtcgccgtcgccgccgctaccgccccctcaacttctctaaattccgctaccccgaactaacgccgctcgcgcgccccgccgcactaacaacgacgcgaaccccgcaaccgcgaaccctaccctcgaccgacaccactaaaacgcgcgaaaataaaaacacccgaaacgactccccgcaactcgactccgcccgccgctccgaccctaattccgaactctcctccttctctatctcctaaaaaaaacacgataacacgaacacgaaaaatctacaaccccgcccaaaaacaacccga

SEQ ID NO: 18361 - DNA, 1195 bp, Artificial Sequence
  chemically treated genomic DNA (Homo sapiens) CpG-island No: 18361
gttgcgcggggatttcgtgggcgttgcgcggcgaagttggaaattagcgttgagatttttcggatttttttcggcggttgtttcgggggttcggttttatttttgtcgtttcgggaaaagcggacgttagttatagattttagtttagtaggaggggtcgcgcgcggggaagggcgtataatattagggagtttcgcgcgggcggcgttgggttcgagttcgtttttttcgagtttcgtttgtttttttcgaatttcgggttagtcggcgcgtcgagtcgtagtttcgttttttttttgtttttcgtttttttttttggttttcgttttagtcgtatcgtttttttatcgtttgggtcgcgttcggcgcgattgtattagagtcggcggtcggttgcgtacgtggagtcgggcgtgcggtttatgtcgttaggcgtttattggagatgtttacgtttatttgcgttgcgggttcggtcgggtattggatttttcgtttttcgttagcgttttcggtcgtagtgtttaagttcgcgtttttcgatatatcgttcggtttttttaatgagttggtattaaatattcgtagtttcgcgtttcgttttttacggcggtttcgggcgtttcgtttttgggtcggggttatagtcgttggagatttgggttagggttagattcgatatttatttgacgatggagtttcgcgtcgcgggcgttcggtcgtcggggttgtagttgtttcgggtttggttattttgcggtcgtcgttgtttaagtaggttttttcggttatcgtcgtcgttttcgtcgtcgtcgttgttagcgcgatagggtatacggaggcggcgcggagggttcgggggttggggcgggcggcggagttggcgtaggacgagcggtagacgcgtgtttatggcgcgggacggttggtttttaggggatacggagttgcggttgtcgagggcggcggggcgcgtgttaggggagtaggcggcggcggcggcggcggcggcgggaaggatttggcgtttttttttcgttttaggggtttttagggggtattgtattcggcggtcgtgacgtgcggagggcgggggtttgcgagtcgtcggtcgggatgttacggttttgggtattttggtttggtaagttgtattagatagagggtggggtgcggagtgggatttagattttgt

SEQ ID NO: 18362 - DNA, 1195 bp, Artificial Sequence
  chemically treated genomic DNA (Homo sapiens) CpG-island No: 18362
acaaaatctaaatcccactccgcaccccaccctctatctaatacaacttaccaaaccaaaatacccaaaaccgtaacatcccgaccgacgactcgcaaacccccgccctccgcacgtcacgaccgccgaatacaataccccctaaaaacccctaaaacgaaaaaaaaacgccaaatccttcccgccgccgccgccgccgccgccgcctactcccctaacacgcgccccgccgccctcgacaaccgcaactccgtatcccctaaaaaccaaccgtcccgcgccataaacacgcgtctaccgctcgtcctacgccaactccgccgcccgccccaacccccgaaccctccgcgccgcctccgtataccctatcgcgctaacaacgacgacgacgaaaacgacgacgataaccgaaaaaacctacttaaacaacgacgaccgcaaaataaccaaacccgaaacaactacaaccccgacgaccgaacgcccgcgacgcgaaactccatcgtcaaataaatatcgaatctaaccctaacccaaatctccaacgactataaccccgacccaaaaacgaaacgcccgaaaccgccgtaaaaaacgaaacgcgaaactacgaatatttaataccaactcattaaaaaaaccgaacgatatatcgaaaaacgcgaacttaaacactacgaccgaaaacgctaacgaaaaacgaaaaatccaatacccgaccgaacccgcaacgcaaataaacgtaaacatctccaataaacgcctaacgacataaaccgcacgcccgactccacgtacgcaaccgaccgccgactctaatacaatcgcgccgaacgcgacccaaacgataaaaaaacgatacgactaaaacgaaaaccaaaaaaaaaaacgaaaaacaaaaaaaaaacgaaactacgactcgacgcgccgactaacccgaaattcgaaaaaaacaaacgaaactcgaaaaaaacgaactcgaacccaacgccgcccgcgcgaaactccctaatattatacgcccttccccgcgcgcgacccctcctactaaactaaaatctataactaacgtccgcttttcccgaaacgacaaaaataaaaccgaacccccgaaacaaccgccgaaaaaaatccgaaaaatctcaacgctaatttccaacttcgccgcgcaacgcccacgaaatccccgcgcaac

SEQ ID NO: 18363 - DNA, 1195 bp, Artificial Sequence
  chemically treated genomic DNA (Homo sapiens) CpG-island No: 18363
gtagagtttgagttttatttcgtattttattttttgtttggtatagtttattaaattaaagtgtttaaagtcgtgatatttcggtcggcggttcgtaggttttcgtttttcgtacgttacggtcgtcgggtgtagtgttttttaggggtttttgggacgaggaggaagcgttaggtttttttcgtcgtcgtcgtcgtcgtcgtcgtttgtttttttggtacgcgtttcgtcgttttcggtagtcgtagtttcgtgttttttgagaattagtcgtttcgcgttatgggtacgcgtttgtcgttcgttttgcgttagtttcgtcgttcgttttagttttcgggtttttcgcgtcgttttcgtgtgttttgtcgcgttagtagcggcggcggcggaggcggcggcggtggtcgggagggtttgtttggatagcggcggtcgtaggatggttaggttcggagtagttgtagtttcggcggtcgaacgttcgcggcgcgggattttatcgttaggtgagtgtcgggtttggttttggtttaggtttttagcggttgtggtttcgatttaggggcggagcgttcgggatcgtcgtggggagcggggcgcggggttgcgagtgtttggtgttaatttattaggggggtcgggcggtgtgtcgggaaacgcgggtttgggtattgcggtcgggagcgttggcggagaacgggggatttagtattcgatcgggttcgtagcgtaggtgggcgtgggtatttttaatgggcgtttagcggtatggatcgtacgttcggttttacgtgcgtagtcggtcgtcggttttgatgtaatcgcgtcgggcgcgatttagacggtaaaggggcggtgcggttggggcggaaattaggggagggggcgaggagtaggaggagggcggggttgcggttcggcgcgtcggttggttcggggttcgggaagggtaagcggagttcgggagaggcgggttcgggtttagcgtcgttcgcgcgaagttttttggtgttgtgcgttttttttcgcgcgcggttttttttgttgggttggggtttgtggttgacgttcgtttttttcggaacggtaaaggtggagtcgggttttcgggatagtcgtcggggggaattcgagaggttttagcgttggtttttagtttcgtcgcgtagcgtttacggagttttcgcgtagt

SEQ ID NO: 18364 - DNA, 1195 bp, Artificial Sequence
  chemically treated genomic DNA (Homo sapiens) CpG-island No: 18364
actacgcgaaaactccgtaaacgctacgcgacgaaactaaaaaccaacgctaaaacctctcgaattccccccgacgactatcccgaaaacccgactccacctttaccgttccgaaaaaaacgaacgtcaaccacaaaccccaacccaacaaaaaaaaccgcgcgcgaaaaaaaacgcacaacaccaaaaaacttcgcgcgaacgacgctaaacccgaacccgcctctcccgaactccgcttacccttcccgaaccccgaaccaaccgacgcgccgaaccgcaaccccgccctcctcctactcctcgccccctcccctaatttccgccccaaccgcaccgcccctttaccgtctaaatcgcgcccgacgcgattacatcaaaaccgacgaccgactacgcacgtaaaaccgaacgtacgatccataccgctaaacgcccattaaaaatacccacgcccacctacgctacgaacccgatcgaatactaaatcccccgttctccgccaacgctcccgaccgcaatacccaaacccgcgtttcccgacacaccgcccgacccccctaataaattaacaccaaacactcgcaaccccgcgccccgctccccacgacgatcccgaacgctccgcccctaaatcgaaaccacaaccgctaaaaacctaaaccaaaaccaaacccgacactcacctaacgataaaatcccgcgccgcgaacgttcgaccgccgaaactacaactactccgaacctaaccatcctacgaccgccgctatccaaacaaaccctcccgaccaccgccgccgcctccgccgccgccgctactaacgcgacaaaacacacgaaaacgacgcgaaaaacccgaaaactaaaacgaacgacgaaactaacgcaaaacgaacgacaaacgcgtacccataacgcgaaacgactaattctcaaaaaacacgaaactacgactaccgaaaacgacgaaacgcgtaccaaaaaaacaaacgacgacgacgacgacgacgacgaaaaaaacctaacgcttcctcctcgtcccaaaaacccctaaaaaacactacacccgacgaccgtaacgtacgaaaaacgaaaacctacgaaccgccgaccgaaatatcacgactttaaacactttaatttaataaactataccaaacaaaaaataaaatacgaaataaaactcaaactctac

SEQ ID NO: 18365 - DNA, 608 bp, Artificial Sequence
  chemically treated genomic DNA (Homo sapiens) CpG-island No: 18365
gagtcgggtagcggttcgtgtcgggacgggggattcgtcggcgtcggggtgtgtaaaggagcgtgtgtgcggttggagggcggcgatgcgaataataatgcgttcgcgttcggggttaggttgtattggcggtcgcgcgggtcggggtcgggaagttaggtagggtagggtcgcgggttcgcgcgcggcggcgtcgggtttattttgattcggtttcgaggcgcgcgcggggtcggcgtgttcgggggtcggatagcggcggcggcggcgggcggatggcggcggtacggcggtggcggtagcggggagggcgcgttcggggtttcgtcgcgtttcggttcggcggatttcggttcgcgtcgcggtcgcgggtgttgtcggggggcgcggcgggcgtagtagagcggcgggcggcggcggcgtcgtcgagcggtgtagataaaggaggggcggagggaggagacggagggtgtgggagaggcggttttatcggcgcgggcggcggcggtcgcgtttttttcgttttttagtagcggggatcgagagagggagttgtgtttgagaagacgttaaaattttttttagcgttgtttgcgggagggggaggg

SEQ ID NO: 18366 - DNA, 608 bp, Artificial Sequence
  chemically treated genomic DNA (Homo sapiens) CpG-island No: 18366
ccctccccctcccgcaaacaacgctaaaaaaaattttaacgtcttctcaaacacaactccctctctcgatccccgctactaaaaaacgaaaaaaacgcgaccgccgccgcccgcgccgataaaaccgcctctcccacaccctccgtctcctccctccgcccctcctttatctacaccgctcgacgacgccgccgccgcccgccgctctactacgcccgccgcgccccccgacaacacccgcgaccgcgacgcgaaccgaaatccgccgaaccgaaacgcgacgaaaccccgaacgcgccctccccgctaccgccaccgccgtaccgccgccatccgcccgccgccgccgccgctatccgacccccgaacacgccgaccccgcgcgcgcctcgaaaccgaatcaaaataaacccgacgccgccgcgcgcgaacccgcgaccctaccctacctaacttcccgaccccgacccgcgcgaccgccaatacaacctaaccccgaacgcgaacgcattattattcgcatcgccgccctccaaccgcacacacgctcctttacacaccccgacgccgacgaatcccccgtcccgacacgaaccgctacccgactc

SEQ ID NO: 18367 - DNA, 608 bp, Artificial Sequence
  chemically treated genomic DNA (Homo sapiens) CpG-island No: 18367
ttttttttttttcgtaggtagcgttaagggggattttggcgtttttttagatatagttttttttttcggttttcgttgttgaggagcgagaggagcgcggtcgtcgtcgttcgcgtcggtgaagtcgttttttttatatttttcgtttttttttttcgttttttttttgtttgtatcgttcgacgacgtcgtcgtcgttcgtcgttttgttgcgttcgtcgcgtttttcggtagtattcgcggtcgcggcgcgagtcggagttcgtcgagtcggagcgcgacgaggtttcgggcgcgtttttttcgttgtcgttatcgtcgtgtcgtcgttattcgttcgtcgtcgtcgtcgttgttcggttttcgagtacgtcggtttcgcgcgcgtttcgaggtcgagttaaggtaagttcggcgtcgtcgcgcgcggattcgcggttttgttttgtttggtttttcgatttcggttcgcgcggtcgttagtgtagtttggtttcgggcgcgggcgtattgttgttcgtatcgtcgttttttagtcgtatatacgtttttttgtatatttcggcgtcgacgggtttttcgtttcggtacggatcgttattcgattt

SEQ ID NO: 18368 - DNA, 608 bp, Artificial Sequence
  chemically treated genomic DNA (Homo sapiens) CpG-island No: 18368
aaatcgaataacgatccgtaccgaaacgaaaaacccgtcgacgccgaaatatacaaaaaaacgtatatacgactaaaaaacgacgatacgaacaacaatacgcccgcgcccgaaaccaaactacactaacgaccgcgcgaaccgaaatcgaaaaaccaaacaaaacaaaaccgcgaatccgcgcgcgacgacgccgaacttaccttaactcgacctcgaaacgcgcgcgaaaccgacgtactcgaaaaccgaacaacgacgacgacgacgaacgaataacgacgacacgacgataacgacaacgaaaaaaacgcgcccgaaacctcgtcgcgctccgactcgacgaactccgactcgcgccgcgaccgcgaatactaccgaaaaacgcgacgaacgcaacaaaacgacgaacgacgacgacgtcgtcgaacgatacaaacaaaaaaaaaacgaaaaaaaaaaacgaaaaatataaaaaaaacgacttcaccgacgcgaacgacgacgaccgcgctcctctcgctcctcaacaacgaaaaccgaaaaaaaaaactatatctaaaaaaacgccaaaatcccccttaacgctacctacgaaaaaaaaaaaa

SEQ ID NO: 18369 - DNA, 813 bp, Artificial Sequence
  chemically treated genomic DNA (Homo sapiens) CpG-island No: 18369
cggtcgttcggtcgtttcgtcgttattcgttatttcgtagtttgtcgtatttttggagcgagagagcgacgagcgagttacggcgatggtgtcgttcgcggcgtagttatgaagttcgttcgaggagttcgcgcgcgtttttgttattttgttcgtagttcgtcgtttgcgcgttagtttttcgcgtttcgggttagttgttgtcgttttgttaatttttgttcgtttcgtcgttcggcgttattgagttttaagtttatgtcgggttcgggggtacgggtgttttagtttcgttgtcgtcgtcgtcgtcgtcgtcgttgcgtcgtcgttgtcgcgtcgttgaggaggcggaggaggaggaggaggaggaggaagaggaggaggaagaggagggggaggaaggtaagaggcgcgttgtttttaggggggcgcgttcgttgttttagtttaatcgggggtgggtcgcggcgggagcgtttcgtttcgggtcggttggggggcgattggcgtttgggcgttttcgggagtcgggggtagggcggggggcgtcgaacgtttggtcgttcggagtttgggcgggcggggtaacggttcgttgcgtgtttattgtttcggcgagtttttggtttggcgggttcgtttggttttcgcgggtgcggggtgaggagtcgagcgtaggggagtgtagcgcgtttattatggagtttttgtgtgcgcgtttgggttgtgggtatagttgggagagttggcgagacgcggggtttggttgttaggaggtggttatttagtcggggtgttcggcgaagttcgagt

SEQ ID NO: 18370 - DNA, 813 bp, Artificial Sequence
  chemically treated genomic DNA (Homo sapiens) CpG-island No: 18370
actcgaacttcgccgaacaccccgactaaataaccacctcctaacaaccaaaccccgcgtctcgccaactctcccaactatacccacaacccaaacgcgcacacaaaaactccataataaacgcgctacactcccctacgctcgactcctcaccccgcacccgcgaaaaccaaacgaacccgccaaaccaaaaactcgccgaaacaataaacacgcaacgaaccgttaccccgcccgcccaaactccgaacgaccaaacgttcgacgccccccgccctacccccgactcccgaaaacgcccaaacgccaatcgccccccaaccgacccgaaacgaaacgctcccgccgcgacccacccccgattaaactaaaacaacgaacgcgcccccctaaaaacaacgcgcctcttaccttcctccccctcctcttcctcctcctcttcctcctcctcctcctcctcctccgcctcctcaacgacgcgacaacgacgacgcaacgacgacgacgacgacgacgacaacgaaactaaaacacccgtacccccgaacccgacataaacttaaaactcaataacgccgaacgacgaaacgaacaaaaattaacaaaacgacaacaactaacccgaaacgcgaaaaactaacgcgcaaacgacgaactacgaacaaaataacaaaaacgcgcgcgaactcctcgaacgaacttcataactacgccgcgaacgacaccatcgccgtaactcgctcgtcgctctctcgctccaaaaatacgacaaactacgaaataacgaataacgacgaaacgaccgaacgaccg

SEQ ID NO: 18371 - DNA, 813 bp, Artificial Sequence
  chemically treated genomic DNA (Homo sapiens) CpG-island No: 18371
gttcgggtttcgtcgggtatttcggttaagtggttattttttagtagttaggtttcgcgtttcgttagtttttttaattgtgtttatagtttaggcgcgtatataaaggttttataatgaacgcgttgtatttttttgcgttcgattttttatttcgtattcgcggaggttaaacgagttcgttaagttagagattcgtcggggtagtgggtacgtaacgggtcgttatttcgttcgtttaaatttcgggcggttagacgttcggcgtttttcgttttgttttcggttttcgggggcgtttaagcgttagtcgttttttagtcggttcggggcggaacgttttcgtcgcgatttattttcggttgggttgagatagcgggcgcgtttttttgaaggtagcgcgttttttatttttttttttttttttttttttttttttttttttttttttttttttttttttcgtttttttagcggcgcggtagcggcggcgtagcggcggcggcggcggcggcggtagcgggattagggtattcgtgttttcgagttcggtatgggtttggggtttagtggcgtcgggcggcggggcgggtagaggttggtagggcggtagtagttggttcgggacgcggggagttggcgcgtaggcggcgggttgcgggtaggatggtaggagcgcgcgcgggtttttcgggcgggttttatggttgcgtcgcgggcggtattatcgtcgtggttcgttcgtcgttttttcgttttaggagtgcggtaggttgcgaggtgacggatggcggcgaggcggtcggacggtcg

SEQ ID NO: 18372 - DNA, 813 bp, Artificial Sequence
  chemically treated genomic DNA (Homo sapiens) CpG-island No: 18372
cgaccgtccgaccgcctcgccgccatccgtcacctcgcaacctaccgcactcctaaaacgaaaaaacgacgaacgaaccacgacgataataccgcccgcgacgcaaccataaaacccgcccgaaaaacccgcgcgcgctcctaccatcctacccgcaacccgccgcctacgcgccaactccccgcgtcccgaaccaactactaccgccctaccaacctctacccgccccgccgcccgacgccactaaaccccaaacccataccgaactcgaaaacacgaataccctaatcccgctaccgccgccgccgccgccgccgctacgccgccgctaccgcgccgctaaaaaaacgaaaaaaaaaaaaaaaaaaaaaaaaaaaaaaaaaaaaaaaaaaaaaaaaaaaaataaaaaacgcgctaccttcaaaaaaacgcgcccgctatctcaacccaaccgaaaataaatcgcgacgaaaacgttccgccccgaaccgactaaaaaacgactaacgcttaaacgcccccgaaaaccgaaaacaaaacgaaaaacgccgaacgtctaaccgcccgaaatttaaacgaacgaaataacgacccgttacgtacccactaccccgacgaatctctaacttaacgaactcgtttaacctccgcgaatacgaaataaaaaatcgaacgcaaaaaaatacaacgcgttcattataaaacctttatatacgcgcctaaactataaacacaattaaaaaaactaacgaaacgcgaaacctaactactaaaaaataaccacttaaccgaaatacccgacgaaacccgaac

SEQ ID NO: 18373 - DNA, 639 bp, Artificial Sequence
  chemically treated genomic DNA (Homo sapiens) CpG-island No: 18373
ttcggcgagtaggcgggagaagggcgcgttggcgagtttgggtcgtaaagattcgggtcgcggcgggcggcgaggttttagttgggcgttagggaagcggaggtattcgcggtcgggattcgcggcgacggcggcggcggcggcggtcgttgcgttttatgttggtggattttttaggatgtatttttcgttttttttcgtttcgcggttttgtttcgttttttttttgagtttcgcgtttgtcgttcgcggggttggcgggcggtcgcgaggttttcgttatcgtaggacgtttcgcgagggatagttggggtcgagaaggcgcgggttttgcggggttcggtcgattttagggatttcgaggggcgttcgttagtcggagttcgcgaatcgtagatttttcgtttttcgtagttcggaagggagttgttcgtattcgtcgcggttcgcgtgggaagggatcgcgtttggttatcgtttcgcgcgggggaggggaagtggagtggaatttagcgtagggcgttgtttaggggtagtcgggttaacgttttgtttggagtttattatttgatttttcgggttattttgagggattttagtatttagttttttgatcgcgatttttttttttgcgtttta

SEQ ID NO: 18374 - DNA, 639 bp, Artificial Sequence
  chemically treated genomic DNA (Homo sapiens) CpG-island No: 18374
taaaacgcaaaaaaaaaaatcgcgatcaaaaaactaaatactaaaatccctcaaaataacccgaaaaatcaaataataaactccaaacaaaacgttaacccgactacccctaaacaacgccctacgctaaattccactccacttcccctcccccgcgcgaaacgataaccaaacgcgatcccttcccacgcgaaccgcgacgaatacgaacaactcccttccgaactacgaaaaacgaaaaatctacgattcgcgaactccgactaacgaacgcccctcgaaatccctaaaatcgaccgaaccccgcaaaacccgcgccttctcgaccccaactatccctcgcgaaacgtcctacgataacgaaaacctcgcgaccgcccgccaaccccgcgaacgacaaacgcgaaactcaaaaaaaaaacgaaacaaaaccgcgaaacgaaaaaaaacgaaaaatacatcctaaaaaatccaccaacataaaacgcaacgaccgccgccgccgccgccgtcgccgcgaatcccgaccgcgaatacctccgcttccctaacgcccaactaaaacctcgccgcccgccgcgacccgaatctttacgacccaaactcgccaacgcgcccttctcccgcctactcgccgaa

SEQ ID NO: 18375 - DNA, 639 bp, Artificial Sequence
  chemically treated genomic DNA (Homo sapiens) CpG-island No: 18375
tggggcgtagagaaagaaatcgcgattagggaattgagtattggagttttttaaaataattcgaagggttaaatagtgagttttaagtaaagcgttgattcggttatttttgagtagcgttttacgttgggttttattttattttttttttttcgcgcggggcgatagttaggcgcggtttttttttacgcgggtcgcggcgagtgcggatagttttttttcgggttgcggaaggcgggaagtttgcggttcgcgggtttcggttggcgggcgtttttcggagtttttgaagtcggtcgggtttcgtaggattcgcgttttttcggttttaattgtttttcgcgaagcgttttgcggtggcggaggtttcgcggtcgttcgttagtttcgcgagcggtaagcgcggggtttagaggggaggcggggtaaggtcgcggggcggaggggggcgggaggtgtattttgggaaatttattaatatggggcgtagcggtcgtcgtcgtcgtcgtcgtcgtcgcgagtttcggtcgcgggtgttttcgtttttttgacgtttagttggggtttcgtcgttcgtcgcggttcgggtttttgcggtttagattcgttagcgcgtttttttttcgtttgttcgtcggg

SEQ ID NO: 18376 - DNA, 639 bp, Artificial Sequence
  chemically treated genomic DNA (Homo sapiens) CpG-island No: 18376
cccgacgaacaaacgaaaaaaaaacgcgctaacgaatctaaaccgcaaaaacccgaaccgcgacgaacgacgaaaccccaactaaacgtcaaaaaaacgaaaacacccgcgaccgaaactcgcgacgacgacgacgacgacgacgaccgctacgccccatattaataaatttcccaaaatacacctcccgcccccctccgccccgcgaccttaccccgcctcccctctaaaccccgcgcttaccgctcgcgaaactaacgaacgaccgcgaaacctccgccaccgcaaaacgcttcgcgaaaaacaattaaaaccgaaaaaacgcgaatcctacgaaacccgaccgacttcaaaaactccgaaaaacgcccgccaaccgaaacccgcgaaccgcaaacttcccgccttccgcaacccgaaaaaaaactatccgcactcgccgcgacccgcgtaaaaaaaaaccgcgcctaactatcgccccgcgcgaaaaaaaaaaaataaaataaaacccaacgtaaaacgctactcaaaaataaccgaatcaacgctttacttaaaactcactatttaacccttcgaattattttaaaaaactccaatactcaattccctaatcgcgatttctttctctacgcccca

SEQ ID NO: 18377 - DNA, 553 bp, Artificial Sequence
  chemically treated genomic DNA (Homo sapiens) CpG-island No: 18377
ttttttcggtcgttaggttttcggttttcggcgtttttaaatttcggcgacgtttcgggtttcgtttttcgtagggtttggatggttttcgcgcgtaaatttgggaagggtttggggttcgtagaggggcgttcggggaatacgcgcggggtgaggttttgtttcggttcggggaggcggtcgacggaggacgggaggaggcggttatttggggatatttggtcgcgttttatttttcgggggtcgggtttatttgcggcgagcgggcgggtagtgggtcggcgtttttcgggagttcgcgttgcgtttttagtcgttttagtttttgttttattttcgggcgggttagtcgtttgtcgttagttttggtttcgttttggcggcgcgggtggttgtttttcgatttgtgtttgtattcggcgtttttaatgattttaatttaggaagtatttcggtttttagttttaagtagagcgttttcggcgcgtttagggtttttcgttttgggttttattgggttaggagttttgtggttattttaggttaattgttt

SEQ ID NO: 18378 - DNA, 553 bp, Artificial Sequence
  chemically treated genomic DNA (Homo sapiens) CpG-island No: 18378
aaacaattaacctaaaataaccacaaaactcctaacccaataaaacccaaaacgaaaaaccctaaacgcgccgaaaacgctctacttaaaactaaaaaccgaaatacttcctaaattaaaatcattaaaaacgccgaatacaaacacaaatcgaaaaacaaccacccgcgccgccaaaacgaaaccaaaactaacgacaaacgactaacccgcccgaaaataaaacaaaaactaaaacgactaaaaacgcaacgcgaactcccgaaaaacgccgacccactacccgcccgctcgccgcaaataaacccgacccccgaaaaataaaacgcgaccaaatatccccaaataaccgcctcctcccgtcctccgtcgaccgcctccccgaaccgaaacaaaacctcaccccgcgcgtattccccgaacgcccctctacgaaccccaaacccttcccaaatttacgcgcgaaaaccatccaaaccctacgaaaaacgaaacccgaaacgtcgccgaaatttaaaaacgccgaaaaccgaaaacctaacgaccgaaaaaa

SEQ ID NO: 18379 - DNA, 553 bp, Artificial Sequence
  chemically treated genomic DNA (Homo sapiens) CpG-island No: 18379
gaatagttgatttaaggtaattataggatttttggtttagtgggatttaaagcgaaaagttttggacgcgtcgagggcgttttgtttaagattgagaatcgaaatgttttttgaattaggattattgagaacgtcgagtgtagatataaatcgaaaagtagttattcgcgtcgttaaggcggggttagaattggcggtaggcggttggttcgttcggggatggggtagaagttggggcggttgagagcgtagcgcgggttttcgggagacgtcggtttattgttcgttcgttcgtcgtaggtaggttcggttttcgggaggtggggcgcggttaggtgtttttaggtagtcgttttttttcgtttttcgtcggtcgttttttcggatcgaggtaggattttatttcgcgcgtgtttttcgggcgtttttttgcgaattttaggttttttttaggtttgcgcgcgggggttatttagattttgcggagagcgaggttcggagcgtcgtcgaggtttgagggcgtcggagatcgagggtttggcggtcgaaggaa

SEQ ID NO: 18380 - DNA, 553 bp, Artificial Sequence
  chemically treated genomic DNA (Homo sapiens) CpG-island No: 18380
ttccttcgaccgccaaaccctcgatctccgacgccctcaaacctcgacgacgctccgaacctcgctctccgcaaaatctaaataacccccgcgcgcaaacctaaaaaaaacctaaaattcgcaaaaaaacgcccgaaaaacacgcgcgaaataaaatcctacctcgatccgaaaaaacgaccgacgaaaaacgaaaaaaaacgactacctaaaaacacctaaccgcgccccacctcccgaaaaccgaacctacctacgacgaacgaacgaacaataaaccgacgtctcccgaaaacccgcgctacgctctcaaccgccccaacttctaccccatccccgaacgaaccaaccgcctaccgccaattctaaccccgccttaacgacgcgaataactacttttcgatttatatctacactcgacgttctcaataatcctaattcaaaaaacatttcgattctcaatcttaaacaaaacgccctcgacgcgtccaaaacttttcgctttaaatcccactaaaccaaaaatcctataattaccttaaatcaactattc

SEQ ID NO: 18381 - DNA, 692 bp, Artificial Sequence
  chemically treated genomic DNA (Homo sapiens) CpG-island No: 18381
cgcgtcggcggggcgcggtcgtagagggtgcggggtgcggagttttttcggtggtcgattttaggcgggaagcgttcggcggatagacggacggataggagatttaaacgggtttcggtttttttatacggttttgtggggaatcgatagcgcgtcgcgggaagtagcgggcgtaaggcgcggcggttgagatttattcgggaggcggcgggttcggtttcgtttcggttgggcggttcgggattgcgggtttcgcgattttcgcgttttattcgggcggttttttcggtgggcgtcgcgatcgcggggttggggttcgggggatttttagtcgagggaacgtagtggtggagagggcgtattgtttttttagggatcgggttggggacgtaggaagcgcggtttgggagcgtcggcgtgcgggagggagggatcgcgggaggcggagggcggtgtcggttaggagcggtttttagttcggagaagtatcgtttatcggtcgattttttttttcggttttcggtattattttcgggttcgaggcgagggatcgtagttgagcgaggcgggtatttattttttagcgtatgtcgttggagcgcgttgagcgtgtgtcgggggttgggtttaagttttttttaatttttgttagtcgagttggataagagggggtcgggagaaaatagagtttt

SEQ ID NO: 18382 - DNA, 692 bp, Artificial Sequence
  chemically treated genomic DNA (Homo sapiens) CpG-island No: 18382
aaaactctattttctcccgaccccctcttatccaactcgactaacaaaaattaaaaaaaacttaaacccaacccccgacacacgctcaacgcgctccaacgacatacgctaaaaaataaatacccgcctcgctcaactacgatccctcgcctcgaacccgaaaataataccgaaaaccgaaaaaaaaaatcgaccgataaacgatacttctccgaactaaaaaccgctcctaaccgacaccgccctccgcctcccgcgatccctccctcccgcacgccgacgctcccaaaccgcgcttcctacgtccccaacccgatccctaaaaaaacaatacgccctctccaccactacgttccctcgactaaaaatcccccgaaccccaaccccgcgatcgcgacgcccaccgaaaaaaccgcccgaataaaacgcgaaaatcgcgaaacccgcaatcccgaaccgcccaaccgaaacgaaaccgaacccgccgcctcccgaataaatctcaaccgccgcgccttacgcccgctacttcccgcgacgcgctatcgattccccacaaaaccgtataaaaaaaccgaaacccgtttaaatctcctatccgtccgtctatccgccgaacgcttcccgcctaaaatcgaccaccgaaaaaactccgcaccccgcaccctctacgaccgcgccccgccgacgcg

SEQ ID NO: 18383 - DNA, 692 bp, Artificial Sequence
  chemically treated genomic DNA (Homo sapiens) CpG-island No: 18383
agggttttattttttttcgatttttttttatttaattcggttggtaagggttggggagaatttaggtttagttttcggtatacgtttagcgcgttttagcggtatacgttggggagtgggtgttcgtttcgtttagttgcgatttttcgtttcgggttcgggggtggtgtcgagggtcgggagggagggtcggtcggtgggcggtgttttttcgggttggaggtcgtttttggtcggtatcgtttttcgtttttcgcggtttttttttttcgtacgtcggcgtttttaggtcgcgttttttgcgtttttaattcggtttttgagagggtagtgcgttttttttattattgcgttttttcggttaagaatttttcgaattttagtttcgcgatcgcggcgtttatcgaggaggtcgttcgggtggggcgcgggggtcgcgaagttcgtagtttcggatcgtttagtcgagacggagtcggattcgtcgtttttcgggtgagttttagtcgtcgcgttttgcgttcgttgtttttcgcggcgcgttgtcggttttttatagggtcgtgtaagggggtcgaggttcgtttgggttttttgttcgttcgtttgttcgtcgagcgtttttcgtttggggtcgattatcgggaggatttcgtatttcgtattttttgcggtcgcgtttcgtcggcgcg

SEQ ID NO: 18384 - DNA, 692 bp, Artificial Sequence
  chemically treated genomic DNA (Homo sapiens) CpG-island No: 18384
cgcgccgacgaaacgcgaccgcaaaaaatacgaaatacgaaatcctcccgataatcgaccccaaacgaaaaacgctcgacgaacaaacgaacgaacaaaaaacccaaacgaacctcgacccccttacacgaccctataaaaaaccgacaacgcgccgcgaaaaacaacgaacgcaaaacgcgacgactaaaactcacccgaaaaacgacgaatccgactccgtctcgactaaacgatccgaaactacgaacttcgcgacccccgcgccccacccgaacgacctcctcgataaacgccgcgatcgcgaaactaaaattcgaaaaattcttaaccgaaaaaacgcaataataaaaaaaacgcactaccctctcaaaaaccgaattaaaaacgcaaaaaacgcgacctaaaaacgccgacgtacgaaaaaaaaaaaccgcgaaaaacgaaaaacgataccgaccaaaaacgacctccaacccgaaaaaacaccgcccaccgaccgaccctccctcccgaccctcgacaccacccccgaacccgaaacgaaaaatcgcaactaaacgaaacgaacacccactccccaacgtataccgctaaaacgcgctaaacgtataccgaaaactaaacctaaattctccccaacccttaccaaccgaattaaataaaaaaaaatcgaaaaaaaataaaaccct

SEQ ID NO: 18385 - DNA, 637 bp, Artificial Sequence
  chemically treated genomic DNA (Homo sapiens) CpG-island No: 18385
attgtatttcggtttcgtggcgggcgatttttttttgttagggaatcgtcgttttggtttcgggttggggagttcgttagggtgggtgagggagcgtcggcgttttcgtcgggtcgtcgttaatttcggtttttttttttcgtcgtaaagttttcgagttcgttcggtcgttacgttttagtaaaaggtcgtgcgtagcggtttatattgaagattttttatttgtttttatatttgttttagttggtcgttgttatgtggttcgagtgcgtaagaagtcggggtcgtagacgttagtagcgtttcggtttcgagatttttcggtagtagtcgtgattgtcgtcggcgggcgttgatttattttcgtgttagtttgtagtcgattaattcgcgtttttttgaggcggggtcggagtcgcgaggtttcgtttttaagtcgaggttttataaatgttgcgacgtacgtttagtcgtaaatagtcggggttttagcgggagaacgataatgtaaagtgttatgtttttggttgtttaatacgattgtagatttatggataagagcgtaggtagtggttataagagcgaggagaagcgagaaaagatgaaacggattttgtgagtatggtttttttttttt

SEQ ID NO: 18386 - DNA, 637 bp, Artificial Sequence
  chemically treated genomic DNA (Homo sapiens) CpG-island No: 18386
aaaaaaaaaaaaccatactcacaaaatccgtttcatcttttctcgcttctcctcgctcttataaccactacctacgctcttatccataaatctacaatcgtattaaacaaccaaaaacataacactttacattatcgttctcccgctaaaaccccgactatttacgactaaacgtacgtcgcaacatttataaaacctcgacttaaaaacgaaacctcgcgactccgaccccgcctcaaaaaaacgcgaattaatcgactacaaactaacacgaaaataaatcaacgcccgccgacgacaatcacgactactaccgaaaaatctcgaaaccgaaacgctactaacgtctacgaccccgacttcttacgcactcgaaccacataacaacgaccaactaaaacaaatataaaaacaaataaaaaatcttcaatataaaccgctacgcacgaccttttactaaaacgtaacgaccgaacgaactcgaaaactttacgacgaaaaaaaaaaaccgaaattaacgacgacccgacgaaaacgccgacgctccctcacccaccctaacgaactccccaacccgaaaccaaaacgacgattccctaacaaaaaaaaatcgcccgccacgaaaccgaaatacaat

SEQ ID NO: 18387 - DNA, 637 bp, Artificial Sequence
  chemically treated genomic DNA (Homo sapiens) CpG-island No: 18387
gagggaagaaagttatatttatagggttcgttttattttttttcgttttttttcgtttttgtggttattgtttgcgtttttgtttatgggtttgtagtcgtgttgaatagttaagaatatagtattttgtattatcgttttttcgttggagtttcggttgtttgcggttgggcgtgcgtcgtagtatttatgaggtttcggtttgggggcggggtttcgcggtttcggtttcgttttaagaggacgcggattggtcggttgtagattggtacggggatgggttagcgttcgtcggcggtagttacggttgttgtcgaagggtttcgaagtcggggcgttgttgacgtttgcggtttcggttttttgcgtattcgggttatatagtagcggttagttggggtaggtgtgggagtagatggagagtttttagtgtgggtcgttgcgtacgattttttgttgaagcgtggcggtcgggcgggttcgagggttttgcgacggagggagggagtcgaagttggcggcggttcggcgggggcgtcggcgtttttttatttattttgacgggttttttagttcgaggttagagcggcgattttttggtaggaggaggtcgttcgttacgaggtcggagtgtagt

SEQ ID NO: 18388 - DNA, 637 bp, Artificial Sequence
  chemically treated genomic DNA (Homo sapiens) CpG-island No: 18388
actacactccgacctcgtaacgaacgacctcctcctaccaaaaaatcgccgctctaacctcgaactaaaaaacccgtcaaaataaataaaaaaacgccgacgcccccgccgaaccgccgccaacttcgactccctccctccgtcgcaaaaccctcgaacccgcccgaccgccacgcttcaacaaaaaatcgtacgcaacgacccacactaaaaactctccatctactcccacacctaccccaactaaccgctactatataacccgaatacgcaaaaaaccgaaaccgcaaacgtcaacaacgccccgacttcgaaacccttcgacaacaaccgtaactaccgccgacgaacgctaacccatccccgtaccaatctacaaccgaccaatccgcgtcctcttaaaacgaaaccgaaaccgcgaaaccccgcccccaaaccgaaacctcataaatactacgacgcacgcccaaccgcaaacaaccgaaactccaacgaaaaaacgataatacaaaatactatattcttaactattcaacacgactacaaacccataaacaaaaacgcaaacaataaccacaaaaacgaaaaaaaacgaaaaaaaataaaacgaaccctataaatataactttcttccctc

SEQ ID NO: 18389 - DNA, 746 bp, Artificial Sequence
  chemically treated genomic DNA (Homo sapiens) CpG-island No: 18389
gtttagggtttcggaagtggttttagagttttttagtaatatgttcgtagagaattttttcggaggcggttatagatattttcgtgacgtagaacgagttagagcgttttttggggtttttatggtgttgtttttagtttgtagtatttttattttttttttcgtttgagcgtcgggaacggaaaagtaggcggtcggttttagttgcgacgtagacgtcgcgtgggggtggggttgggcgagtaggtgacgttttaggcgagttcgttggtttttttatggtgtcgagcgcgttcgttcggacgttgtttttttaatcggtagagggcggtgtttaggaggtttcgcgagagttgcggggggcgggggggcggtgtcgaggttgggggtcggtggcggatggagttcgcgatggagtcggagattttggaggcgcgaattagtgagtgttcgggaggggcgcgggtcggatcggaatcggaatcgggggtacgaggcgggttttttttcggcgggggcggggtacgggtcgttttttttttacgtttcgttttcggttcgggaggggcggtgtttttagtcggttttttagattttggagcgatggaggatttcggtttcggcgcggtttagcggtgggagcgggcgtcgtttatttgtcggatttttgggttatgatttttgggacggcgagtgagttgcgtcgggaattttcgggacggagagagtagtttttaatttttaag

SEQ ID NO: 18390 - DNA, 746 bp, Artificial Sequence
  chemically treated genomic DNA (Homo sapiens) CpG-island No: 18390
cttaaaaattaaaaactactctctccgtcccgaaaattcccgacgcaactcactcgccgtcccaaaaatcataacccaaaaatccgacaaataaacgacgcccgctcccaccgctaaaccgcgccgaaaccgaaatcctccatcgctccaaaatctaaaaaaccgactaaaaacaccgcccctcccgaaccgaaaacgaaacgtaaaaaaaaaacgacccgtaccccgcccccgccgaaaaaaaacccgcctcgtacccccgattccgattccgatccgacccgcgcccctcccgaacactcactaattcgcgcctccaaaatctccgactccatcgcgaactccatccgccaccgacccccaacctcgacaccgcccccccgccccccgcaactctcgcgaaacctcctaaacaccgccctctaccgattaaaaaaacaacgtccgaacgaacgcgctcgacaccataaaaaaaccaacgaactcgcctaaaacgtcacctactcgcccaaccccacccccacgcgacgtctacgtcgcaactaaaaccgaccgcctacttttccgttcccgacgctcaaacgaaaaaaaaaataaaaatactacaaactaaaaacaacaccataaaaaccccaaaaaacgctctaactcgttctacgtcacgaaaatatctataaccgcctccgaaaaaattctctacgaacatattactaaaaaactctaaaaccacttccgaaaccctaaac

SEQ ID NO: 18391 - DNA, 746 bp, Artificial Sequence
  chemically treated genomic DNA (Homo sapiens) CpG-island No: 18391
tttgggggttggaggttgtttttttcgtttcgggggttttcggcgtagtttattcgtcgttttaggggttatggtttagggattcgataggtgggcggcgttcgtttttatcgttggatcgcgtcggggtcggggttttttatcgttttagggtttgaggggtcgattgaggatatcgtttttttcgggtcgggggcggggcgtgaggagggggcgattcgtatttcgttttcgtcgggaaggggttcgtttcgtgttttcggtttcggtttcggttcggttcgcgtttttttcggatatttattgattcgcgtttttagagttttcggttttatcgcgggttttattcgttatcggtttttagtttcggtatcgttttttcgtttttcgtagttttcgcgggattttttgggtatcgttttttgtcgattaaaggggtaacgttcgaacgggcgcgttcggtattatagagaggttaacgagttcgtttagagcgttatttattcgtttaattttatttttacgcggcgtttacgtcgtagttgggatcggtcgtttgttttttcgttttcggcgtttaggcgggagaggaagtggagatattgtaggttaagggtagtattatggaaattttaagggacgttttaattcgttttgcgttacggagatgtttgtgatcgttttcggaagaattttttgcgggtatgttgttgaggggttttgaggttattttcggagttttgagt

SEQ ID NO: 18392 - DNA, 746 bp, Artificial Sequence
  chemically treated genomic DNA (Homo sapiens) CpG-island No: 18392
actcaaaactccgaaaataacctcaaaacccctcaacaacatacccgcaaaaaattcttccgaaaacgatcacaaacatctccgtaacgcaaaacgaattaaaacgtcccttaaaatttccataatactacccttaacctacaatatctccacttcctctcccgcctaaacgccgaaaacgaaaaaacaaacgaccgatcccaactacgacgtaaacgccgcgtaaaaataaaattaaacgaataaataacgctctaaacgaactcgttaacctctctataataccgaacgcgcccgttcgaacgttacccctttaatcgacaaaaaacgatacccaaaaaatcccgcgaaaactacgaaaaacgaaaaaacgataccgaaactaaaaaccgataacgaataaaacccgcgataaaaccgaaaactctaaaaacgcgaatcaataaatatccgaaaaaaacgcgaaccgaaccgaaaccgaaaccgaaaacacgaaacgaaccccttcccgacgaaaacgaaatacgaatcgccccctcctcacgccccgcccccgacccgaaaaaaacgatatcctcaatcgacccctcaaaccctaaaacgataaaaaaccccgaccccgacgcgatccaacgataaaaacgaacgccgcccacctatcgaatccctaaaccataacccctaaaacgacgaataaactacgccgaaaacccccgaaacgaaaaaaacaacctccaacccccaaa

SEQ ID NO: 18393 - DNA, 997 bp, Artificial Sequence
  chemically treated genomic DNA (Homo sapiens) CpG-island No: 18393
ttcggcggcgagcgcgcgcggtcggggtttggtttattttgcgttttcggggaggacggggattcgggggtggttatagagggtagttatttttgtttcgaattgtaatttcgcggttttcgttcgcggtttagcgagtcgatttatttcggtaggcggttttttatcgggggtttcggtttgttaaagttgtcgggtcggggttggggtcggggtttgcgtcgggggtcgcgggacggttaggtcggggttcggggtcgttagggttaggtcgggtcgtatttgggaatcgttgtggaggtggtttttatttatgtcggttcggagggacgagcgcggcggtaggcgaggcggcgtgggggagacgtagacggcgaatcggtttgtgcgggcggacggggatttcggaggttcgaggaggcgtaggtaagcggcggtgattgtgggttcgagattttagaaacggttgaggttgttattacggcggcgacgttgtttgattgtcgggcgggcggcgagaatagattttagtagttgtgtaatagtttaagttcgtatttgggtttattgcgtttgcgcggtcgtttttaaataatacgtcggcgacgttagcgttcgcggaaagaggtagagggttgcggttcgttttttcgttgttcgttagacggatttgtttttgtatcgtaagtttcgttttcggatcgtgcgcgtttcgttgtgatttgtataaggagtcgattttttttacggcgttttattttaagtagttttttttttttttttagacgttttttttcggaattttagtttttttgttaggtagtgcgtaggcgttattcgggtatcgttttcggattagggttggtcgcgtagttacgtggtgggtttttaaaggtcgcggcgggatttagtaattttgggtagagttggtattcggcgttcgtatttttttggagcggcgagtattttggtagttgggattttagaggttttttta

SEQ ID NO: 18394 - DNA, 997 bp, Artificial Sequence
  chemically treated genomic DNA (Homo sapiens) CpG-island No: 18394
taaaaaaacctctaaaatcccaactaccaaaatactcgccgctccaaaaaaatacgaacgccgaataccaactctacccaaaattactaaatcccgccgcgacctttaaaaacccaccacgtaactacgcgaccaaccctaatccgaaaacgatacccgaataacgcctacgcactacctaacaaaaaaactaaaattccgaaaaaaaacgtctaaaaaaaaaaaaaaaactacttaaaataaaacgccgtaaaaaaaatcgactccttatacaaatcacaacgaaacgcgcacgatccgaaaacgaaacttacgatacaaaaacaaatccgtctaacgaacaacgaaaaaacgaaccgcaaccctctacctctttccgcgaacgctaacgtcgccgacgtattatttaaaaacgaccgcgcaaacgcaataaacccaaatacgaacttaaactattacacaactactaaaatctattctcgccgcccgcccgacaatcaaacaacgtcgccgccgtaataacaacctcaaccgtttctaaaatctcgaacccacaatcaccgccgcttacctacgcctcctcgaacctccgaaatccccgtccgcccgcacaaaccgattcgccgtctacgtctcccccacgccgcctcgcctaccgccgcgctcgtccctccgaaccgacataaataaaaaccacctccacaacgattcccaaatacgacccgacctaaccctaacgaccccgaaccccgacctaaccgtcccgcgacccccgacgcaaaccccgaccccaaccccgacccgacaactttaacaaaccgaaacccccgataaaaaaccgcctaccgaaataaatcgactcgctaaaccgcgaacgaaaaccgcgaaattacaattcgaaacaaaaataactaccctctataaccacccccgaatccccgtcctccccgaaaacgcaaaataaaccaaaccccgaccgcgcgcgctcgccgccgaa

SEQ ID NO: 18395 - DNA, 997 bp, Artificial Sequence
  chemically treated genomic DNA (Homo sapiens) CpG-island No: 18395
tggggagatttttggggttttagttgttaaggtattcgtcgttttaaggagatgcggacgtcggatattagttttgtttaagattgttgggtttcgtcgcggtttttaaaggtttattacgtggttgcgcggttagttttggttcggaggcggtgttcgggtggcgtttgcgtattgtttagtagaggggttggggtttcgagaaaaagcgtttggagaggaaggggaggttgtttggggtgggacgtcgtgggaggagtcggttttttatgtaaattatagcggagcgcgtacggttcggaggcggggtttgcgatgtaaagataggttcgtttggcgaatagcgagggggcgggtcgtaattttttgttttttttcgcgagcgttgacgtcgtcgacgtgttgtttaaaagcggtcgcgtaggcgtagtgagtttaaatgcgaatttaggttgttatataattgttggggtttgttttcgtcgttcgttcggtagttaggtagcgtcgtcgtcgtggtagtagttttagtcgtttttggagtttcgggtttatagttatcgtcgtttatttgcgttttttcgagttttcggagttttcgttcgttcgtataggtcggttcgtcgtttgcgttttttttacgtcgtttcgtttgtcgtcgcgttcgttttttcgggtcgatatgagtggggattatttttataacgatttttaggtacggttcggtttgattttggcggtttcggatttcggtttggtcgtttcgcgattttcggcgtaggtttcgattttagtttcggttcggtagttttgataggtcggagttttcggtgaggggtcgtttgtcggagtagatcggttcgttaggtcgcgagcgagggtcgcgaagttatagttcgaggtagggatggttgttttttgtggttattttcgggttttcgtttttttcgggggcgtagggtgagttagatttcggtcgcgcgcgttcgtcgtcgga

SEQ ID NO: 18396 - DNA, 997 bp, Artificial Sequence
  chemically treated genomic DNA (Homo sapiens) CpG-island No: 18396
tccgacgacgaacgcgcgcgaccgaaatctaactcaccctacgcccccgaaaaaaacgaaaacccgaaaataaccacaaaaaacaaccatccctacctcgaactataacttcgcgaccctcgctcgcgacctaacgaaccgatctactccgacaaacgacccctcaccgaaaactccgacctatcaaaactaccgaaccgaaactaaaatcgaaacctacgccgaaaatcgcgaaacgaccaaaccgaaatccgaaaccgccaaaatcaaaccgaaccgtacctaaaaatcgttataaaaataatccccactcatatcgacccgaaaaaacgaacgcgacgacaaacgaaacgacgtaaaaaaaacgcaaacgacgaaccgacctatacgaacgaacgaaaactccgaaaactcgaaaaaacgcaaataaacgacgataactataaacccgaaactccaaaaacgactaaaactactaccacgacgacgacgctacctaactaccgaacgaacgacgaaaacaaaccccaacaattatataacaacctaaattcgcatttaaactcactacgcctacgcgaccgcttttaaacaacacgtcgacgacgtcaacgctcgcgaaaaaaaacaaaaaattacgacccgccccctcgctattcgccaaacgaacctatctttacatcgcaaaccccgcctccgaaccgtacgcgctccgctataatttacataaaaaaccgactcctcccacgacgtcccaccccaaacaacctccccttcctctccaaacgctttttctcgaaaccccaacccctctactaaacaatacgcaaacgccacccgaacaccgcctccgaaccaaaactaaccgcgcaaccacgtaataaacctttaaaaaccgcgacgaaacccaacaatcttaaacaaaactaatatccgacgtccgcatctccttaaaacgacgaataccttaacaactaaaaccccaaaaatctcccca

SEQ ID NO: 18397 - DNA, 647 bp, Artificial Sequence
  chemically treated genomic DNA (Homo sapiens) CpG-island No: 18397
ttattttttttcggttttaggttcgggttttggtttttggtaaggtcggagtagtagggcggtgatagcgtagttcggcgcgggttacgtttttattttcggtgggcggggagggtgtttggggcgttggcgttcggttgcggtgggaggtggtgcgtgtcgcgtgggcgtcggttttacggggtttttttttcgttttttttgcgggatttcggggcgcggattcgcgggcgcgtcgggcgggatagggggaggggcgggacgtgttttcgggtttggcgcgaatggttttcggtcgttttcggttgcgggttatggtcgtttttcggcgcgtttttatacggttttcgttttagtttggtcgtagtttatttcgcgtcgttattgggtagatgggggcggcggtttttgtttttcggttttcggaagagtagagcggagcgcgtttgatcgagttaggttttcgagtgggattggaattcggggcgttttgaagtttggggaaagtaggagtagaagggaagggatgcgtttttcgtttttcggcggcgcggaatgggtttttttttagtttttgcgtaggtaagatttttttagttgcgcgttgtatcggggattttttagttcgtgaggtagttaagaggaga

SEQ ID NO: 18398 - DNA, 647 bp, Artificial Sequence
  chemically treated genomic DNA (Homo sapiens) CpG-island No: 18398
tctcctcttaactacctcacgaactaaaaaatccccgatacaacgcgcaactaaaaaaatcttacctacgcaaaaactaaaaaaaaacccattccgcgccgccgaaaaacgaaaaacgcatcccttcccttctactcctactttccccaaacttcaaaacgccccgaattccaatcccactcgaaaacctaactcgatcaaacgcgctccgctctactcttccgaaaaccgaaaaacaaaaaccgccgcccccatctacccaataacgacgcgaaataaactacgaccaaactaaaacgaaaaccgtataaaaacgcgccgaaaaacgaccataacccgcaaccgaaaacgaccgaaaaccattcgcgccaaacccgaaaacacgtcccgcccctccccctatcccgcccgacgcgcccgcgaatccgcgccccgaaatcccgcaaaaaaaacgaaaaaaaaaccccgtaaaaccgacgcccacgcgacacgcaccacctcccaccgcaaccgaacgccaacgccccaaacaccctccccgcccaccgaaaataaaaacgtaacccgcgccgaactacgctatcaccgccctactactccgaccttaccaaaaaccaaaacccgaacctaaaaccgaaaaaaaataa

SEQ ID NO: 18399 - DNA, 647 bp, Artificial Sequence
  chemically treated genomic DNA (Homo sapiens) CpG-island No: 18399
tttttttttggttgttttacgggttggggagttttcggtgtagcgcgtaattggggaaattttgtttacgtagaggttggaaggaggtttatttcgcgtcgtcggagagcggggagcgtatttttttttttttgtttttgttttttttaaattttagggcgtttcgggttttaattttattcggaagtttgattcggttaggcgcgtttcgttttgttttttcgaaagtcgggaggtaggagtcgtcgtttttatttgtttagtggcggcgcggggtgggttgcggttagattggggcggggatcgtgtggggacgcgtcggggagcggttatggttcgtagtcgagagcggtcggaggttattcgcgttaggttcgggagtacgtttcgtttttttttttgtttcgttcgacgcgttcgcgagttcgcgtttcgggatttcgtagggagggcggagagggggtttcgtggggtcggcgtttacgcggtacgtattattttttatcgtaatcggacgttagcgttttaagtatttttttcgtttatcgggagtgggggcgtggttcgcgtcggattgcgttgttatcgttttgttgtttcggttttgttaggggttaaggttcgaatttgaggtcggggaggggtgg

SEQ ID NO: 18400 - DNA, 647 bp, Artificial Sequence
  chemically treated genomic DNA (Homo sapiens) CpG-island No: 18400
ccacccctccccgacctcaaattcgaaccttaacccctaacaaaaccgaaacaacaaaacgataacaacgcaatccgacgcgaaccacgcccccactcccgataaacgaaaaaaatacttaaaacgctaacgtccgattacgataaaaaataatacgtaccgcgtaaacgccgaccccacgaaaccccctctccgccctccctacgaaatcccgaaacgcgaactcgcgaacgcgtcgaacgaaacaaaaaaaaaaacgaaacgtactcccgaacctaacgcgaataacctccgaccgctctcgactacgaaccataaccgctccccgacgcgtccccacacgatccccgccccaatctaaccgcaacccaccccgcgccgccactaaacaaataaaaacgacgactcctacctcccgactttcgaaaaaacaaaacgaaacgcgcctaaccgaatcaaacttccgaataaaattaaaacccgaaacgccctaaaatttaaaaaaaacaaaaacaaaaaaaaaaaaatacgctccccgctctccgacgacgcgaaataaacctccttccaacctctacgtaaacaaaatttccccaattacgcgctacaccgaaaactccccaacccgtaaaacaaccaaaaaaaaa

SEQ ID NO: 18401 - DNA, 633 bp, Artificial Sequence
  chemically treated genomic DNA (Homo sapiens) CpG-island No: 18401
ggaatagacgcgagtttcgtcgggggtgcgggtgagggttgtagggagttcgcgaacgatagaaagtcgtttttcgtattttatcggagtattcgggaatacggtttttaggtgttttagcggtcgcgttttttcgttttcggttttttttcgtcgcgggtaggtttaatcgggaggcggcgtggtttcggagtcggttttaggttcgtattttttttttatttcgttttgggtagtcgtagttaaaagtcggaggttttaaagtggaattacgttgttttgtcgagtttggggcgattcgtttcggggagggcgagtttgaattgtagttttgcgttttttttacggttcgaggagttagttaagtttttagaggggttcggttcggttcgagtaagtttaggggcgaacggcgttatggagtttataggggcgcggttaagtttggaggcgtcgggattagcgttttttcgagaggtttcgtcggtcgaggagttgttcgtttcggtggttttttgtgtgtagggtggcggcgacggcggtggcgtttcggagatttcgagttttgacgtttagttaggggataggtttttgttttcgaaggaagaggtcgttttttaggagtaggaggag

SEQ ID NO: 18402 - DNA, 633 bp, Artificial Sequence
  chemically treated genomic DNA (Homo sapiens) CpG-island No: 18402
ctcctcctactcctaaaaaacgacctcttccttcgaaaacaaaaacctatcccctaactaaacgtcaaaactcgaaatctccgaaacgccaccgccgtcgccgccaccctacacacaaaaaaccaccgaaacgaacaactcctcgaccgacgaaacctctcgaaaaaacgctaatcccgacgcctccaaacttaaccgcgcccctataaactccataacgccgttcgcccctaaacttactcgaaccgaaccgaacccctctaaaaacttaactaactcctcgaaccgtaaaaaaaacgcaaaactacaattcaaactcgccctccccgaaacgaatcgccccaaactcgacaaaacaacgtaattccactttaaaacctccgacttttaactacgactacccaaaacgaaataaaaaaaaaatacgaacctaaaaccgactccgaaaccacgccgcctcccgattaaacctacccgcgacgaaaaaaaaccgaaaacgaaaaaacgcgaccgctaaaacacctaaaaaccgtattcccgaatactccgataaaatacgaaaaacgactttctatcgttcgcgaactccctacaaccctcacccgcacccccgacgaaactcgcgtctattcc

SEQ ID NO: 18403 - DNA, 633 bp, Artificial Sequence
  chemically treated genomic DNA (Homo sapiens) CpG-island No: 18403
ttttttttgtttttggggggcggttttttttttcggggataggggtttattttttagttgagcgttaggattcggggttttcgaagcgttatcgtcgtcgtcgttattttgtatataggggattatcggggcgggtagtttttcggtcggcggggtttttcggaagggcgttggtttcggcgtttttaaatttagtcgcgtttttatgggttttatgacgtcgttcgtttttggatttgttcgggtcgaatcgggtttttttggagatttaattaatttttcgggtcgtggaaggagcgtagggttgtagtttaggttcgtttttttcgaggcgagtcgttttaggttcgataagataacgtagttttattttggagttttcggtttttagttgcggttgtttagggcgaagtgggaggaggatgcgggtttggggtcggtttcggggttacgtcgtttttcggttgaatttgttcgcgacgggggagggtcgggggcggggaggcgcggtcgttgggatatttggaagtcgtgttttcgagtgtttcggtggaatgcggggggcgattttttgtcgttcgcgggttttttgtagtttttattcgtattttcggcggggttcgcgtttgtttt

SEQ ID NO: 18404 - DNA, 633 bp, Artificial Sequence
  chemically treated genomic DNA (Homo sapiens) CpG-island No: 18404
aaaacaaacgcgaaccccgccgaaaatacgaataaaaactacaaaaaacccgcgaacgacaaaaaatcgccccccgcattccaccgaaacactcgaaaacacgacttccaaatatcccaacgaccgcgcctccccgcccccgaccctcccccgtcgcgaacaaattcaaccgaaaaacgacgtaaccccgaaaccgaccccaaacccgcatcctcctcccacttcgccctaaacaaccgcaactaaaaaccgaaaactccaaaataaaactacgttatcttatcgaacctaaaacgactcgcctcgaaaaaaacgaacctaaactacaaccctacgctccttccacgacccgaaaaattaattaaatctccaaaaaaacccgattcgacccgaacaaatccaaaaacgaacgacgtcataaaacccataaaaacgcgactaaatttaaaaacgccgaaaccaacgcccttccgaaaaaccccgccgaccgaaaaactacccgccccgataatcccctatatacaaaataacgacgacgacgataacgcttcgaaaaccccgaatcctaacgctcaactaaaaaataaacccctatccccgaaaaaaaaaaccgccccccaaaaacaaaaaaaa

SEQ ID NO: 18405 - DNA, 627 bp, Artificial Sequence
  chemically treated genomic DNA (Homo sapiens) CpG-island No: 18405
ttgtcgcgcgcgttttttttttttgttcgtcgattttattttgtaggcggttaagtttttgtagtagtagtagtaataggcggtggtattgggcggcgagggggcggaggacgtatagttcggttcgggcggttgttgcgttaagtgtaagaagcgggtgtagttcgcggatacgttggggttaagtttggttagcgtgaagtattttagcgaggcggaggagtcgtaggtgtcgttcgtcgtgttttcgcgtttgcgaagtttttttatgcgtgtcgaggatttggagtagttcggggggttgttggtcgcggcggtagtggtcgcgttttttttagcgtcgttttttcggtttcggtcgtttttttagttttcggggtcgagcgtcgcggtcgagcgtttgtagcggtagcgcgtgtgtttggagcgcgtgtagtgttcgacggtttcgggcgttgaggtgaagggtttcggtcgggtgtttagttgttttgggtttagggtcgtgatcgtgcgttatatttttatcgagtggcgtttttttttggacgtgtcggttgagttgtagttcgagtcgttggagttatagtagttagaggtatcgtttggggttttcgagttagggtt

SEQ ID NO: 18406 - DNA, 627 bp, Artificial Sequence
  chemically treated genomic DNA (Homo sapiens) CpG-island No: 18406
aaccctaactcgaaaaccccaaacgatacctctaactactataactccaacgactcgaactacaactcaaccgacacgtccaaaaaaaaacgccactcgataaaaatataacgcacgatcacgaccctaaacccaaaacaactaaacacccgaccgaaacccttcacctcaacgcccgaaaccgtcgaacactacacgcgctccaaacacacgcgctaccgctacaaacgctcgaccgcgacgctcgaccccgaaaactaaaaaaacgaccgaaaccgaaaaaacgacgctaaaaaaaacgcgaccactaccgccgcgaccaacaaccccccgaactactccaaatcctcgacacgcataaaaaaacttcgcaaacgcgaaaacacgacgaacgacacctacgactcctccgcctcgctaaaatacttcacgctaaccaaacttaaccccaacgtatccgcgaactacacccgcttcttacacttaacgcaacaaccgcccgaaccgaactatacgtcctccgccccctcgccgcccaataccaccgcctattactactactactacaaaaacttaaccgcctacaaaataaaatcgacgaacaaaaaaaaaaaacgcgcgcgacaa

SEQ ID NO: 18407 - DNA, 627 bp, Artificial Sequence
  chemically treated genomic DNA (Homo sapiens) CpG-island No: 18407
gattttggttcggaggttttagacggtgtttttggttgttgtggttttagcggttcgggttgtagtttagtcggtacgtttaggaaggagcgttattcggtaaaggtgtagcgtacggttacggttttgggtttagggtagttgagtattcggtcggagttttttattttagcgttcgaggtcgtcgagtattgtacgcgttttaggtatacgcgttgtcgttgtagacgttcggtcgcggcgttcggtttcgggagttggaagagcggtcggagtcgggaaggcggcgttgaaaggggcgcggttattgtcgtcgcggttagtagtttttcgagttgttttaggttttcggtacgtatagggaagtttcgtaggcgcgagagtacggcgggcggtatttgcggttttttcgtttcgttgaagtgttttacgttggttaggtttagttttagcgtgttcgcgaattgtattcgttttttgtatttggcgtagtagtcgttcgggtcgagttgtgcgtttttcgttttttcgtcgtttagtgttatcgtttgttgttgttgttgttgtaggaatttggtcgtttgtaagatggggtcggcgggtaaggaaaaggagcgcgcgcggtag

SEQ ID NO: 18408 - DNA, 627 bp, Artificial Sequence
  chemically treated genomic DNA (Homo sapiens) CpG-island No: 18408
ctaccgcgcgcgctccttttccttacccgccgaccccatcttacaaacgaccaaattcctacaacaacaacaacaacaaacgataacactaaacgacgaaaaaacgaaaaacgcacaactcgacccgaacgactactacgccaaatacaaaaaacgaatacaattcgcgaacacgctaaaactaaacctaaccaacgtaaaacacttcaacgaaacgaaaaaaccgcaaataccgcccgccgtactctcgcgcctacgaaacttccctatacgtaccgaaaacctaaaacaactcgaaaaactactaaccgcgacgacaataaccgcgcccctttcaacgccgccttcccgactccgaccgctcttccaactcccgaaaccgaacgccgcgaccgaacgtctacaacgacaacgcgtatacctaaaacgcgtacaatactcgacgacctcgaacgctaaaataaaaaactccgaccgaatactcaactaccctaaacccaaaaccgtaaccgtacgctacacctttaccgaataacgctccttcctaaacgtaccgactaaactacaacccgaaccgctaaaaccacaacaaccaaaaacaccgtctaaaacctccgaaccaaaatc

SEQ ID NO: 18409 - DNA, 706 bp, Artificial Sequence
  chemically treated genomic DNA (Homo sapiens) CpG-island No: 18409
agagttttcgcgagggttcggcgcgttagttgattttttttttgagagtagggagtggaggcgcgagcgttttttttggcggtcgcgcgttttcgtttttcgttttatttcgtcgcggttgttcgggcgcgtcgtttatatttttgcgcgtagttttcgttcgttcggggattttcggcgagtcgcgtcgcgaagggggaggtgttcggtcgcggtcgggagggagtcggtaggcggcgttttttttaaaagtcgcgagcgtcgcgttacggcgtcgtcgtcgtcgtcgtcgtcgtcggagttttcgtttcgtcgcgttgcgttcggttcgcgttgcgttagtcgtttcgttttttatatttcgtcggggattggtagtcgtcgtcgtatatttgtcgttatagttttcgtcggttattcgaacgttttcggggttagcgtcgagtggattatcggggatcgcgaggtattcgcgcgtcgtagatttcgcgcgggttggagtattcggtagagcgcgttatagcgtcgtggtttttgttgttcgggttgcgttagagtcgcggacgggcgcgtagagcgtcggggatttcggagtcgatttttagcgtcgcgatgcggagtatttattgtaggagatcgggggtttgggacgcgttggtcgaggtgtgatcggattttaggttagttataaagggtatttggtttt

SEQ ID NO: 18410 - DNA, 706 bp, Artificial Sequence
  chemically treated genomic DNA (Homo sapiens) CpG-island No: 18410
aaaaccaaataccctttataactaacctaaaatccgatcacacctcgaccaacgcgtcccaaacccccgatctcctacaataaatactccgcatcgcgacgctaaaaatcgactccgaaatccccgacgctctacgcgcccgtccgcgactctaacgcaacccgaacaacaaaaaccacgacgctataacgcgctctaccgaatactccaacccgcgcgaaatctacgacgcgcgaatacctcgcgatccccgataatccactcgacgctaaccccgaaaacgttcgaataaccgacgaaaactataacgacaaatatacgacgacgactaccaatccccgacgaaatataaaaaacgaaacgactaacgcaacgcgaaccgaacgcaacgcgacgaaacgaaaactccgacgacgacgacgacgacgacgacgccgtaacgcgacgctcgcgacttttaaaaaaaacgccgcctaccgactccctcccgaccgcgaccgaacacctcccccttcgcgacgcgactcgccgaaaatccccgaacgaacgaaaactacgcgcaaaaatataaacgacgcgcccgaacaaccgcgacgaaataaaacgaaaaacgaaaacgcgcgaccgccaaaaaaaacgctcgcgcctccactccctactctcaaaaaaaaaatcaactaacgcgccgaaccctcgcgaaaactct

SEQ ID NO: 18411 - DNA, 706 bp, Artificial Sequence
  chemically treated genomic DNA (Homo sapiens) CpG-island No: 18411
ggggttaagtgttttttgtggttagtttggggttcgattatatttcggttagcgcgttttaggttttcgattttttgtagtaggtgtttcgtatcgcggcgttagggatcggtttcggagttttcggcgttttgcgcgttcgttcgcggttttggcgtagttcgggtagtagaggttacggcgttgtggcgcgttttgtcgggtgttttagttcgcgcggggtttgcggcgcgcgggtgtttcgcggttttcggtgatttattcggcgttggtttcgagaacgttcgggtagtcggcggaggttgtggcggtagatgtgcggcggcggttgttagttttcggcggggtgtgggaagcggagcgattagcgtagcgcgagtcgggcgtagcgcggcggggcgaggatttcggcggcggcgacggcggcggcggcgtcgtggcgcggcgttcgcggtttttaaaggggacgtcgtttgtcggttttttttcggtcgcggtcgaatattttttttttcgcggcgcggttcgtcggggattttcgagcgggcgggagttgcgcgtaggggtgtggacggcgcgttcgggtagtcgcggcggggtggggcggagggcgggggcgcgcggtcgttaaggggggcgttcgcgtttttattttttgtttttaaaggagagattagttggcgcgtcggattttcgcggggatttt

SEQ ID NO: 18412 - DNA, 706 bp, Artificial Sequence
  chemically treated genomic DNA (Homo sapiens) CpG-island No: 18412
aaaatccccgcgaaaatccgacgcgccaactaatctctcctttaaaaacaaaaaataaaaacgcgaacgccccccttaacgaccgcgcgcccccgccctccgccccaccccgccgcgactacccgaacgcgccgtccacacccctacgcgcaactcccgcccgctcgaaaatccccgacgaaccgcgccgcgaaaaaaaaaatattcgaccgcgaccgaaaaaaaaccgacaaacgacgtcccctttaaaaaccgcgaacgccgcgccacgacgccgccgccgccgtcgccgccgccgaaatcctcgccccgccgcgctacgcccgactcgcgctacgctaatcgctccgcttcccacaccccgccgaaaactaacaaccgccgccgcacatctaccgccacaacctccgccgactacccgaacgttctcgaaaccaacgccgaataaatcaccgaaaaccgcgaaacacccgcgcgccgcaaaccccgcgcgaactaaaacacccgacaaaacgcgccacaacgccgtaacctctactacccgaactacgccaaaaccgcgaacgaacgcgcaaaacgccgaaaactccgaaaccgatccctaacgccgcgatacgaaacacctactacaaaaaatcgaaaacctaaaacgcgctaaccgaaatataatcgaaccccaaactaaccacaaaaaacacttaacccc

SEQ ID NO: 18413 - DNA, 823 bp, Artificial Sequence
  chemically treated genomic DNA (Homo sapiens) CpG-island No: 18413
gaaggcgcgggtcgtcgagtgggcggcggtcgttcgcgaggcgagtttggaagtagtatttgaatcgtttggagggtgattaggttgcgcggcgagttttgcgattgatacggttaatgcgttagtggttgagtggttttggttatgtagggacgcggcgcgtacgtatatttatagattcgtagaagtttaggttcgcgtcggagagaagttataggtaggaaggggtttatttattcgcggtttcgcgttttaggtttgcgttatttcgagtcggtttagacgtcgttttagtcggcggcgggagcgtagcgttttcgttttttttagaagaatttttttcgttcgcgtcgtcgtcgcggttgtagttttcgtcgtttacggttttcgtcgttttttcggcgtttagttttcgtcgttttttttgaagttgttgttgtttttcggcgtcgattagcgtttttatcgagaaagcgtgcgttttgaggtttagtatgttgtacggcgagttttttcgtttttcggttatttttttcgtttcgcgttcgttcgttttttttttatatatatttacgcgggtatacgcgcgttttcgttttttttttattaaaaattaaaaggttttcggggtttttcgagatttgtttttttttttatcgcgggtaaaaaatagatttggcgttttcgttttttcgtttgtgttgggatttaggaatcggcgacgcgtcggttaagtttttttttttgggtttttttcgcgcgtttttttattgatgtatttttttgtttttattttttttatttttttttgttgtttcgaggt

SEQ ID NO: 18414 - DNA, 823 bp, Artificial Sequence
  chemically treated genomic DNA (Homo sapiens) CpG-island No: 18414
acctcgaaacaacaaaaaaaaataaaaaaaataaaaacaaaaaaatacatcaataaaaaaacgcgcgaaaaaaacccaaaaaaaaaaacttaaccgacgcgtcgccgattcctaaatcccaacacaaacgaaaaaacgaaaacgccaaatctattttttacccgcgataaaaaaaaaaacaaatctcgaaaaaccccgaaaaccttttaatttttaataaaaaaaaaacgaaaacgcgcgtatacccgcgtaaatatatataaaaaaaaaacgaacgaacgcgaaacgaaaaaaataaccgaaaaacgaaaaaactcgccgtacaacatactaaacctcaaaacgcacgctttctcgataaaaacgctaatcgacgccgaaaaacaacaacaacttcaaaaaaaacgacgaaaactaaacgccgaaaaaacgacgaaaaccgtaaacgacgaaaactacaaccgcgacgacgacgcgaacgaaaaaaattcttctaaaaaaaacgaaaacgctacgctcccgccgccgactaaaacgacgtctaaaccgactcgaaataacgcaaacctaaaacgcgaaaccgcgaataaataaaccccttcctacctataacttctctccgacgcgaacctaaacttctacgaatctataaatatacgtacgcgccgcgtccctacataaccaaaaccactcaaccactaacgcattaaccgtatcaatcgcaaaactcgccgcgcaacctaatcaccctccaaacgattcaaatactacttccaaactcgcctcgcgaacgaccgccgcccactcgacgacccgcgccttc

SEQ ID NO: 18415 - DNA, 823 bp, Artificial Sequence
  chemically treated genomic DNA (Homo sapiens) CpG-island No: 18415
atttcggagtagtaggaggaggtggaaggggtgggagtaaaggagtgtattagtgagagagcgcgcgagagagatttaggaaaggagatttggtcggcgcgtcgtcggtttttggattttaatataagcgagaaagcggaaacgttaaatttgttttttgttcgcggtggggaagggggtagatttcgggaggtttcgagagttttttagtttttggtgggggaagagcgagagcgcgcgtgtgttcgcgtgagtgtatatgagagaggggcgggcgggcgcggggcgggggggatggtcgagaagcgaaggggttcgtcgtgtagtatgttaagttttaaggcgtacgttttttcggtggaggcgttgatcggcgtcgagaagtagtaatagttttagaagaagcggcgaaaattgggcgtcgaagaggcggcgggggtcgtggacgacggaggttgtagtcgcggcggcggcgcgggcgaaaagggtttttttgagggagacgaaggcgttgcgttttcgtcgtcggttggggcgacgtttgggtcggttcggagtggcgtagatttggagcgcggagtcgcgggtgagtgggtttttttttgtttataattttttttcggcgcgaatttgaatttttgcgagtttgtgggtgtgcgtgcgcgtcgcgtttttatatggttaaggttatttagttattagcgtattggtcgtgttagtcgtaaagttcgtcgcgtaatttggttattttttagacggtttagatattgtttttaggttcgtttcgcgggcggtcgtcgtttattcggcgattcgcgttttt

SEQ ID NO: 18416 - DNA, 823 bp, Artificial Sequence
  chemically treated genomic DNA (Homo sapiens) CpG-island No: 18416
aaaaacgcgaatcgccgaataaacgacgaccgcccgcgaaacgaacctaaaaacaatatctaaaccgtctaaaaaataaccaaattacgcgacgaactttacgactaacacgaccaatacgctaataactaaataaccttaaccatataaaaacgcgacgcgcacgcacacccacaaactcgcaaaaattcaaattcgcgccgaaaaaaaattataaacaaaaaaaaacccactcacccgcgactccgcgctccaaatctacgccactccgaaccgacccaaacgtcgccccaaccgacgacgaaaacgcaacgccttcgtctccctcaaaaaaacccttttcgcccgcgccgccgccgcgactacaacctccgtcgtccacgacccccgccgcctcttcgacgcccaattttcgccgcttcttctaaaactattactacttctcgacgccgatcaacgcctccaccgaaaaaacgtacgccttaaaacttaacatactacacgacgaaccccttcgcttctcgaccatcccccccgccccgcgcccgcccgcccctctctcatatacactcacgcgaacacacgcgcgctctcgctcttcccccaccaaaaactaaaaaactctcgaaacctcccgaaatctacccccttccccaccgcgaacaaaaaacaaatttaacgtttccgctttctcgcttatattaaaatccaaaaaccgacgacgcgccgaccaaatctcctttcctaaatctctctcgcgcgctctctcactaatacactcctttactcccaccccttccacctcctcctactactccgaaat

SEQ ID NO: 18417 - DNA, 527 bp, Artificial Sequence
  chemically treated genomic DNA (Homo sapiens) CpG-island No: 18417
ttagtgtaagttttcgtttcggaatttcggttttagtttagttcgcgtttttttttttggaaagatttggtcggtcgcgttttcgaattttcgaggcgtgggtgttaggttaagcggggttggttcgatcggtcgtttttagttttttttatttgttggaaagtttaggtttaagaatcgcgttagcggcggtagtacgttattcggcggttacggggagttagggagcgcggaacgcgggtttttgttgataagtgtaaagtacggttttttcggtgttaagtgtatagtaagtgcgaagaataaatatattatttttcggggcggttgtttcgaaaacgttttttagttgtttgcgttttagagttcgttaagggttatagtttagtgtgggcgttcgcgtcgcgtttgcgttttcgagcgtcggtcgagaagggcgcgtagttatagttattatatgttattagtttcgtaaggcgtttgatttttttaaggggaattcgtaatgtttattaaaagttttagaa

SEQ ID NO: 18418 - DNA, 527 bp, Artificial Sequence
  chemically treated genomic DNA (Homo sapiens) CpG-island No: 18418
ttctaaaacttttaataaacattacgaattccccttaaaaaaatcaaacgccttacgaaactaataacatataataactataactacgcgcccttctcgaccgacgctcgaaaacgcaaacgcgacgcgaacgcccacactaaactataacccttaacgaactctaaaacgcaaacaactaaaaaacgttttcgaaacaaccgccccgaaaaataatatatttattcttcgcacttactatacacttaacaccgaaaaaaccgtactttacacttatcaacaaaaacccgcgttccgcgctccctaactccccgtaaccgccgaataacgtactaccgccgctaacgcgattcttaaacctaaactttccaacaaataaaaaaaactaaaaacgaccgatcgaaccaaccccgcttaacctaacacccacgcctcgaaaattcgaaaacgcgaccgaccaaatctttccaaaaaaaaaaacgcgaactaaactaaaaccgaaattccgaaacgaaaacttacactaa

SEQ ID NO: 18419 - DNA, 527 bp, Artificial Sequence
  chemically treated genomic DNA (Homo sapiens) CpG-island No: 18419
ttttgaggtttttggtgagtattacgagttttttttagaggagttaggcgttttgcggggttagtggtatgtggtggttgtggttgcgcgtttttttcggtcggcgttcggaggcgtaggcgcggcgcggacgtttatattaagttataatttttgacgggttttgaaacgtaggtagttgagaggcgttttcgagatagtcgtttcgggagatgatgtatttatttttcgtatttattgtgtatttagtatcgagagggtcgtattttgtatttattaatagaaattcgcgtttcgcgttttttgatttttcgtggtcgtcgagtgacgtgttgtcgtcgttggcgcggtttttgggtttgggttttttaataggtggagagagttggaagcgatcggtcggattagtttcgtttagtttgatatttacgtttcgggggttcgggggcgcggtcggttaggtttttttagggaagggggcgcgggttgggttggagtcgggatttcggagcgggggtttatattgg

SEQ ID NO: 18420 - DNA, 527 bp, Artificial Sequence
  chemically treated genomic DNA (Homo sapiens) CpG-island No: 18420
ccaatataaacccccgctccgaaatcccgactccaacccaacccgcgcccccttccctaaaaaaacctaaccgaccgcgcccccgaacccccgaaacgtaaatatcaaactaaacgaaactaatccgaccgatcgcttccaactctctccacctattaaaaaacccaaacccaaaaaccgcgccaacgacgacaacacgtcactcgacgaccacgaaaaatcaaaaaacgcgaaacgcgaatttctattaataaatacaaaatacgaccctctcgatactaaatacacaataaatacgaaaaataaatacatcatctcccgaaacgactatctcgaaaacgcctctcaactacctacgtttcaaaacccgtcaaaaattataacttaatataaacgtccgcgccgcgcctacgcctccgaacgccgaccgaaaaaaacgcgcaaccacaaccaccacataccactaaccccgcaaaacgcctaactcctctaaaaaaaactcgtaatactcaccaaaaacctcaaaa

SEQ ID NO: 18421 - DNA, 501 bp, Artificial Sequence
  chemically treated genomic DNA (Homo sapiens) CpG-island No: 18421
tttttcgtcggtagcgttttggttttgggcgttcgtcgttttggttatggaggtatagtggtcgcgtttcggggagtttgggtttttttgcggtttcgagttttcgcggcgttcgcgtttcgatttttcggtttcggttttttttaggttcggttgttttcggttttttattgatttcgttagtcgtattatttatttttttttttcgtagacgtaaattcgaatacgtttcggttttgggtttagggtttcggtttcgtttggttttataggattcgggggcggggtaggtcggtagagtttagttcgcgtcgtgggtttatatgtttttatttcgtgattttgatcgcgtttcggttataattttttttgcgttataacggggataataattttcggtcggtttgtcggatggtggcgggataatatatttcggtgagggaaggatcgagtttggtagagatatttaattgttttattgtgtggttgtttatagttcgt

SEQ ID NO: 18422 - DNA, 501 bp, Artificial Sequence
  chemically treated genomic DNA (Homo sapiens) CpG-island No: 18422
acgaactataaacaaccacacaataaaacaattaaatatctctaccaaactcgatccttccctcaccgaaatatattatcccgccaccatccgacaaaccgaccgaaaattattatccccgttataacgcaaaaaaaattataaccgaaacgcgatcaaaatcacgaaataaaaacatataaacccacgacgcgaactaaactctaccgacctaccccgcccccgaatcctataaaaccaaacgaaaccgaaaccctaaacccaaaaccgaaacgtattcgaatttacgtctacgaaaaaaaaaaataaataatacgactaacgaaatcaataaaaaaccgaaaacaaccgaacctaaaaaaaaccgaaaccgaaaaatcgaaacgcgaacgccgcgaaaactcgaaaccgcaaaaaaacccaaactccccgaaacgcgaccactatacctccataaccaaaacgacgaacgcccaaaaccaaaacgctaccgacgaaaaa

SEQ ID NO: 18423 - DNA, 501 bp, Artificial Sequence
  chemically treated genomic DNA (Homo sapiens) CpG-island No: 18423
gcggattgtgaatagttatatagtgggatagttaagtgtttttgttaagttcggttttttttttatcgggatatattatttcgttattattcggtaggtcggtcggggattattattttcgttgtaacgtagaggaagttatggtcgggacgcggttagggttacgaaataaaaatatgtggatttacggcgcgagttgagttttgtcggtttatttcgttttcgaattttgtagagttaggcgaggtcgaggttttaggtttaaggtcggggcgtattcgggtttacgtttgcgggagaaagaggtgggtggtgcggttggcgaagttagtgagggatcggagatagtcgggtttggagagagtcgggatcggagagtcggggcgcgggcgtcgcggaggttcggagtcgtaaggaggtttaggtttttcgggacgcggttattgtatttttatagttaaagcggcgggcgtttaaggttagagcgttatcgacgagaaa

SEQ ID NO: 18424 - DNA, 501 bp, Artificial Sequence
  chemically treated genomic DNA (Homo sapiens) CpG-island No: 18424
tttctcgtcgataacgctctaaccttaaacgcccgccgctttaactataaaaatacaataaccgcgtcccgaaaaacctaaacctccttacgactccgaacctccgcgacgcccgcgccccgactctccgatcccgactctctccaaacccgactatctccgatccctcactaacttcgccaaccgcaccacccacctctttctcccgcaaacgtaaacccgaatacgccccgaccttaaacctaaaacctcgacctcgcctaactctacaaaattcgaaaacgaaataaaccgacaaaactcaactcgcgccgtaaatccacatatttttatttcgtaaccctaaccgcgtcccgaccataacttcctctacgttacaacgaaaataataatccccgaccgacctaccgaataataacgaaataatatatcccgataaaaaaaaaaccgaacttaacaaaaacacttaactatcccactatataactattcacaatccgc

SEQ ID NO: 18425 - DNA, 611 bp, Artificial Sequence
  chemically treated genomic DNA (Homo sapiens) CpG-island No: 18425
tgcgtcgggaggcgggtttcgcgttgcggaaagtttatcgcggcgggcggggggaggtttcggtttcgttcgtcggcgtttttttgtagattttattattaattagttttaaggattgtttattggtaatttaaataaagcgaatgtttcgaattttttttcggtttagcggtttggttgcgagattagtagagcgttcgggacgcgggtcggcgcggtcgatagttgcggcggtcgcgggattttttttcgttcggttcgcggttcgcgtttcgcgttcgtagttggtttcgtacgtcggttcgacgcgtttttaaatcgtttttttttttttgttgttgtagttttcgggttttttttgtttgattatttttttttttcggtgttcgtcgggtttcgcgtagttttttttacggtcgtttcgtcgtttttcgtttttgtcggttcgcgtttttttttttaattttaaattttattttcgaaatttttcgtcgttttttcgaaaatgtttttttcgcgtttttgttttaaatatttttttttagagtttcgtttttattaagaagtttttttagaattttttttttttttttcgaggaaaaattttttta

SEQ ID NO: 18426 - DNA, 611 bp, Artificial Sequence
  chemically treated genomic DNA (Homo sapiens) CpG-island No: 18426
taaaaaaatttttcctcgaaaaaaaaaaaaaaaattctaaaaaaacttcttaataaaaacgaaactctaaaaaaaaatatttaaaacaaaaacgcgaaaaaaacattttcgaaaaaacgacgaaaaatttcgaaaataaaatttaaaattaaaaaaaaaaacgcgaaccgacaaaaacgaaaaacgacgaaacgaccgtaaaaaaaactacgcgaaacccgacgaacaccgaaaaaaaaaaataatcaaacaaaaaaaacccgaaaactacaacaacaaaaaaaaaaaaacgatttaaaaacgcgtcgaaccgacgtacgaaaccaactacgaacgcgaaacgcgaaccgcgaaccgaacgaaaaaaaatcccgcgaccgccgcaactatcgaccgcgccgacccgcgtcccgaacgctctactaatctcgcaaccaaaccgctaaaccgaaaaaaaattcgaaacattcgctttatttaaattaccaataaacaatccttaaaactaattaataataaaatctacaaaaaaacgccgacgaacgaaaccgaaacctccccccgcccgccgcgataaactttccgcaacgcgaaacccgcctcccgacgca

SEQ ID NO: 18427 - DNA, 611 bp, Artificial Sequence
  chemically treated genomic DNA (Homo sapiens) CpG-island No: 18427
tgaggagattttttttcgggagggggagggaaggttttgaggagattttttggtgggagcgagattttgaggagaaatgtttggggtagagacgcggaggagatattttcgagggggcggcgaagagtttcgggggtagagtttggggttgggggagggggcgcgggtcgataggggcggggggcgacgaggcggtcgtggagggggttgcgcggggttcggcgggtatcggaggaaggaagtgattagataggaagggttcgggagttgtagtagtaggaggaggagggcggtttgggagcgcgtcgggtcggcgtgcggggttagttgcgggcgcggggcgcgggtcgcgggtcgggcggggaggggtttcgcggtcgtcgtagttgtcggtcgcgtcggttcgcgtttcgggcgttttgttggtttcgtagttagatcgttgggtcgggaaggaattcgaggtattcgttttgtttaagttgttagtagatagtttttaggattaattaatggtggaatttgtagggggacgtcggcgagcggggtcggggttttttttcgttcgtcgcggtgaatttttcgtagcgcggggttcgtttttcggcgta

SEQ ID NO: 18428 - DNA, 611 bp, Artificial Sequence
  chemically treated genomic DNA (Homo sapiens) CpG-island No: 18428
tacgccgaaaaacgaaccccgcgctacgaaaaattcaccgcgacgaacgaaaaaaaaccccgaccccgctcgccgacgtccccctacaaattccaccattaattaatcctaaaaactatctactaacaacttaaacaaaacgaatacctcgaattccttcccgacccaacgatctaactacgaaaccaacaaaacgcccgaaacgcgaaccgacgcgaccgacaactacgacgaccgcgaaacccctccccgcccgacccgcgacccgcgccccgcgcccgcaactaaccccgcacgccgacccgacgcgctcccaaaccgccctcctcctcctactactacaactcccgaacccttcctatctaatcacttccttcctccgatacccgccgaaccccgcgcaaccccctccacgaccgcctcgtcgccccccgcccctatcgacccgcgccccctcccccaaccccaaactctacccccgaaactcttcgccgccccctcgaaaatatctcctccgcgtctctaccccaaacatttctcctcaaaatctcgctcccaccaaaaaatctcctcaaaaccttccctccccctcccgaaaaaaaatctcctca

SEQ ID NO: 18429 - DNA, 766 bp, Artificial Sequence
  chemically treated genomic DNA (Homo sapiens) CpG-island No: 18429
atgacgaatttttggttgaagagcgggtaatttttcgtttttttgcggaaagttatggtagcgggcgcgtagcggtcggcggggttcgtattttgcgtttacgaatcgtagcgtaaatttttttagtatcggttcggttcgttcgtcggttcgtcgttcgtttttttatagtcgttcgttcgtttagcgcggaataatttcggggttcgtttttttttttcgttcgttttcggtcgttcgtaatcgttttcggtcgtagttttcgtttagttttcgtttagttcgcggttcgtattcggcgcgtttggtttcgtttttcgcgggtttaattttttagtcgttgggtacgcgcgggttatcggggcggaggcgtacgggggcggcgagcggggttcggttttttttcgtttcgcgttagcgtcgcgttcggtcgtattttcggggttcgaggtttagtcgttcgcggtggagaaagtaggtcgcggaggaggcgggcgtttaggtttgttcggataggaagtgggtttagtttttttatttttcgtttcgttttttttttcgcgggaagggtaggtttcggaggtagcgagcgtttcgggggtggtcgggtagtcggatgttttcggggttgcgggttgtggtttcgggggttgagggcggcgcgggtgcggcggaagtagggaagtcgcgaatcggttttttggttggttatagcgttttgtacggacgattagtgaatggagattatttaagtatttatcgagaa

SEQ ID NO: 18430 - DNA, 766 bp, Artificial Sequence
  chemically treated genomic DNA (Homo sapiens) CpG-island No: 18430
ttctcgataaatacttaaataatctccattcactaatcgtccgtacaaaacgctataaccaaccaaaaaaccgattcgcgacttccctacttccgccgcacccgcgccgccctcaacccccgaaaccacaacccgcaaccccgaaaacatccgactacccgaccacccccgaaacgctcgctacctccgaaacctacccttcccgcgaaaaaaaaaacgaaacgaaaaataaaaaaactaaacccacttcctatccgaacaaacctaaacgcccgcctcctccgcgacctactttctccaccgcgaacgactaaacctcgaaccccgaaaatacgaccgaacgcgacgctaacgcgaaacgaaaaaaaaccgaaccccgctcgccgcccccgtacgcctccgccccgataacccgcgcgtacccaacgactaaaaaattaaacccgcgaaaaacgaaaccaaacgcgccgaatacgaaccgcgaactaaacgaaaactaaacgaaaactacgaccgaaaacgattacgaacgaccgaaaacgaacgaaaaaaaaaaacgaaccccgaaattattccgcgctaaacgaacgaacgactataaaaaaacgaacgacgaaccgacgaacgaaccgaaccgatactaaaaaaatttacgctacgattcgtaaacgcaaaatacgaaccccgccgaccgctacgcgcccgctaccataactttccgcaaaaaaacgaaaaattacccgctcttcaaccaaaaattcgtcat

SEQ ID NO: 18431 - DNA, 766 bp, Artificial Sequence
  chemically treated genomic DNA (Homo sapiens) CpG-island No: 18431
ttttcgataaatatttgagtaatttttatttattgatcgttcgtgtagggcgttgtggttagttagaaggtcggttcgcggtttttttgttttcgtcgtattcgcgtcgtttttagttttcggggttatagttcgtaatttcgggagtattcggttgttcggttattttcggggcgttcgttgttttcggggtttgtttttttcgcggaggaaggagcggagcgaggagtgggaaagttgggtttattttttgttcgggtaggtttgggcgttcgtttttttcgcggtttgttttttttatcgcgagcggttgagtttcgggtttcgagaatgcggtcgggcgcggcgttggcgcgggacgaggaggagtcgagtttcgttcgtcgttttcgtacgttttcgtttcggtagttcgcgcgtgtttagcggttagagggttaagttcgcggggggcggggttaggcgcgtcgagtgcgggtcgcgggttgggcgggggttgggcgggggttgcggtcgggggcggttacgggcggtcgggggcgggcggaggaagggggcgggtttcgaagttgtttcgcgttgggcgggcgagcggttgtgggagagcgggcggcgggtcggcgggcggatcgggtcggtgttggagaagtttgcgttgcggttcgtgagcgtagggtgcgggtttcgtcggtcgttgcgcgttcgttgttatggtttttcgtaggaggacgaaaagttattcgttttttagttaggagttcgttat

SEQ ID NO: 18432 - DNA, 766 bp, Artificial Sequence
  chemically treated genomic DNA (Homo sapiens) CpG-island No: 18432
ataacgaactcctaactaaaaaacgaataacttttcgtcctcctacgaaaaaccataacaacgaacgcgcaacgaccgacgaaacccgcaccctacgctcacgaaccgcaacgcaaacttctccaacaccgacccgatccgcccgccgacccgccgcccgctctcccacaaccgctcgcccgcccaacgcgaaacaacttcgaaacccgcccccttcctccgcccgcccccgaccgcccgtaaccgcccccgaccgcaacccccgcccaacccccgcccaacccgcgacccgcactcgacgcgcctaaccccgccccccgcgaacttaaccctctaaccgctaaacacgcgcgaactaccgaaacgaaaacgtacgaaaacgacgaacgaaactcgactcctcctcgtcccgcgccaacgccgcgcccgaccgcattctcgaaacccgaaactcaaccgctcgcgataaaaaaaacaaaccgcgaaaaaaacgaacgcccaaacctacccgaacaaaaaataaacccaactttcccactcctcgctccgctccttcctccgcgaaaaaaacaaaccccgaaaacaacgaacgccccgaaaataaccgaacaaccgaatactcccgaaattacgaactataaccccgaaaactaaaaacgacgcgaatacgacgaaaacaaaaaaaccgcgaaccgaccttctaactaaccacaacgccctacacgaacgatcaataaataaaaattactcaaatatttatcgaaaa

SEQ ID NO: 18433 - DNA, 528 bp, Artificial Sequence
  chemically treated genomic DNA (Homo sapiens) CpG-island No: 18433
ggagcgtcggtgtagttcgcggtagcgttgtagcgaggggacgtgcgcggagcggttgatttcgggcggcggagattaatttcgcgttcggttttcggttttagtttttttttggtttcggttttcgttgtcgtttcggattcgttttttaggaagttttattacgttaagtttttagaatcgcggtcgtttttgcggtcgcggcgggtgtcgggattgagaaaataggtcgaattagaggcggggttttcgtagaggggcggggtttggtgagtgggggagtggtttagtttggcgggtgggcggtgttagagggggcggggtcgtgtttggttggggagggatcgaggttggtaaggatagaaatattataaggaaaagtcgagggataggggtggagttgatttgtcggaaggagtgacgtcgtcgagtgaaagtagaaggggcggggtcgggtgtgataagggagagggtggaatcgtggagtgttaagggaggggcggggttaggcgggataggagaggaggt

SEQ ID NO: 18434 - DNA, 528 bp, Artificial Sequence
  chemically treated genomic DNA (Homo sapiens) CpG-island No: 18434
acctcctctcctatcccgcctaaccccgcccctcccttaacactccacgattccaccctctcccttatcacacccgaccccgccccttctactttcactcgacgacgtcactccttccgacaaatcaactccacccctatccctcgacttttccttataatatttctatccttaccaacctcgatccctccccaaccaaacacgaccccgccccctctaacaccgcccacccgccaaactaaaccactcccccactcaccaaaccccgcccctctacgaaaaccccgcctctaattcgacctattttctcaatcccgacacccgccgcgaccgcaaaaacgaccgcgattctaaaaacttaacgtaataaaacttcctaaaaaacgaatccgaaacgacaacgaaaaccgaaaccaaaaaaaaactaaaaccgaaaaccgaacgcgaaattaatctccgccgcccgaaatcaaccgctccgcgcacgtcccctcgctacaacgctaccgcgaactacaccgacgctcc

SEQ ID NO: 18435 - DNA, 528 bp, Artificial Sequence
  chemically treated genomic DNA (Homo sapiens) CpG-island No: 18435
atttttttttttgtttcgtttggtttcgttttttttttggtattttacggttttatttttttttttgttatattcggtttcgttttttttgtttttattcgacggcgttatttttttcggtaagttagttttatttttatttttcgatttttttttatagtatttttgtttttgttaatttcgatttttttttaattagatacggtttcgttttttttggtatcgtttattcgttagattaagttatttttttatttattaggtttcgtttttttacggaggtttcgtttttagttcggtttgtttttttagtttcggtattcgtcgcgatcgtaaaggcggtcgcggttttaggaatttgacgtgatggggttttttgaggagcgggttcggagcggtagcgggagtcggggttaggaggaagttggagtcggaggtcgggcgcggagttggttttcgtcgttcgaggttagtcgtttcgcgtacgttttttcgttgtagcgttatcgcgagttgtatcggcgtttt

SEQ ID NO: 18436 - DNA, 528 bp, Artificial Sequence
  chemically treated genomic DNA (Homo sapiens) CpG-island No: 18436
aaaacgccgatacaactcgcgataacgctacaacgaaaaaacgtacgcgaaacgactaacctcgaacgacgaaaaccaactccgcgcccgacctccgactccaacttcctcctaaccccgactcccgctaccgctccgaacccgctcctcaaaaaaccccatcacgtcaaattcctaaaaccgcgaccgcctttacgatcgcgacgaataccgaaactaaaaaaacaaaccgaactaaaaacgaaacctccgtaaaaaaacgaaacctaataaataaaaaaataacttaatctaacgaataaacgataccaaaaaaaacgaaaccgtatctaattaaaaaaaaatcgaaattaacaaaaacaaaaatactataaaaaaaaatcgaaaaataaaaataaaactaacttaccgaaaaaaataacgccgtcgaataaaaacaaaaaaaacgaaaccgaatataacaaaaaaaaaaataaaaccgtaaaataccaaaaaaaaaacgaaaccaaacgaaacaaaaaaaaaaat

SEQ ID NO: 18437 - DNA, 668 bp, Artificial Sequence
  chemically treated genomic DNA (Homo sapiens) CpG-island No: 18437
cgaagggagttggcgcgcgttttatttcgcgttttcggggacgtttggttacgtgggtaatgtttcgtttttcgagttcgtttcgttttttttcgcgtttttttttttttttttttttttttttttttttttcggttcggttcggtttattttttttttcgtcggtttcgtgaggttttgtcgggtcgggttgcgggcggtcgggcgcgggcggcgggatagacgggcgtacgcgaggattgacggacggacgtatcgagggcggcgggtacgtacggttcgggtcggcgttttaaggttcgttcgggagggtcggggtcgcgtttaggtgaggggacggcggcgcgggttcgtaaggggtgggttcgtcgggcgttcgcggtttttgtcgggttggtttcgcggggaggaggcgtcgttcgggttcgcgcggaaaaatggcgtcgggcgatcgagtggtacggtttgagagcgggttcggttcggagtcgtttcgttcgtcgcgtttgtgttttcgtcgttatgttggggagcgggttttaggtttgcgggcgggggcgttggagggagcggcggtcgggttgggtggggagggtgttgggcgcgggggtcggtgtattgagggagtgtagggttggtcggggtttgtacggggtggcgttttaggt

SEQ ID NO: 18438 - DNA, 668 bp, Artificial Sequence
  chemically treated genomic DNA (Homo sapiens) CpG-island No: 18438
acctaaaacgccaccccgtacaaaccccgaccaaccctacactccctcaatacaccgacccccgcgcccaacaccctccccacccaacccgaccgccgctccctccaacgcccccgcccgcaaacctaaaacccgctccccaacataacgacgaaaacacaaacgcgacgaacgaaacgactccgaaccgaacccgctctcaaaccgtaccactcgatcgcccgacgccatttttccgcgcgaacccgaacgacgcctcctccccgcgaaaccaacccgacaaaaaccgcgaacgcccgacgaacccaccccttacgaacccgcgccgccgtcccctcacctaaacgcgaccccgaccctcccgaacgaaccttaaaacgccgacccgaaccgtacgtacccgccgccctcgatacgtccgtccgtcaatcctcgcgtacgcccgtctatcccgccgcccgcgcccgaccgcccgcaacccgacccgacaaaacctcacgaaaccgacgaaaaaaaaaataaaccgaaccgaaccgaaaaaaaaaaaaaaaaaaaaaaaaaaaaaaaaaaacgcgaaaaaaaacgaaacgaactcgaaaaacgaaacattacccacgtaaccaaacgtccccgaaaacgcgaaataaaacgcgcgccaactcccttcg

SEQ ID NO: 18439 - DNA, 668 bp, Artificial Sequence
  chemically treated genomic DNA (Homo sapiens) CpG-island No: 18439
gtttggagcgttatttcgtgtagatttcggttagttttgtatttttttagtgtatcggttttcgcgtttagtattttttttatttagttcggtcgtcgttttttttagcgttttcgttcgtaggtttggggttcgttttttaatatggcgacggggatataagcgcggcgggcggggcggtttcgggtcgggttcgtttttagatcgtgttattcggtcgttcggcgttattttttcgcgcgggttcgggcggcgtttttttttcgcgaagttagttcgataaggatcgcggacgttcggcgggtttattttttacgggttcgcgtcgtcgtttttttatttgagcgcggtttcggttttttcgggcgggttttggagcgtcggttcgggtcgtgcgtgttcgtcgttttcggtgcgttcgttcgttagttttcgcgtgcgttcgtttgtttcgtcgttcgcgttcggtcgttcgtagttcgattcggtagggttttacggagtcggcggggagggggatgggtcggatcgggtcggggagggagggggagggagggagagagggagggagcgcgagagggggcggggcggattcgaggggcggggtattgtttacgtgattagacgttttcgggagcgcgaggtggagcgcgcgttagtttttttcg

SEQ ID NO: 18440 - DNA, 668 bp, Artificial Sequence
  chemically treated genomic DNA (Homo sapiens) CpG-island No: 18440
cgaaaaaaactaacgcgcgctccacctcgcgctcccgaaaacgtctaatcacgtaaacaataccccgcccctcgaatccgccccgccccctctcgcgctccctccctctctccctccctccccctccctccccgacccgatccgacccatccccctccccgccgactccgtaaaaccctaccgaatcgaactacgaacgaccgaacgcgaacgacgaaacaaacgaacgcacgcgaaaactaacgaacgaacgcaccgaaaacgacgaacacgcacgacccgaaccgacgctccaaaacccgcccgaaaaaaccgaaaccgcgctcaaataaaaaaacgacgacgcgaacccgtaaaaaataaacccgccgaacgtccgcgatccttatcgaactaacttcgcgaaaaaaaaacgccgcccgaacccgcgcgaaaaaataacgccgaacgaccgaataacacgatctaaaaacgaacccgacccgaaaccgccccgcccgccgcgcttatatccccgtcgccatattaaaaaacgaaccccaaacctacgaacgaaaacgctaaaaaaaacgacgaccgaactaaataaaaaaaatactaaacgcgaaaaccgatacactaaaaaaatacaaaactaaccgaaatctacacgaaataacgctccaaac

SEQ ID NO: 18441 - DNA, 575 bp, Artificial Sequence
  chemically treated genomic DNA (Homo sapiens) CpG-island No: 18441
taattgcgatagtcgcgtagcgtttttttcgtttgttttttttagggaaaaattttttttttggagttcgcgaaagttttcgtttttgtttaagtattaattatttattttttcgatgttttcgtcgattgttaggttgcggtagttaatattattgtgggtgtattcgcgaagagattttatgttttaagcgttgtcgataaagttgtgtatttttgtagattttgtgcgtggtttcgcggcgatttcggggttggaattggttttgggattaatggttcgggcgagcgtttttttggcgtcgggatttttttttggcgtcgtttggtatttgcgcgttttatatagcggtacggtgtttttcgtaggtttaaagcgtatgtatacgcgtcggttaaacgttttttattagtatttatagtatatttagttgtgagtgcgattttcgggggacgtattcgtgtttagggcgtacgaaaaatagggcgagcgtgcgtaagtatggtgtaggtagtgaatatgttttgcggggaatagtggttttaaattgttgtttaattaattatttttaattt

SEQ ID NO: 18442 - DNA, 575 bp, Artificial Sequence
  chemically treated genomic DNA (Homo sapiens) CpG-island No: 18442
aaattaaaaataattaattaaacaacaatttaaaaccactattccccgcaaaacatattcactacctacaccatacttacgcacgctcgccctatttttcgtacgccctaaacacgaatacgtcccccgaaaatcgcactcacaactaaatatactataaatactaataaaaaacgtttaaccgacgcgtatacatacgctttaaacctacgaaaaacaccgtaccgctatataaaacgcgcaaataccaaacgacgccaaaaaaaaatcccgacgccaaaaaaacgctcgcccgaaccattaatcccaaaaccaattccaaccccgaaatcgccgcgaaaccacgcacaaaatctacaaaaatacacaactttatcgacaacgcttaaaacataaaatctcttcgcgaatacacccacaataatattaactaccgcaacctaacaatcgacgaaaacatcgaaaaaataaataattaatacttaaacaaaaacgaaaactttcgcgaactccaaaaaaaaaatttttccctaaaaaaaacaaacgaaaaaaacgctacgcgactatcgcaatta

SEQ ID NO: 18443 - DNA, 575 bp, Artificial Sequence
  chemically treated genomic DNA (Homo sapiens) CpG-island No: 18443
aagttgggagtagttagttaagtagtaatttggggttattgtttttcgtaaagtatgtttattatttgtattatgtttgcgtacgttcgttttatttttcgtacgttttggatacgaatgcgtttttcgggggtcgtatttataattagatgtattgtgaatgttaatagggggcgtttaatcgacgcgtgtgtatacgttttgaatttgcggaaggtatcgtatcgttatatagggcgcgtaagtgttagacggcgttagaaagaggtttcggcgttagaaaagcgttcgttcgagttattggttttagagttagttttaatttcgggatcgtcgcggaattacgtatagagtttgtagaagtgtatagttttatcgatagcgtttgaagtatggagttttttcgcgggtatatttatagtgatattggttatcgtagtttggtagtcggcgaggatatcgaggaagtgaatggttagtgtttggatagggacgggagttttcgcgaattttaaaagaggaatttttttttgggagaggtaagcggaggagacgttgcgcggttgtcgtagttg

SEQ ID NO: 18444 - DNA, 575 bp, Artificial Sequence
  chemically treated genomic DNA (Homo sapiens) CpG-island No: 18444
caactacgacaaccgcgcaacgtctcctccgcttacctctcccaaaaaaaaattcctcttttaaaattcgcgaaaactcccgtccctatccaaacactaaccattcacttcctcgatatcctcgccgactaccaaactacgataaccaatatcactataaatatacccgcgaaaaaactccatacttcaaacgctatcgataaaactatacacttctacaaactctatacgtaattccgcgacgatcccgaaattaaaactaactctaaaaccaataactcgaacgaacgcttttctaacgccgaaacctctttctaacgccgtctaacacttacgcgccctatataacgatacgataccttccgcaaattcaaaacgtatacacacgcgtcgattaaacgccccctattaacattcacaatacatctaattataaatacgacccccgaaaaacgcattcgtatccaaaacgtacgaaaaataaaacgaacgtacgcaaacataatacaaataataaacatactttacgaaaaacaataaccccaaattactacttaactaactactcccaactt

SEQ ID NO: 18445 - DNA, 997 bp, Artificial Sequence
  chemically treated genomic DNA (Homo sapiens) CpG-island No: 18445
gcgcgttgtgtatgttgggattcgcgcgatgagggtttgcggggtcgttaaaggagtttacggattttatttatttgcggttgtagtagattgattttttttattttttttagcgttagtagcgcgtagtcgatcgcgtgtttaaatagtacgtgtaatagtatttggaacgggagtcggggcgcgagcgttaacgtaattttagcgtttgtcggaattcgtttttagggtaggcgtaggcgtaggcgtaggtttaggtttaggtttaggttttgtttgcggttcgaacgtaggtcgaaatttttatcgtcgcgtcgttcgcgtttcgtaattattttttattatggcgttagttttcgggttcggttcgtaatgcggttagcgcgtttcggcgcgcggaattaggttttagaggttacgttttcgttttttcgattaatcggaggtcggggacgatattattttcggtttttggaggggtcgtttagggtggtatcgttcggagcgcgggttgggtggtgtcgagcgcgggcgagcgggtttttttcggtttttgtagttgcgcgggcgggcgtggttgtcggggacgcgcggttttcggtcgggtattgtaggcggcgaaacgatttgggaaggttttttcggggtaatagttcggtttttgatgtttttgttatatgagttacgggtagtagagttgggtgaagtcggggcgggaggttcgcgtggggcgcggcgtttattttagatagagatcgttgtttagtcggtttttcgtttcgttcgtggtttcgggttttagattttgcgttttacgttttcgggatttaggcgttttcgttttttattcggggacgagttttttcggcgtcgggtgggcggtgtattttttttttttattcgtaacgggagcggtgtttggcgcgttttggcgtagattttgttgggaatgtagttcgcgtagtttttttcgtattattaatttattttttttttt

SEQ ID NO: 18446 - DNA, 997 bp, Artificial Sequence
  chemically treated genomic DNA (Homo sapiens) CpG-island No: 18446
aaaaaaaaaaataaattaataatacgaaaaaaactacgcgaactacattcccaacaaaatctacgccaaaacgcgccaaacaccgctcccgttacgaataaaaaaaaaaaatacaccgcccacccgacgccgaaaaaactcgtccccgaataaaaaacgaaaacgcctaaatcccgaaaacgtaaaacgcaaaatctaaaacccgaaaccacgaacgaaacgaaaaaccgactaaacaacgatctctatctaaaataaacgccgcgccccacgcgaacctcccgccccgacttcacccaactctactacccgtaactcatataacaaaaacatcaaaaaccgaactattaccccgaaaaaaccttcccaaatcgtttcgccgcctacaatacccgaccgaaaaccgcgcgtccccgacaaccacgcccgcccgcgcaactacaaaaaccgaaaaaaacccgctcgcccgcgctcgacaccacccaacccgcgctccgaacgataccaccctaaacgacccctccaaaaaccgaaaataatatcgtccccgacctccgattaatcgaaaaaacgaaaacgtaacctctaaaacctaattccgcgcgccgaaacgcgctaaccgcattacgaaccgaacccgaaaactaacgccataataaaaaataattacgaaacgcgaacgacgcgacgataaaaatttcgacctacgttcgaaccgcaaacaaaacctaaacctaaacctaaacctacgcctacgcctacgcctaccctaaaaacgaattccgacaaacgctaaaattacgttaacgctcgcgccccgactcccgttccaaatactattacacgtactatttaaacacgcgatcgactacgcgctactaacgctaaaaaaaataaaaaaaatcaatctactacaaccgcaaataaataaaatccgtaaactcctttaacgaccccgcaaaccctcatcgcgcgaatcccaacatacacaacgcgc

SEQ ID NO: 18447 - DNA, 997 bp, Artificial Sequence
  chemically treated genomic DNA (Homo sapiens) CpG-island No: 18447
aaaaaaagaaataaattaatagtacgaagaaaattgcgcgagttatatttttagtagggtttgcgttagagcgcgttaggtatcgttttcgttacgggtgggaggaaaggatgtatcgtttattcggcgtcggggaggttcgttttcgagtaggggacgggaacgtttgggtttcggggacgtggggcgtagggtttggggttcgaggttacggacgaagcgggaagtcggttaggtagcggtttttgtttgggatggacgtcgcgttttacgcggatttttcgtttcgattttatttagttttgttgttcgtaatttatatgataagaatattaggaatcggattattatttcgaaagggtttttttaagtcgtttcgtcgtttgtagtgttcgatcgggggtcgcgcgttttcggtaattacgttcgttcgcgtagttgtagaggtcggaaaaggttcgttcgttcgcgttcggtattatttagttcgcgtttcgggcgatattattttgggcggtttttttaaaggtcggagatggtgtcgttttcggttttcgattggtcgggggggcgggggcgtggtttttggagtttggtttcgcgcgtcggagcgcgttagtcgtattgcgagtcgaattcgggagttggcgttatggtgaggagtggttgcggggcgcgggcgacgcgacggtgggggtttcggtttgcgttcgggtcgtagatagggtttgggtttgggtttgggtttgcgtttgcgtttgcgtttgttttgggaacgggtttcggtagacgttgaggttgcgttgacgttcgcgtttcggttttcgttttaggtgttgttgtacgtgttgtttgagtacgcggtcggttacgcgttgttggcgttgaaggaagtggaggagattagtttgttgtagtcgtaggtgggtgagattcgtgggtttttttggcggtttcgtagatttttatcgcgcgggttttagtatgtatagcgcgt

SEQ ID NO: 18448 - DNA, 997 bp, Artificial Sequence
  chemically treated genomic DNA (Homo sapiens) CpG-island No: 18448
acgcgctatacatactaaaacccgcgcgataaaaatctacgaaaccgccaaaaaaacccacgaatctcacccacctacgactacaacaaactaatctcctccacttccttcaacgccaacaacgcgtaaccgaccgcgtactcaaacaacacgtacaacaacacctaaaacgaaaaccgaaacgcgaacgtcaacgcaacctcaacgtctaccgaaacccgttcccaaaacaaacgcaaacgcaaacgcaaacccaaacccaaacccaaaccctatctacgacccgaacgcaaaccgaaacccccaccgtcgcgtcgcccgcgccccgcaaccactcctcaccataacgccaactcccgaattcgactcgcaatacgactaacgcgctccgacgcgcgaaaccaaactccaaaaaccacgcccccgcccccccgaccaatcgaaaaccgaaaacgacaccatctccgacctttaaaaaaaccgcccaaaataatatcgcccgaaacgcgaactaaataataccgaacgcgaacgaacgaaccttttccgacctctacaactacgcgaacgaacgtaattaccgaaaacgcgcgacccccgatcgaacactacaaacgacgaaacgacttaaaaaaaccctttcgaaataataatccgattcctaatattcttatcatataaattacgaacaacaaaactaaataaaatcgaaacgaaaaatccgcgtaaaacgcgacgtccatcccaaacaaaaaccgctacctaaccgacttcccgcttcgtccgtaacctcgaaccccaaaccctacgccccacgtccccgaaacccaaacgttcccgtcccctactcgaaaacgaacctccccgacgccgaataaacgatacatcctttcctcccacccgtaacgaaaacgatacctaacgcgctctaacgcaaaccctactaaaaatataactcgcgcaattttcttcgtactattaatttatttcttttttt

SEQ ID NO: 18449 - DNA, 585 bp, Artificial Sequence
  chemically treated genomic DNA (Homo sapiens) CpG-island No: 18449
cgtttcggcggaggcggaggaggcggtggcggggttcggggacgcgcgggcggcgggtatggtcgttatttagtgtatttacgcgttggtgtgtttggtggggttggtgggtaacgttttggttattttcgtgatttttcgttacgttaagatgaagacggttattaatatttatttgtttaatttggtcgtagtcgacgagttttttatgttgagcgtgtttttcgtggtttcgtcggtcgttttgcgttattggtttttcggtttcgtgttgtgtcgcgcggtgtttagcgtcgacggttttaatatgtttattagcgttttttgttttatcgtgtttagcgtggatcgttacgtggtcgtggtgtattttttgcgcgcggcgatttatcggcggtttagcgtggttaagtttattaatttgggcgtgtggttggtatttttgttggttattttttttatcgttattttcgtagatattagatcggttcgcggcggttaggtcgtggtttgtaatttgtagtggttatattcggtttggtcggtagttttcgtggtttatatttttttgttgggttttttgtt

SEQ ID NO: 18450 - DNA, 585 bp, Artificial Sequence
  chemically treated genomic DNA (Homo sapiens) CpG-island No: 18450
aacaaaaaacccaacaaaaaaatataaaccacgaaaactaccgaccaaaccgaatataaccactacaaattacaaaccacgacctaaccgccgcgaaccgatctaatatctacgaaaataacgataaaaaaaataaccaacaaaaataccaaccacacgcccaaattaataaacttaaccacgctaaaccgccgataaatcgccgcgcgcaaaaaatacaccacgaccacgtaacgatccacgctaaacacgataaaacaaaaaacgctaataaacatattaaaaccgtcgacgctaaacaccgcgcgacacaacacgaaaccgaaaaaccaataacgcaaaacgaccgacgaaaccacgaaaaacacgctcaacataaaaaactcgtcgactacgaccaaattaaacaaataaatattaataaccgtcttcatcttaacgtaacgaaaaatcacgaaaataaccaaaacgttacccaccaaccccaccaaacacaccaacgcgtaaatacactaaataacgaccatacccgccgcccgcgcgtccccgaaccccgccaccgcctcctccgcctccgccgaaacg

SEQ ID NO: 18451 - DNA, 585 bp, Artificial Sequence
  chemically treated genomic DNA (Homo sapiens) CpG-island No: 18451
agtaggaagtttagtaggaaagtgtagattacgaagattgtcgattaggtcgggtgtggttattgtaggttgtaggttacggtttggtcgtcgcgagtcggtttggtgtttgcgaagatggcgatggggagagtgattaatagggatgttagttatacgtttaggttgatgagtttggttacgttgggtcgtcggtaggtcgtcgcgcgtagagggtgtattacggttacgtagcggtttacgttgagtacggtgagatagaagacgttggtgaatatgttgaggtcgtcgacgttgagtatcgcgcggtatagtacggagtcgaagggttagtggcgtagggcggtcgacgaggttacgaagggtacgtttagtatgaagagttcgtcggttacggttaggttgagtaggtagatgttggtagtcgtttttattttggcgtagcgaaggattacgaagatgattagggcgttgtttattagttttattaggtatattagcgcgtagatgtattggatagcgattatgttcgtcgttcgcgcgttttcgggtttcgttatcgtttttttcgttttcgtcggagcg

SEQ ID NO: 18452 - DNA, 585 bp, Artificial Sequence
  chemically treated genomic DNA (Homo sapiens) CpG-island No: 18452
cgctccgacgaaaacgaaaaaaacgataacgaaacccgaaaacgcgcgaacgacgaacataatcgctatccaatacatctacgcgctaatatacctaataaaactaataaacaacgccctaatcatcttcgtaatccttcgctacgccaaaataaaaacgactaccaacatctacctactcaacctaaccgtaaccgacgaactcttcatactaaacgtacccttcgtaacctcgtcgaccgccctacgccactaacccttcgactccgtactataccgcgcgatactcaacgtcgacgacctcaacatattcaccaacgtcttctatctcaccgtactcaacgtaaaccgctacgtaaccgtaatacaccctctacgcgcgacgacctaccgacgacccaacgtaaccaaactcatcaacctaaacgtataactaacatccctattaatcactctccccatcgccatcttcgcaaacaccaaaccgactcgcgacgaccaaaccgtaacctacaacctacaataaccacacccgacctaatcgacaatcttcgtaatctacactttcctactaaacttcctact

SEQ ID NO: 18453 - DNA, 722 bp, Artificial Sequence
  chemically treated genomic DNA (Homo sapiens) CpG-island No: 18453
gcgaagttttcggcgtagacgtagaggtagttagtttggtttaggggttggtattggtattcgtagttggttttgaagtacgggtttacgggttttatatattcgtcgtttattaggtcgtagttagggtagtagtggtattcgaagttattttgtgtgttgatatagcgttgcggatacggattgggttttagtatgtagttatttacgttttcgtatcggtgttggtcggtcgttagtcggtagtcggtttcgtatatgtacgagtaggagttcggttggtcggggttgggaacgtagaagtgttcgtagaggtcgttgtaggattgcgtcgcggatgcggtgtaggagcgttcgtttgtttgtagggcggcgtcggttgggtattggtagcggggagttttagggatcgtattgtacgcgtgttcgtagtcgtcgttttttacgttgtagttttaagcgttcggcgtttttttggtttagtgtttttggatcgtttcgggcggcgcggtgtatattagttgtaagtcgaggggagttatcgcggcggagttgtttatcggtagcgtttggaagttcgtttcgcgggtcgcgaacggggtgtcgtaggtgatcgagacggcggtagtcgcggcgtcgggttttatagttagtggtttgtaggtggttgggaagtggaattcgtagaggaagttatcggtttttatttcgtattgttgttt

SEQ ID NO: 18454 - DNA, 722 bp, Artificial Sequence
  chemically treated genomic DNA (Homo sapiens) CpG-island No: 18454
aaacaacaatacgaaataaaaaccgataacttcctctacgaattccacttcccaaccacctacaaaccactaactataaaacccgacgccgcgactaccgccgtctcgatcacctacgacaccccgttcgcgacccgcgaaacgaacttccaaacgctaccgataaacaactccgccgcgataactcccctcgacttacaactaatatacaccgcgccgcccgaaacgatccaaaaacactaaaccaaaaaaacgccgaacgcttaaaactacaacgtaaaaaacgacgactacgaacacgcgtacaatacgatccctaaaactccccgctaccaatacccaaccgacgccgccctacaaacaaacgaacgctcctacaccgcatccgcgacgcaatcctacaacgacctctacgaacacttctacgttcccaaccccgaccaaccgaactcctactcgtacatatacgaaaccgactaccgactaacgaccgaccaacaccgatacgaaaacgtaaataactacatactaaaacccaatccgtatccgcaacgctatatcaacacacaaaataacttcgaataccactactaccctaactacgacctaataaacgacgaatatataaaacccgtaaacccgtacttcaaaaccaactacgaataccaataccaacccctaaaccaaactaactacctctacgtctacgccgaaaacttcgc

SEQ ID NO: 18455 - DNA, 722 bp, Artificial Sequence
  chemically treated genomic DNA (Homo sapiens) CpG-island No: 18455
gagtagtagtgcgaagtgaaggtcgatggttttttttgcgagttttattttttagttatttgtaggttattggttgtggagttcggcgtcgcggttgtcgtcgtttcgattatttacggtatttcgttcgcggttcgcggagcggatttttaggcgttgtcggtgggtagtttcgtcgcggtggtttttttcggtttatagttaatgtgtatcgcgtcgttcggagcggtttaggggtattgggttagggaggcgtcgggcgtttgggattgtagcgtggagaacggcggttgcgagtacgcgtgtaatgcgatttttggggtttttcgttgttagtgtttagtcggcgtcgttttgtaggtagacgggcgtttttgtatcgtattcgcgacgtagttttgtaacgatttttgcgagtatttttgcgtttttaatttcgattagtcgggtttttattcgtgtatgtgcgagatcggttatcggttggcggtcgattaatatcggtgcgaggacgtggatgattgtatattggagtttagttcgtgttcgtagcgttgtgttaatatatagggtggtttcgagtgttattgttattttaattacgatttggtggacggcgagtgtgtggagttcgtggattcgtgttttagagttaattgcgagtattagtgttagtttttgaattaaattagttatttttgcgtttgcgtcgagggtttcgt

SEQ ID NO: 18456 - DNA, 722 bp, Artificial Sequence
  chemically treated genomic DNA (Homo sapiens) CpG-island No: 18456
acgaaaccctcgacgcaaacgcaaaaataactaatttaattcaaaaactaacactaatactcgcaattaactctaaaacacgaatccacgaactccacacactcgccgtccaccaaatcgtaattaaaataacaataacactcgaaaccaccctatatattaacacaacgctacgaacacgaactaaactccaatatacaatcatccacgtcctcgcaccgatattaatcgaccgccaaccgataaccgatctcgcacatacacgaataaaaacccgactaatcgaaattaaaaacgcaaaaatactcgcaaaaatcgttacaaaactacgtcgcgaatacgatacaaaaacgcccgtctacctacaaaacgacgccgactaaacactaacaacgaaaaaccccaaaaatcgcattacacgcgtactcgcaaccgccgttctccacgctacaatcccaaacgcccgacgcctccctaacccaatacccctaaaccgctccgaacgacgcgatacacattaactataaaccgaaaaaaaccaccgcgacgaaactacccaccgacaacgcctaaaaatccgctccgcgaaccgcgaacgaaataccgtaaataatcgaaacgacgacaaccgcgacgccgaactccacaaccaataacctacaaataactaaaaaataaaactcgcaaaaaaaaccatcgaccttcacttcgcactactactc

SEQ ID NO: 18457 - DNA, 708 bp, Artificial Sequence
  chemically treated genomic DNA (Homo sapiens) CpG-island No: 18457
gagatagcgacgtataacgggtcgtagaggggagttttattgaggtcgagtcgtgtttatttgttatagttggtgttgttgtttttcgtaatttattggaagtcgcgtaggggttcgaggcgtttggggtcgtcgtagtcgggtggtagttgtaggtcgatttagaggcgtcggcggttaacgtcgtcgtcgtcgtttagtagtaaggaaatgatatcggtagttatcgaggagcgtattgttattaggtggtttcgtagttcgtcgtagatttgattggtattgaggaaggtcgcggggttcgggtagagcgcgaagtagtcgtgttcgacgtattggttgttattcggttgcggttttgcgggtgcggggaattttaggtcggttagggttagcgcgttaaggattaggattttaagtatgttatttaggcgcgtcgcgtgtaggcgtcggggaaagcgcgggtattgcgatagggtcgtgtcggagtagaggggtataggacgtcgatggcgatagttttttttgttcgttttagtttagatattttttgtcgttgcgcgtagtttttgcgaggtagtttttgatatgcggatcggttagggttcgagtttataagtgttcggttttttttttttggacgttcgggaaaaggaaggaagtgtttggtgggaagggttgatgtcgtatattcggattgttgggttt

SEQ ID NO: 18458 - DNA, 708 bp, Artificial Sequence
  chemically treated genomic DNA (Homo sapiens) CpG-island No: 18458
aaacccaacaatccgaatatacgacatcaacccttcccaccaaacacttccttccttttcccgaacgtccaaaaaaaaaaaaccgaacacttataaactcgaaccctaaccgatccgcatatcaaaaactacctcgcaaaaactacgcgcaacgacaaaaaatatctaaactaaaacgaacaaaaaaaactatcgccatcgacgtcctatacccctctactccgacacgaccctatcgcaatacccgcgctttccccgacgcctacacgcgacgcgcctaaataacatacttaaaatcctaatccttaacgcgctaaccctaaccgacctaaaattccccgcacccgcaaaaccgcaaccgaataacaaccaatacgtcgaacacgactacttcgcgctctacccgaaccccgcgaccttcctcaataccaatcaaatctacgacgaactacgaaaccacctaataacaatacgctcctcgataactaccgatatcatttccttactactaaacgacgacgacgacgttaaccgccgacgcctctaaatcgacctacaactaccacccgactacgacgaccccaaacgcctcgaacccctacgcgacttccaataaattacgaaaaacaacaacaccaactataacaaataaacacgactcgacctcaataaaactcccctctacgacccgttatacgtcgctatctc

SEQ ID NO: 18459 - DNA, 708 bp, Artificial Sequence
  chemically treated genomic DNA (Homo sapiens) CpG-island No: 18459
gaatttagtaattcgagtatgcggtattagttttttttattaggtatttttttttttttttcgaacgtttagggagggagggtcgggtatttataaattcgagttttggtcgattcgtatgttagaggttgtttcgtaggggttgcgcgtagcggtaagaagtgtttgggttgggacggataggagaggttgtcgttatcggcgttttgtgtttttttgtttcggtacggttttgtcgtagtgttcgcgtttttttcggcgtttgtacgcggcgcgtttgggtaatatgtttggggttttggtttttggcgcgttggttttggtcggtttggggtttttcgtattcgtagagtcgtagtcgggtggtagttagtgcgtcgagtacgattgtttcgcgttttattcgggtttcgcgattttttttaatgttagttagatttgcgacggattgcggggttatttaatgatagtgcgtttttcggtggttgtcgatgttatttttttgttattgaacggcgacggcggcgttggtcgtcggcgtttttggatcggtttgtagttgttattcggttgcggcgattttaagcgtttcgggtttttgcgcggtttttagtgggttacgggagataataatattagttatagtaggtgggtacggttcgattttaatggggtttttttttgcggttcgttgtgcgtcgttgtttt

SEQ ID NO: 18460 - DNA, 708 bp, Artificial Sequence
  chemically treated genomic DNA (Homo sapiens) CpG-island No: 18460
aaaacaacgacgcacaacgaaccgcaaaaaaaaaccccattaaaatcgaaccgtacccacctactataactaatattattatctcccgtaacccactaaaaaccgcgcaaaaacccgaaacgcttaaaatcgccgcaaccgaataacaactacaaaccgatccaaaaacgccgacgaccaacgccgccgtcgccgttcaataacaaaaaaataacatcgacaaccaccgaaaaacgcactatcattaaataaccccgcaatccgtcgcaaatctaactaacattaaaaaaaatcgcgaaacccgaataaaacgcgaaacaatcgtactcgacgcactaactaccacccgactacgactctacgaatacgaaaaaccccaaaccgaccaaaaccaacgcgccaaaaaccaaaaccccaaacatattacccaaacgcgccgcgtacaaacgccgaaaaaaacgcgaacactacgacaaaaccgtaccgaaacaaaaaaacacaaaacgccgataacgacaacctctcctatccgtcccaacccaaacacttcttaccgctacgcgcaacccctacgaaacaacctctaacatacgaatcgaccaaaactcgaatttataaatacccgaccctccctccctaaacgttcgaaaaaaaaaaaaaaatacctaataaaaaaaactaataccgcatactcgaattactaaattc

SEQ ID NO: 18461 - DNA, 502 bp, Artificial Sequence
  chemically treated genomic DNA (Homo sapiens) CpG-island No: 18461
ttatttgcgcgtttggtattatttattgttatcgcggaggaacgagcgttcgagatattattagtgttcgtaaattttcgcgttaaggcgttgagttattttttttcgaggtgcgtttttggtttttcgtttttggtgtttagtagcggcgaggcggtattttcgttttcgtcgtcgtgtttatcgagttttgggattagggtggtagtttttaacgatgggtaggagggatttcggcggcgatttttaaaataatattatgtttcgggattttcgttgttgtcgcgttagcgttttttttttttatttttttgattttgtcggattcggatgagtttattgtaaggagaagacgtagtcgttaggtaaaaggggttgcgttgttaggtgaagtttttagtaatcggtcgagttgttgttacgttggtattacgttgttttttcgggggattttttttttttgaaagagttgggggtggttattttaagtggggtgttttag

SEQ ID NO: 18462 - DNA, 502 bp, Artificial Sequence
  chemically treated genomic DNA (Homo sapiens) CpG-island No: 18462
ctaaaacaccccacttaaaataaccacccccaactctttcaaaaaaaaaaaatcccccgaaaaaacaacgtaataccaacgtaacaacaactcgaccgattactaaaaacttcacctaacaacgcaaccccttttacctaacgactacgtcttctccttacaataaactcatccgaatccgacaaaatcaaaaaaataaaaaaaaaaaacgctaacgcgacaacaacgaaaatcccgaaacataatattattttaaaaatcgccgccgaaatccctcctacccatcgttaaaaactaccaccctaatcccaaaactcgataaacacgacgacgaaaacgaaaataccgcctcgccgctactaaacaccaaaaacgaaaaaccaaaaacgcacctcgaaaaaaaataactcaacgccttaacgcgaaaatttacgaacactaataatatctcgaacgctcgttcctccgcgataacaataaataataccaaacgcgcaaataa

SEQ ID NO: 18463 - DNA, 502 bp, Artificial Sequence
  chemically treated genomic DNA (Homo sapiens) CpG-island No: 18463
ttagagtattttatttaagatgattatttttagtttttttaaaaaaaaaaaatttttcgaagagatagcgtggtgttagcgtagtagtagttcggtcggttattggaaattttatttggtaacgtagttttttttatttgacggttgcgttttttttttgtaatgggtttattcgaattcgatagggttagggaggtggaaagggaagacgttggcgcggtagtagcggggatttcggggtatggtattgttttaggggtcgtcgtcgaggttttttttgtttatcgttgagaattgttattttgattttagggttcggtggatacggcggcgggagcggagatgtcgtttcgtcgttgttgggtattagggacggaggattagaggcgtatttcggaaaggagtagtttagcgttttggcgcggagatttgcgggtattgatgatatttcgagcgttcgttttttcgcggtgataatggataatgttaaacgcgtaagtga

SEQ ID NO: 18464 - DNA, 502 bp, Artificial Sequence
  chemically treated genomic DNA (Homo sapiens) CpG-island No: 18464
tcacttacgcgtttaacattatccattatcaccgcgaaaaaacgaacgctcgaaatatcatcaatacccgcaaatctccgcgccaaaacgctaaactactcctttccgaaatacgcctctaatcctccgtccctaatacccaacaacgacgaaacgacatctccgctcccgccgccgtatccaccgaaccctaaaatcaaaataacaattctcaacgataaacaaaaaaaacctcgacgacgacccctaaaacaataccataccccgaaatccccgctactaccgcgccaacgtcttccctttccacctccctaaccctatcgaattcgaataaacccattacaaaaaaaaaacgcaaccgtcaaataaaaaaaactacgttaccaaataaaatttccaataaccgaccgaactactactacgctaacaccacgctatctcttcgaaaaattttttttttttaaaaaaactaaaaataatcatcttaaataaaatactctaa

SEQ ID NO: 18465 - DNA, 991 bp, Artificial Sequence
  chemically treated genomic DNA (Homo sapiens) CpG-island No: 18465
ttagagcgcgagggacggagggagaggaggagcgcgggagttgcggaggcgatttcgcgaatttattattgtaaatatattcgggggtgttaggaggggtaggggtgggggtcgcggcgtttatattagttcggtcgcgtcggattgaggtagtagtgtggtttgagtagtttttagatttacgtcgggcgggcgtagtatttggagcgagttttgcgttcgttttcgcgtagcgtcgtacgttcggtttcgagttgttcgtatatacgcgtcggaggagagttcgtttagttttttcgtcgagtttcgggattttttaaattcgaggagtttcggcgtcgcggggtagttttttgtcgtttttttcgttcgttgtattttttttggggttcgttggtttggcgaagcggagagggggaggcggaggaggagagaaggcgggggtcgcggcggtcgaagttaagagaaagtggtatgttcgaattttggaggcggtggtggcggaggacgggggaagacgatgtcgtagtttcgtaggggacgtaggcgagagtaagcgaggcgagttgggcgtttcggtttcggttcgttgcggggaggcgcgcgtcgttttgaggtttcggttttcgtattttcgcgtttcgacgttgcgggcgatagggtttggttttagtagtcgtcgtcgtcgtcgtcgtcgttattcggaggatttagtaaaagtttggatttgggggagggcgcggcgttgagcgggattattattagggttggaaggagatttcgagaatttttgtaggtaacgcgcgtttttaattttttttttttatgtttcgtcgttgcgttttcgtttttttttagagttttttttggttttcgcgggtttggtagaaagtaagagggaggcgaagtttaagatttcggggatgagtatcgagcgttggtagattattagttacgttagaggggtagttgtgttgagaggtaaattttt

SEQ ID NO: 18466 - DNA, 991 bp, Artificial Sequence
  chemically treated genomic DNA (Homo sapiens) CpG-island No: 18466
aaaaatttacctctcaacacaactacccctctaacgtaactaataatctaccaacgctcgatactcatccccgaaatcttaaacttcgcctccctcttactttctaccaaacccgcgaaaaccaaaaaaaactctaaaaaaaaacgaaaacgcaacgacgaaacataaaaaaaaaaaattaaaaacgcgcgttacctacaaaaattctcgaaatctccttccaaccctaataataatcccgctcaacgccgcgccctcccccaaatccaaacttttactaaatcctccgaataacgacgacgacgacgacgacgactactaaaaccaaaccctatcgcccgcaacgtcgaaacgcgaaaatacgaaaaccgaaacctcaaaacgacgcgcgcctccccgcaacgaaccgaaaccgaaacgcccaactcgcctcgcttactctcgcctacgtcccctacgaaactacgacatcgtcttcccccgtcctccgccaccaccgcctccaaaattcgaacataccactttctcttaacttcgaccgccgcgacccccgccttctctcctcctccgcctccccctctccgcttcgccaaaccaacgaaccccaaaaaaaatacaacgaacgaaaaaaacgacaaaaaactaccccgcgacgccgaaactcctcgaatttaaaaaatcccgaaactcgacgaaaaaactaaacgaactctcctccgacgcgtatatacgaacaactcgaaaccgaacgtacgacgctacgcgaaaacgaacgcaaaactcgctccaaatactacgcccgcccgacgtaaatctaaaaactactcaaaccacactactacctcaatccgacgcgaccgaactaatataaacgccgcgacccccacccctacccctcctaacacccccgaatatatttacaataataaattcgcgaaatcgcctccgcaactcccgcgctcctcctctccctccgtccctcgcgctctaa

SEQ ID NO: 18467 - DNA, 991 bp, Artificial Sequence
  chemically treated genomic DNA (Homo sapiens) CpG-island No: 18467
gggaatttgttttttagtatagttgtttttttaacgtgattagtgatttgttagcgttcggtgtttattttcgggattttgaatttcgttttttttttattttttgttagattcgcgagggttaggaagggttttgggaggaagcgggagcgtagcggcggggtatggaagaagagggttgggggcgcgcgttatttgtaaaggttttcgaggtttttttttagttttggtggtaatttcgtttagcgtcgcgtttttttttagatttaaatttttgttgggtttttcgggtggcggcggcggcgacggcggcggttgttggagttaagttttgtcgttcgtagcgtcggggcgcgggggtgcggaggtcggagttttagagcggcgcgcgttttttcgtagcgggtcggggtcggggcgtttagttcgtttcgtttgttttcgtttacgttttttacggagttgcggtatcgttttttttcgtttttcgttattatcgtttttagggttcgggtatgttatttttttttggtttcggtcgtcgcgattttcgtttttttttttttttcgttttttttttttcgtttcgttaagttaacgaattttaaaagaagtatagcgagcggggaaggcggtagaaagttgtttcgcggcgtcggagtttttcggatttggaggatttcgggattcggcgggagagttaggcgggttttttttcgacgcgtgtgtgcggatagttcggagtcgggcgtgcggcgttgcgcgggggcgggcgtagggttcgttttaagtgttgcgttcgttcggcgtgggtttggaggttgtttagattatattattgttttaattcgacgcggtcgggttaatgtaggcgtcgcggtttttatttttattttttttgatattttcggatatgtttatagtaatgaattcgcgggatcgttttcgtagttttcgcgtttttttttttttttcgtttttcgcgttttgg

SEQ ID NO: 18468 - DNA, 991 bp, Artificial Sequence
  chemically treated genomic DNA (Homo sapiens) CpG-island No: 18468
ccaaaacgcgaaaaacgaaaaaaaaaaaaaaacgcgaaaactacgaaaacgatcccgcgaattcattactataaacatatccgaaaatatcaaaaaaaataaaaataaaaaccgcgacgcctacattaacccgaccgcgtcgaattaaaacaataatataatctaaacaacctccaaacccacgccgaacgaacgcaacacttaaaacgaaccctacgcccgcccccgcgcaacgccgcacgcccgactccgaactatccgcacacacgcgtcgaaaaaaaacccgcctaactctcccgccgaatcccgaaatcctccaaatccgaaaaactccgacgccgcgaaacaactttctaccgccttccccgctcgctatacttcttttaaaattcgttaacttaacgaaacgaaaaaaaaaaaacgaaaaaaaaaaaaaaacgaaaatcgcgacgaccgaaaccaaaaaaaaataacatacccgaaccctaaaaacgataataacgaaaaacgaaaaaaaacgataccgcaactccgtaaaaaacgtaaacgaaaacaaacgaaacgaactaaacgccccgaccccgacccgctacgaaaaaacgcgcgccgctctaaaactccgacctccgcacccccgcgccccgacgctacgaacgacaaaacttaactccaacaaccgccgccgtcgccgccgccgccacccgaaaaacccaacaaaaatttaaatctaaaaaaaaacgcgacgctaaacgaaattaccaccaaaactaaaaaaaaacctcgaaaacctttacaaataacgcgcgcccccaaccctcttcttccataccccgccgctacgctcccgcttcctcccaaaacccttcctaaccctcgcgaatctaacaaaaaataaaaaaaaaacgaaattcaaaatcccgaaaataaacaccgaacgctaacaaatcactaatcacgttaaaaaaacaactatactaaaaaacaaattccc

SEQ ID NO: 18469 - DNA, 650 bp, Artificial Sequence
  chemically treated genomic DNA (Homo sapiens) CpG-island No: 18469
ttgtcgtcgtcggggtcgtcggttttttatattcgttgagacgtcggtacggggattttcgtgtttttttagggattggcgtcgcgtttaggtggtcgagtttgcgttgttggaggaggcgttttcgcgtcggttttatttcggggtcggtagggggcgaaggcggagttggaagtcgtcgtcgggtttcgggggatcggttttcgcgttttttttcgcgtttttcgtatagtgtttatgcgtacggtttagtttttatagcggtcgcgggggttttgtttttcgtattcgggcgtagtcgggtggatttcgagtaggtgcggagtttcgggcggcgggcgcgggtgcgagggatttttgacgtttttgtttttgtttttttgtcgtttttagtttgtttgtcgtcgttttggcgttttcgttttttcgcggtgcggggttgtatatcgattttgggtttcgttcgatttgtcgtcgaggcgttttttagatttagaggggcgttggtttggagtagcgggtcgtttgtgtttttttttttttgcgtcgcgttcggggattcgaagggtgcggggttttgaggaggtgacgcgcggggtttttcgtattttggttttgttcgtatttttttttttttttaggtgtgagta

SEQ ID NO: 18470 - DNA, 650 bp, Artificial Sequence
  chemically treated genomic DNA (Homo sapiens) CpG-island No: 18470
tactcacacctaaaaaaaaaaaaaaatacgaacaaaaccaaaatacgaaaaaccccgcgcgtcacctcctcaaaaccccgcacccttcgaatccccgaacgcgacgcaaaaaaaaaaaaacacaaacgacccgctactccaaaccaacgcccctctaaatctaaaaaacgcctcgacgacaaatcgaacgaaacccaaaatcgatatacaaccccgcaccgcgaaaaaacgaaaacgccaaaacgacgacaaacaaactaaaaacgacaaaaaaacaaaaacaaaaacgtcaaaaatccctcgcacccgcgcccgccgcccgaaactccgcacctactcgaaatccacccgactacgcccgaatacgaaaaacaaaacccccgcgaccgctataaaaactaaaccgtacgcataaacactatacgaaaaacgcgaaaaaaaacgcgaaaaccgatcccccgaaacccgacgacgacttccaactccgccttcgccccctaccgaccccgaaataaaaccgacgcgaaaacgcctcctccaacaacgcaaactcgaccacctaaacgcgacgccaatccctaaaaaaacacgaaaatccccgtaccgacgtctcaacgaatataaaaaaccgacgaccccgacgacgacaa

SEQ ID NO: 18471 - DNA, 650 bp, Artificial Sequence
  chemically treated genomic DNA (Homo sapiens) CpG-island No: 18471
tgtttatatttgggagagagggagaatgcgggtaaggttagggtgcgggaggtttcgcgcgttatttttttagagtttcgtatttttcggattttcgggcgcggcgtagaggagagaggatatagacgattcgttgttttaggttagcgtttttttaggtttgggaggcgtttcggcggtaaatcgagcgaagtttaggatcggtgtgtaatttcgtatcgcggggaggcgggggcgttaaaacgacgatagataggttgggagcgataaagaaatagggatagaggcgttagggatttttcgtattcgcgttcgtcgttcggggtttcgtatttgttcgagatttattcggttgcgttcgagtgcggaaggtaaggttttcgcggtcgttataaaggttgggtcgtgcgtatgagtattgtgcggggggcgcgggaggaagcgcgggagtcggtttttcggggttcggcggcgatttttagtttcgttttcgttttttgtcggtttcggggtgaggtcggcgcggaggcgttttttttagtagcgtaggttcggttatttggacgcggcgttagtttttagaggggtacgaaggttttcgtgtcggcgttttaacgagtgtggagggtcggcggtttcgacggcggtag

SEQ ID NO: 18472 - DNA, 650 bp, Artificial Sequence
  chemically treated genomic DNA (Homo sapiens) CpG-island No: 18472
ctaccgccgtcgaaaccgccgaccctccacactcgttaaaacgccgacacgaaaaccttcgtacccctctaaaaactaacgccgcgtccaaataaccgaacctacgctactaaaaaaaacgcctccgcgccgacctcaccccgaaaccgacaaaaaacgaaaacgaaactaaaaatcgccgccgaaccccgaaaaaccgactcccgcgcttcctcccgcgccccccgcacaatactcatacgcacgacccaacctttataacgaccgcgaaaaccttaccttccgcactcgaacgcaaccgaataaatctcgaacaaatacgaaaccccgaacgacgaacgcgaatacgaaaaatccctaacgcctctatccctatttctttatcgctcccaacctatctatcgtcgttttaacgcccccgcctccccgcgatacgaaattacacaccgatcctaaacttcgctcgatttaccgccgaaacgcctcccaaacctaaaaaaacgctaacctaaaacaacgaatcgtctatatcctctctcctctacgccgcgcccgaaaatccgaaaaatacgaaactctaaaaaaataacgcgcgaaacctcccgcaccctaaccttacccgcattctccctctctcccaaatataaaca

SEQ ID NO: 18473 - DNA, 641 bp, Artificial Sequence
  chemically treated genomic DNA (Homo sapiens) CpG-island No: 18473
cgtcgcgtagcgttttttttatcggttttagggtttcgcgaaagaggtcggtattgagtttttcgaagcgggcgcgcgtgatggacgtatagaagtttacgttttcgtagagcgagtcgatttcgatgttcgtttgcgtggacgagtttagggtgcgtttggcgcgttcgtaagcggtgcgtagcgttttacggcgcgtttgttgggtttaatgttttttttgtgtttgcgtttgaattttttcgttaggtggtttattatgcggttgtcgaagtttttatcgtttaggtgggtgtcgtcggtcgtggattttatttcgaagatgttattttcgatggttaggatggatacgtcgaaagtgttatcgtttaggttaaagatgagtacgtttttttcgtcgttcgcgtagttttttttgtttaggtcgtaggcgatggtcgtcgtcgtgggttcgttgatgatgcgtagtatattgagtttcgtgatggtgtttgcgtttttggtggtttggcgttgcgagtcgttgaaataggtcgggatcgttatgatcgcgttgtgtattttgttttttaggtaggttttcgcgattttttttattttcgtgaggattatggaggatattttttttgggaagaaggttt

SEQ ID NO: 18474 - DNA, 641 bp, Artificial Sequence
  chemically treated genomic DNA (Homo sapiens) CpG-island No: 18474
aaaccttcttcccaaaaaaaatatcctccataatcctcacgaaaataaaaaaaatcgcgaaaacctacctaaaaaacaaaatacacaacgcgatcataacgatcccgacctatttcaacgactcgcaacgccaaaccaccaaaaacgcaaacaccatcacgaaactcaatatactacgcatcatcaacgaacccacgacgacgaccatcgcctacgacctaaacaaaaaaaactacgcgaacgacgaaaaaaacgtactcatctttaacctaaacgataacactttcgacgtatccatcctaaccatcgaaaataacatcttcgaaataaaatccacgaccgacgacacccacctaaacgataaaaacttcgacaaccgcataataaaccacctaacgaaaaaattcaaacgcaaacacaaaaaaaacattaaacccaacaaacgcgccgtaaaacgctacgcaccgcttacgaacgcgccaaacgcaccctaaactcgtccacgcaaacgaacatcgaaatcgactcgctctacgaaaacgtaaacttctatacgtccatcacgcgcgcccgcttcgaaaaactcaataccgacctctttcgcgaaaccctaaaaccgataaaaaaaacgctacgcgacg

SEQ ID NO: 18475 - DNA, 641 bp, Artificial Sequence
  chemically treated genomic DNA (Homo sapiens) CpG-island No: 18475
agattttttttttagaggagatattttttatggtttttacgaagatgaaggagatcgcggaagtttatttggggggtaaggtgtatagcgcggttataacggtttcggtttattttaacgattcgtagcgttaggttattaaggacgtaggtattattacggggtttaatgtgttgcgtattattaacgagtttacggcggcggttatcgtttacggtttggataagaagggttgcgcgggcggcgagaagaacgtgtttatttttgatttgggcggtggtattttcgacgtgtttattttgattatcgaggatggtattttcgaggtgaagtttacggtcggcgatatttatttgggcggtgaggatttcgataatcgtatggtgagttatttggcggaggagtttaagcgtaagtataagaaggatattgggtttaataagcgcgtcgtgaggcgttgcgtatcgtttgcgagcgcgttaagcgtattttgagttcgtttacgtaggcgagtatcgagatcgattcgttttacgagggcgtggatttttatacgtttattacgcgcgttcgtttcgaggagtttaatgtcgatttttttcgcgggattttggagtcggtggagaaggcgttgcgcgacg

SEQ ID NO: 18476 - DNA, 641 bp, Artificial Sequence
  chemically treated genomic DNA (Homo sapiens) CpG-island No: 18476
cgtcgcgcaacgccttctccaccgactccaaaatcccgcgaaaaaaatcgacattaaactcctcgaaacgaacgcgcgtaataaacgtataaaaatccacgccctcgtaaaacgaatcgatctcgatactcgcctacgtaaacgaactcaaaatacgcttaacgcgctcgcaaacgatacgcaacgcctcacgacgcgcttattaaacccaatatccttcttatacttacgcttaaactcctccgccaaataactcaccatacgattatcgaaatcctcaccgcccaaataaatatcgccgaccgtaaacttcacctcgaaaataccatcctcgataatcaaaataaacacgtcgaaaataccaccgcccaaatcaaaaataaacacgttcttctcgccgcccgcgcaacccttcttatccaaaccgtaaacgataaccgccgccgtaaactcgttaataatacgcaacacattaaaccccgtaataatacctacgtccttaataacctaacgctacgaatcgttaaaataaaccgaaaccgttataaccgcgctatacaccttaccccccaaataaacttccgcgatctccttcatcttcgtaaaaaccataaaaaatatctcctctaaaaaaaaaatct

SEQ ID NO: 18477 - DNA, 700 bp, Artificial Sequence
  chemically treated genomic DNA (Homo sapiens) CpG-island No: 18477
tcgggatttgacgcgtcggtaataagtaggcggtttggtagtcgttcgttatcgggttttcgtagcgcgttcgtcgcgtttcggtttttcgtacggatcggcgttttttcggtttcgtatttcgttaggttcgcggttcgtcgtttttcggtttgggttaaagttgcgtaaatagttttataattggtaaatatttatcggtcgtaataggaattagagttgcggagattttagggagtttaaggtaaattagtcgcgggaaaggcgggcgaaggcgaaggggtcgcgagttgtagtggcggcggcgcgcggcgttcggcgttcgggttgggttgcgcggagaggttttggttttgttagggattgtgttgtaataaaggattttcgttgtcgtatagtcgcgtttgtcgtatcgtattgagtcggtttcgtttacgcggcgatttcgggtttgtttattagttcgttgcggcgttcgttagtttttttttttttttcgttcgtttatttattttgtcgttggttgttaggggtattcgcggtcgtttgtttgttgtaataagtttttgcgtcgagtttcgaggaggttggcgtaattcgtatcgcgggggtcgtcgcggcggcggcggtttgattattttttttgttttttttaagggtaggtttgggatttttttttttttttgtttgtatagttgga

SEQ ID NO: 18478 - DNA, 700 bp, Artificial Sequence
  chemically treated genomic DNA (Homo sapiens) CpG-island No: 18478
tccaactatacaaacaaaaaaaaaaaaaaatcccaaacctacccttaaaaaaaacaaaaaaaataatcaaaccgccgccgccgcgacgacccccgcgatacgaattacgccaacctcctcgaaactcgacgcaaaaacttattacaacaaacaaacgaccgcgaatacccctaacaaccaacgacaaaataaataaacgaacgaaaaaaaaaaaaaaactaacgaacgccgcaacgaactaataaacaaacccgaaatcgccgcgtaaacgaaaccgactcaatacgatacgacaaacgcgactatacgacaacgaaaatcctttattacaacacaatccctaacaaaaccaaaacctctccgcgcaacccaacccgaacgccgaacgccgcgcgccgccgccactacaactcgcgaccccttcgccttcgcccgcctttcccgcgactaatttaccttaaactccctaaaatctccgcaactctaattcctattacgaccgataaatatttaccaattataaaactatttacgcaactttaacccaaaccgaaaaacgacgaaccgcgaacctaacgaaatacgaaaccgaaaaaacgccgatccgtacgaaaaaccgaaacgcgacgaacgcgctacgaaaacccgataacgaacgactaccaaaccgcctacttattaccgacgcgtcaaatcccga

SEQ ID NO: 18479 - DNA, 700 bp, Artificial Sequence
  chemically treated genomic DNA (Homo sapiens) CpG-island No: 18479
tttagttgtgtaaataggaggaggaggaggttttaagtttatttttgagaggggtaagaggggtggttaagtcgtcgtcgtcgcgacggttttcgcggtgcgggttgcgttagttttttcggagttcgacgtagaaatttgttgtaataaataggcgatcgcgggtgtttttagtagttagcggtagagtgggtgggcgggcgagagggaggggaaggttggcggacgtcgtagcgaattggtgggtagattcggagtcgtcgcgtaagcggggtcggtttagtgcggtgcggtaggcgcggttgtgcggtagcggaagttttttgttgtagtatagtttttggtagagttagagttttttcgcgtagtttagttcgagcgtcgagcgtcgcgcgtcgtcgttattgtagttcgcggttttttcgttttcgttcgtttttttcgcggttgatttgttttaaattttttaaaattttcgtagttttggtttttgttgcggtcggtaagtatttgttagttgtggggttatttgcgtaattttggtttaggtcggagggcgacgggtcgcgggtttggcggagtgcggggtcggaggggcgtcgattcgtgcggggagtcggagcgcggcggacgcgttgcgaggattcggtgacgggcggttgttaggtcgtttgtttgttgtcggcgcgttaggtttcgg

SEQ ID NO: 18480 - DNA, 700 bp, Artificial Sequence
  chemically treated genomic DNA (Homo sapiens) CpG-island No: 18480
ccgaaacctaacgcgccgacaacaaacaaacgacctaacaaccgcccgtcaccgaatcctcgcaacgcgtccgccgcgctccgactccccgcacgaatcgacgcccctccgaccccgcactccgccaaacccgcgacccgtcgccctccgacctaaaccaaaattacgcaaataaccccacaactaacaaatacttaccgaccgcaacaaaaaccaaaactacgaaaattttaaaaaatttaaaacaaatcaaccgcgaaaaaaacgaacgaaaacgaaaaaaccgcgaactacaataacgacgacgcgcgacgctcgacgctcgaactaaactacgcgaaaaaactctaactctaccaaaaactatactacaacaaaaaacttccgctaccgcacaaccgcgcctaccgcaccgcactaaaccgaccccgcttacgcgacgactccgaatctacccaccaattcgctacgacgtccgccaaccttcccctccctctcgcccgcccacccactctaccgctaactactaaaaacacccgcgatcgcctatttattacaacaaatttctacgtcgaactccgaaaaaactaacgcaacccgcaccgcgaaaaccgtcgcgacgacgacgacttaaccacccctcttacccctctcaaaaataaacttaaaacctcctcctcctcctatttacacaactaaa

SEQ ID NO: 18481 - DNA, 782 bp, Artificial Sequence
  chemically treated genomic DNA (Homo sapiens) CpG-island No: 18481
ttcgtatatatattttcgggcgcgcgtttgggcgggtacgttagtttcgttcggtcgcgttgagcgtatacgttttatttcggtcgcggtttttcgttttcggcgacgttttttatttttcgtttttcgaaagttattggatgtaggggtggcgcggcgttcgggtagcgcgcggcgagggcgatttttttcgcggcgcgttttagacgtcgcgtttcggtaagagggagtagggcgagtagcggatcgaggtttttagttgggaaggcgcgttgagttttcggtattcggttcggggtagcgggaggcggtcgcggatttgttcgcggggcggcgggaggcggtgggcggtggcggggaagtcgcggaggggcggggaacgagcggtgggcgcgtcgttatttattggttcggtcggtcggcgggcgggcgtggaggcggtagcggcgcgtttgttggagttgtagtcggagatacgtttggttgtttggaaggcgttgtaggaggcggaggaagggtcgttgcggtttcgtcgtagatttcggttttcgggttatttttttttatcgtttttattttgagttttttttttttttttttttttattttatttttttttttttcgcgtttggttttttcgtttgagtttcgaatttacgttttcgtcgtattttaaggaggttcgtgttagttatgagttttttgttttgggatcgtttcgtatttgttgcgtttttttcgttcggggaagttcgtttttaaggtatagtttggtttttttt

SEQ ID NO: 18482 - DNA, 782 bp, Artificial Sequence
  chemically treated genomic DNA (Homo sapiens) CpG-island No: 18482
aaaaaaaaccaaactataccttaaaaacgaacttccccgaacgaaaaaaacgcaacaaatacgaaacgatcccaaaacaaaaaactcataactaacacgaacctccttaaaatacgacgaaaacgtaaattcgaaactcaaacgaaaaaaccaaacgcgaaaaaaaaaaaaataaaataaaaaaaaaaaaaaaaaaaaaactcaaaataaaaacgataaaaaaaaataacccgaaaaccgaaatctacgacgaaaccgcaacgacccttcctccgcctcctacaacgccttccaaacaaccaaacgtatctccgactacaactccaacaaacgcgccgctaccgcctccacgcccgcccgccgaccgaccgaaccaataaataacgacgcgcccaccgctcgttccccgcccctccgcgacttccccgccaccgcccaccgcctcccgccgccccgcgaacaaatccgcgaccgcctcccgctaccccgaaccgaataccgaaaactcaacgcgccttcccaactaaaaacctcgatccgctactcgccctactccctcttaccgaaacgcgacgtctaaaacgcgccgcgaaaaaaatcgccctcgccgcgcgctacccgaacgccgcgccacccctacatccaataactttcgaaaaacgaaaaataaaaaacgtcgccgaaaacgaaaaaccgcgaccgaaataaaacgtatacgctcaacgcgaccgaacgaaactaacgtacccgcccaaacgcgcgcccgaaaatatatatacgaa

SEQ ID NO: 18483 - DNA, 782 bp, Artificial Sequence
  chemically treated genomic DNA (Homo sapiens) CpG-island No: 18483
ggaagggattaagttgtgttttgggagcgagttttttcgggcggggagagcgtagtagatgcggagcggttttagaataaaaggtttatggttggtacgggtttttttggagtgcggcggggacgtgggttcgggatttaggcgagagagttagacgcgggaggaaaaaaaatgaagtgagaaaagagaaggagggagagtttagggtgagagcggtgagaagaggtgattcggaggtcgaggtttgcggcggagtcgtagcggtttttttttcgttttttgtagcgttttttaggtaattaagcgtgttttcggttgtaattttagtaagcgcgtcgttgtcgtttttacgttcgttcgtcggtcggtcgagttagtaagtagcggcgcgtttatcgttcgtttttcgttttttcgcggttttttcgttatcgtttatcgtttttcgtcgtttcgcgggtaagttcgcgatcgtttttcgttgtttcgagtcgggtgtcgggggtttagcgcgtttttttagttgggagtttcggttcgttgttcgttttgtttttttttgtcggggcgcggcgtttggggcgcgtcgcggggagggtcgttttcgtcgcgcgttgttcgggcgtcgcgttatttttatatttaatggttttcggggagcgggaagtggggggcgtcgtcgggggcgaggagtcgcggtcggggtggggcgtgtgcgtttagcgcggtcgagcgaggttgacgtgttcgtttaagcgcgcgttcgggagtgtgtgtgcggg

SEQ ID NO: 18484 - DNA, 782 bp, Artificial Sequence
  chemically treated genomic DNA (Homo sapiens) CpG-island No: 18484
cccgcacacacactcccgaacgcgcgcttaaacgaacacgtcaacctcgctcgaccgcgctaaacgcacacgccccaccccgaccgcgactcctcgcccccgacgacgccccccacttcccgctccccgaaaaccattaaatataaaaataacgcgacgcccgaacaacgcgcgacgaaaacgaccctccccgcgacgcgccccaaacgccgcgccccgacaaaaaaaaacaaaacgaacaacgaaccgaaactcccaactaaaaaaacgcgctaaacccccgacacccgactcgaaacaacgaaaaacgatcgcgaacttacccgcgaaacgacgaaaaacgataaacgataacgaaaaaaccgcgaaaaaacgaaaaacgaacgataaacgcgccgctacttactaactcgaccgaccgacgaacgaacgtaaaaacgacaacgacgcgcttactaaaattacaaccgaaaacacgcttaattacctaaaaaacgctacaaaaaacgaaaaaaaaaccgctacgactccgccgcaaacctcgacctccgaatcacctcttctcaccgctctcaccctaaactctccctccttctcttttctcacttcattttttttcctcccgcgtctaactctctcgcctaaatcccgaacccacgtccccgccgcactccaaaaaaacccgtaccaaccataaaccttttattctaaaaccgctccgcatctactacgctctccccgcccgaaaaaactcgctcccaaaacacaacttaatcccttcc

SEQ ID NO: 18485 - DNA, 537 bp, Artificial Sequence
  chemically treated genomic DNA (Homo sapiens) CpG-island No: 18485
tcgagatagtcggcggtatttatagatgaggtagcggcggcggcggcggcggcggtagttcgggttttttatgagtaggcggcggcggcgacgggtgcggcggtatcggtagttttcggtttttagggaggtacgaggagtttgttttttggtggacggagattggtcggtgtgggaacgtttttcgcggttcggttttttagtttatttgttcgtagttttgagtattcggcggggtattgttcgggtagaggcgggggcgtttagtcgattcgcgggtttttaattcggggattcgttcgtttcggtgttaggtttttcgggcgcggttgtttagggttagggtgggcgtggtcggaacgtgggggtttttcgggggcgtacgtttagcgttcgttttgtttttgtttcgaagtttcgcgttgttgggagcggtagcgcgtggttgtataggcgtattttaggcgttgatttgagaggggatttttagaatttttgagtttttagggagtttggcgtttaatgttttgggtatgt

SEQ ID NO: 18486 - DNA, 537 bp, Artificial Sequence
  chemically treated genomic DNA (Homo sapiens) CpG-island No: 18486
acatacccaaaacattaaacgccaaactccctaaaaactcaaaaattctaaaaatcccctctcaaatcaacgcctaaaatacgcctatacaaccacgcgctaccgctcccaacaacgcgaaacttcgaaacaaaaacaaaacgaacgctaaacgtacgcccccgaaaaacccccacgttccgaccacgcccaccctaaccctaaacaaccgcgcccgaaaaacctaacaccgaaacgaacgaatccccgaattaaaaacccgcgaatcgactaaacgcccccgcctctacccgaacaataccccgccgaatactcaaaactacgaacaaataaactaaaaaaccgaaccgcgaaaaacgttcccacaccgaccaatctccgtccaccaaaaaacaaactcctcgtacctccctaaaaaccgaaaactaccgataccgccgcacccgtcgccgccgccgcctactcataaaaaacccgaactaccgccgccgccgccgccgccgctacctcatctataaataccgccgactatctcga

SEQ ID NO: 18487 - DNA, 537 bp, Artificial Sequence
  chemically treated genomic DNA (Homo sapiens) CpG-island No: 18487
atatgtttaaggtattgaacgttagattttttaaggatttagggattttaaaagtttttttttaaattagcgtttaaaatacgtttgtatagttacgcgttatcgtttttagtagcgcgggatttcgggatagggataaggcggacgttaggcgtgcgttttcggggagtttttacgtttcggttacgtttattttggttttgggtagtcgcgttcgggaggtttggtatcgaggcgggcgggttttcgagttaggggttcgcgagtcggttgggcgttttcgtttttgttcgggtagtgtttcgtcgagtgtttagaattgcggataaataggttggagggtcgggtcgcggaaggcgtttttatatcggttagttttcgtttattaggaagtaaatttttcgtatttttttggggatcgaaaattgtcggtgtcgtcgtattcgtcgtcgtcgtcgtttgtttatggagagttcgggttgtcgtcgtcgtcgtcgtcgtcgttgttttatttatgagtatcgtcggttgtttcgg

SEQ ID NO: 18488 - DNA, 537 bp, Artificial Sequence
  chemically treated genomic DNA (Homo sapiens) CpG-island No: 18488
ccgaaacaaccgacgatactcataaataaaacaacgacgacgacgacgacgacgacaacccgaactctccataaacaaacgacgacgacgacgaatacgacgacaccgacaattttcgatccccaaaaaaatacgaaaaatttacttcctaataaacgaaaactaaccgatataaaaacgccttccgcgacccgaccctccaacctatttatccgcaattctaaacactcgacgaaacactacccgaacaaaaacgaaaacgcccaaccgactcgcgaacccctaactcgaaaacccgcccgcctcgataccaaacctcccgaacgcgactacccaaaaccaaaataaacgtaaccgaaacgtaaaaactccccgaaaacgcacgcctaacgtccgccttatccctatcccgaaatcccgcgctactaaaaacgataacgcgtaactatacaaacgtattttaaacgctaatttaaaaaaaaacttttaaaatccctaaatccttaaaaaatctaacgttcaataccttaaacatat

SEQ ID NO: 18489 - DNA, 558 bp, Artificial Sequence
  chemically treated genomic DNA (Homo sapiens) CpG-island No: 18489
gaggcggggggttacgggggaggggagacggggcgggtgtgaagtttgtgtcgggaaaagaaaaatatgagtgtttttttttgtgtgcgtataaatagtcgagcgcggggaggtcgggttcggggttacgcggtttcgggttgtagttgtcgtcgtggggcggggggttttaggcggttatcgggcgtcgcggtcgtttgcggtattagtatttcggcggcgcgggcggtcgttgttttcgcgcgattttagttcgtttagagcgcgtttcggtatcgattttcggggcgaggcgagcgtagttttcgttggttaataaggtaagcgcggcgcggggagcggtggtcgggagtttgggcgttaggcgatttttcgatagggcgtacggatcggtttttcgtcgcgcgggtcgatgatcgacggggaggttcgagtttggtttcgacgttttggttcggtgttttcgacgcgtttggagttcgggagggaggcgcgggtttggtttgggtttaggaggatggagttcgatttagggtcgttttttttcgtttgggggtg

SEQ ID NO: 18490 - DNA, 558 bp, Artificial Sequence
  chemically treated genomic DNA (Homo sapiens) CpG-island No: 18490
cacccccaaacgaaaaaaaacgaccctaaatcgaactccatcctcctaaacccaaaccaaacccgcgcctccctcccgaactccaaacgcgtcgaaaacaccgaaccaaaacgtcgaaaccaaactcgaacctccccgtcgatcatcgacccgcgcgacgaaaaaccgatccgtacgccctatcgaaaaatcgcctaacgcccaaactcccgaccaccgctccccgcgccgcgcttaccttattaaccaacgaaaactacgctcgcctcgccccgaaaatcgataccgaaacgcgctctaaacgaactaaaatcgcgcgaaaacaacgaccgcccgcgccgccgaaatactaataccgcaaacgaccgcgacgcccgataaccgcctaaaaccccccgccccacgacgacaactacaacccgaaaccgcgtaaccccgaacccgacctccccgcgctcgactatttatacgcacacaaaaaaaaacactcatatttttcttttcccgacacaaacttcacacccgccccgtctcccctcccccgtaaccccccgcctc

SEQ ID NO: 18491 - DNA, 558 bp, Artificial Sequence
  chemically treated genomic DNA (Homo sapiens) CpG-island No: 18491
tatttttaagcggggagagacggttttgagtcgggttttatttttttgggtttaggttaggttcgcgtttttttttcgggttttaggcgcgtcggggatatcgggttagggcgtcggggttagattcgggttttttcgtcggttatcgattcgcgcggcggagaatcggttcgtgcgttttgtcgaggggtcgtttggcgtttaggttttcggttatcgtttttcgcgtcgcgtttattttgttggttagcgggggttgcgttcgtttcgtttcgagggtcggtgtcggggcgcgttttggacgggttggggtcgcgcgaggatagcggtcgttcgcgtcgtcggaatgttgatgtcgtaggcggtcgcgacgttcggtggtcgtttgggatttttcgttttacggcggtagttgtagttcggagtcgcgtgatttcgggttcgattttttcgcgttcggttgtttgtgcgtatataaaagagaatatttatattttttttttttcggtatagattttatattcgtttcgttttttttttttcgtaatttttcgtttt

SEQ ID NO: 18492 - DNA, 558 bp, Artificial Sequence
  chemically treated genomic DNA (Homo sapiens) CpG-island No: 18492
aaaacgaaaaattacgaaaaaaaaaaaacgaaacgaatataaaatctataccgaaaaaaaaaaaatataaatattctcttttatatacgcacaaacaaccgaacgcgaaaaaatcgaacccgaaatcacgcgactccgaactacaactaccgccgtaaaacgaaaaatcccaaacgaccaccgaacgtcgcgaccgcctacgacatcaacattccgacgacgcgaacgaccgctatcctcgcgcgaccccaacccgtccaaaacgcgccccgacaccgaccctcgaaacgaaacgaacgcaacccccgctaaccaacaaaataaacgcgacgcgaaaaacgataaccgaaaacctaaacgccaaacgacccctcgacaaaacgcacgaaccgattctccgccgcgcgaatcgataaccgacgaaaaaacccgaatctaaccccgacgccctaacccgatatccccgacgcgcctaaaacccgaaaaaaaaacgcgaacctaacctaaacccaaaaaaataaaacccgactcaaaaccgtctctccccgcttaaaaata

SEQ ID NO: 18493 - DNA, 1369 bp, Artificial Sequence
  chemically treated genomic DNA (Homo sapiens) CpG-island No: 18493
  unsure (659..)
atttcgcgtcgcgcgtagcgagggattagaaggtttcggacgtcgcggtagggtcggttagggttttacgagttagggagttgtttcgtatttttaaacgtttagtatttatttacggttgaaagtacgtatttgacgcgttcgggcgttttcgcggtgagtcgcgtcgtcgttttcggggttcgcgaaggtggtttagttcgggcgttttagtttcgacgttttcggggtagagagtaacgttcggggacgaacgggacgggtgcgtttagcggtcggggttgcgttgggcgaggtaagcggcgagaggggagcgtttcggcgtttaggtaatagttatttttagtgggagagtcgttcggggtcggcgtcgtttcgcgttcgttgtttcgcgttttacgttcgtggcgtttcgcgttcgggtcggttgggggcgtagggtcggcgtcgttttttttagtttttcggttttcggcgttcggcggtaattcgttcgcgggttttgtttttcgtattttttagttcggtttcggcggtcgttgatttaggaatcgcggcgtttcgttggaacgagatgggacggggcgggcgcggttagggcggcgcgggttggggcggcgcgcggtacgcgtcgggtagcggcggggggcgcggacggnntgtgcgtggcggggcggtgcggggggcggtcgtgtgcgaggcgcgagtgtgagcgcgcgcgggaggcgggcgggcgggtttcggtaggcgagcggcgttcgcgggcgagttaggaaggcggcgggaacgtaaagttgttttttcgttggttcgcgttttcggtggggcgggagtcggggttatcgaagcggcggtcgcggattcggtttttcgcggtatttgggtagcggtttcgtacgagcggtagcggcgtgggcggcgttggcggcggcgcgcgggaagcgaatcggagtttcggcgcggttcggcggtcgtcggggagttcggtttaggtgcgcggcgaggggggcgcgggtcggagttaggcggcggggattagggcggcgcgtagcgttcgcgttagttggaggatttttttagcggacgtttaggtttttggtcgggttttcggtttttagcggtagcggttgtcggagtttttcgttttcgagagttggttgcggggttcgggttcgtttttatcggttttaggttcggtcgtttcgtttttcgttcgtttgcgttcgtttttagtttaagatttttagggtattggtcgcgttgttgggtgatttttcgggtttaagttgtaagggggcgggtcgggtcggaggtggagtttttcgttaattgaagttttcgttataaattgaattttttgtattgttga

SEQ ID NO: 18494 - DNA, 1369 bp, Artificial Sequence
  chemically treated genomic DNA (Homo sapiens) CpG-island No: 18494
  unsure (710..)
tcaacaatacaaaaaattcaatttataacgaaaacttcaattaacgaaaaactccacctccgacccgacccgcccccttacaacttaaacccgaaaaatcacccaacaacgcgaccaataccctaaaaatcttaaactaaaaacgaacgcaaacgaacgaaaaacgaaacgaccgaacctaaaaccgataaaaacgaacccgaaccccgcaaccaactctcgaaaacgaaaaactccgacaaccgctaccgctaaaaaccgaaaacccgaccaaaaacctaaacgtccgctaaaaaaatcctccaactaacgcgaacgctacgcgccgccctaatccccgccgcctaactccgacccgcgcccccctcgccgcgcacctaaaccgaactccccgacgaccgccgaaccgcgccgaaactccgattcgcttcccgcgcgccgccgccaacgccgcccacgccgctaccgctcgtacgaaaccgctacccaaataccgcgaaaaaccgaatccgcgaccgccgcttcgataaccccgactcccgccccaccgaaaacgcgaaccaacgaaaaaacaactttacgttcccgccgccttcctaactcgcccgcgaacgccgctcgcctaccgaaacccgcccgcccgcctcccgcgcgcgctcacactcgcgcctcgcacacgaccgccccccgcaccgccccgccacgcacannccgtccgcgccccccgccgctacccgacgcgtaccgcgcgccgccccaacccgcgccgccctaaccgcgcccgccccgtcccatctcgttccaacgaaacgccgcgattcctaaatcaacgaccgccgaaaccgaactaaaaaatacgaaaaacaaaacccgcgaacgaattaccgccgaacgccgaaaaccgaaaaactaaaaaaaacgacgccgaccctacgcccccaaccgacccgaacgcgaaacgccacgaacgtaaaacgcgaaacaacgaacgcgaaacgacgccgaccccgaacgactctcccactaaaaataactattacctaaacgccgaaacgctcccctctcgccgcttacctcgcccaacgcaaccccgaccgctaaacgcacccgtcccgttcgtccccgaacgttactctctaccccgaaaacgtcgaaactaaaacgcccgaactaaaccaccttcgcgaaccccgaaaacgacgacgcgactcaccgcgaaaacgcccgaacgcgtcaaatacgtactttcaaccgtaaataaatactaaacgtttaaaaatacgaaacaactccctaactcgtaaaaccctaaccgaccctaccgcgacgtccgaaaccttctaatccctcgctacgcgcgacgcgaaat

SEQ ID NO: 18495 - DNA, 1369 bp, Artificial Sequence
  chemically treated genomic DNA (Homo sapiens) CpG-island No: 18495
  unsure (710..)
ttagtagtgtagggagtttaatttatagcggaggttttaattggcgggagattttattttcggttcggttcgtttttttgtaatttgagttcggaggattatttagtagcgcggttaatgttttagaaattttgggttgagggcgggcgtaggcgggcggagggcggagcggtcgggtttggggtcggtgggggcgggttcgggtttcgtagttagttttcgggggcgggggatttcggtagtcgttgtcgttggggatcgggagttcgattagggatttgggcgttcgttggggaggttttttagttggcgcgagcgttgcgcgtcgttttggttttcgtcgtttggtttcggttcgcgtttttttcgtcgcgtatttgagtcgagtttttcggcggtcgtcgagtcgcgtcggagtttcggttcgtttttcgcgcgtcgtcgttaacgtcgtttacgtcgttgtcgttcgtgcggggtcgttgtttaggtgtcgcgggaggtcgggttcgcggtcgtcgtttcggtggtttcggttttcgttttatcgaggacgcgggttagcgaggaggtaattttgcgttttcgtcgtttttttggttcgttcgcgggcgtcgttcgtttgtcggagttcgttcgttcgtttttcgcgcgcgtttatattcgcgtttcgtatacggtcgtttttcgtatcgtttcgttacgtatanntcgttcgcgtttttcgtcgttgttcgacgcgtgtcgcgcgtcgttttagttcgcgtcgttttggtcgcgttcgtttcgttttatttcgttttagcggggcgtcgcggtttttgggttagcggtcgtcggggtcgggttgagaggtgcggagggtagagttcgcgggcgggttatcgtcgggcgtcggagatcggagagttggggaaagcggcgtcggttttgcgtttttagtcgattcgggcgcggggcgttacgggcgtggggcgcggggtagcgggcgcggggcggcgtcggtttcgggcggtttttttattaggggtagttgttgtttgaacgtcggagcgtttttttttcgtcgtttgtttcgtttagcgtagtttcggtcgttgggcgtattcgtttcgttcgttttcggacgttgttttttatttcgggaacgtcgagattggagcgttcgaattgagttattttcgcggatttcgagagcggcggcgcgatttatcgcggaggcgttcggacgcgttaagtgcgtatttttaatcgtaaatgggtgttgagcgtttaggggtgcggggtaattttttaattcgtggggttttggtcggttttgtcgcggcgttcgagattttttgatttttcgttgcgcgcggcgcggggt

SEQ ID NO: 18496 - DNA, 1369 bp, Artificial Sequence
  chemically treated genomic DNA (Homo sapiens) CpG-island No: 18496
  unsure (659..)
accccgcgccgcgcgcaacgaaaaatcaaaaaatctcgaacgccgcgacaaaaccgaccaaaaccccacgaattaaaaaattaccccgcacccctaaacgctcaacacccatttacgattaaaaatacgcacttaacgcgtccgaacgcctccgcgataaatcgcgccgccgctctcgaaatccgcgaaaataactcaattcgaacgctccaatctcgacgttcccgaaataaaaaacaacgtccgaaaacgaacgaaacgaatacgcccaacgaccgaaactacgctaaacgaaacaaacgacgaaaaaaaaacgctccgacgttcaaacaacaactacccctaataaaaaaaccgcccgaaaccgacgccgccccgcgcccgctaccccgcgccccacgcccgtaacgccccgcgcccgaatcgactaaaaacgcaaaaccgacgccgctttccccaactctccgatctccgacgcccgacgataacccgcccgcgaactctaccctccgcacctctcaacccgaccccgacgaccgctaacccaaaaaccgcgacgccccgctaaaacgaaataaaacgaaacgaacgcgaccaaaacgacgcgaactaaaacgacgcgcgacacgcgtcgaacaacgacgaaaaacgcgaacganntatacgtaacgaaacgatacgaaaaacgaccgtatacgaaacgcgaatataaacgcgcgcgaaaaacgaacgaacgaactccgacaaacgaacgacgcccgcgaacgaaccaaaaaaacgacgaaaacgcaaaattacctcctcgctaacccgcgtcctcgataaaacgaaaaccgaaaccaccgaaacgacgaccgcgaacccgacctcccgcgacacctaaacaacgaccccgcacgaacgacaacgacgtaaacgacgttaacgacgacgcgcgaaaaacgaaccgaaactccgacgcgactcgacgaccgccgaaaaactcgactcaaatacgcgacgaaaaaaacgcgaaccgaaaccaaacgacgaaaaccaaaacgacgcgcaacgctcgcgccaactaaaaaacctccccaacgaacgcccaaatccctaatcgaactcccgatccccaacgacaacgactaccgaaatcccccgcccccgaaaactaactacgaaacccgaacccgcccccaccgaccccaaacccgaccgctccgccctccgcccgcctacgcccgccctcaacccaaaatttctaaaacattaaccgcgctactaaataatcctccgaactcaaattacaaaaaaacgaaccgaaccgaaaataaaatctcccgccaattaaaacctccgctataaattaaactccctacactactaa

SEQ ID NO: 18497 - DNA, 912 bp, Artificial Sequence
  chemically treated genomic DNA (Homo sapiens) CpG-island No: 18497
tttcgcgttttttcggtacggtttttatgttttggtttttcgattttttgtgtattcgtaagtattttttgggtcgtcgtcgtcgggggtagttcgagttcgaagtggagtttaatagtgaaggcgaggaggtgtttttcgatgattcgtttatttgcgtgttcgacgataatcgtttgtgtattttggcgtcgtttaaggcggtgtggtatggttagaagttggatttttttaagtaggcgtacgagggcggttcggcgtttaatttcgaggtggttttgttcgacggtttttagagttagtatattttcgattacgcgtaagggaatcgttcgttggtttttaatttcggtagttgtatttgattatcgtttatggcgcgtatgagcgttttttagcgtttggttattaagtattagcgcgacgtcgatttttttattatttatatcgaggaagcgtattttttcgacggttgggttattacggattttttttatattattttatagtatcggagtttggaggatcgggttagcgtagcgagggtattgtagtaaggtgtattcggttgcgttttggttttcgatattatggttaattttagtagttcggtttatggcgtttatttcgagcgtttttatgttatttagagtggtattattatgtattagggcggtcgtggtttcgacggttattaggtttttgagttgcgtatttggttggaacgttatgatgagtaattgtacggcgttcggtttcggagggtgtaaatatttaacggataattgattgaatttggtgggttgggttttcgagttttcgaagtttacgtgtaagcgttttaaattaagttacgtttggcgaggttttagtgatattgatgtgttgagttattattttagattgagtttg

SEQ ID NO: 18498 - DNA, 912 bp, Artificial Sequence
  chemically treated genomic DNA (Homo sapiens) CpG-island No: 18498
caaactcaatctaaaataataactcaacacatcaatatcactaaaacctcgccaaacgtaacttaatttaaaacgcttacacgtaaacttcgaaaactcgaaaacccaacccaccaaattcaatcaattatccgttaaatatttacaccctccgaaaccgaacgccgtacaattactcatcataacgttccaaccaaatacgcaactcaaaaacctaataaccgtcgaaaccacgaccgccctaatacataataataccactctaaataacataaaaacgctcgaaataaacgccataaaccgaactactaaaattaaccataatatcgaaaaccaaaacgcaaccgaatacaccttactacaataccctcgctacgctaacccgatcctccaaactccgatactataaaataatataaaaaaaatccgtaataacccaaccgtcgaaaaaatacgcttcctcgatataaataataaaaaaatcgacgtcgcgctaatacttaataaccaaacgctaaaaaacgctcatacgcgccataaacgataatcaaatacaactaccgaaattaaaaaccaacgaacgattcccttacgcgtaatcgaaaatatactaactctaaaaaccgtcgaacaaaaccacctcgaaattaaacgccgaaccgccctcgtacgcctacttaaaaaaatccaacttctaaccataccacaccgccttaaacgacgccaaaatacacaaacgattatcgtcgaacacgcaaataaacgaatcatcgaaaaacacctcctcgccttcactattaaactccacttcgaactcgaactacccccgacgacgacgacccaaaaaatacttacgaatacacaaaaaatcgaaaaaccaaaacataaaaaccgtaccgaaaaaacgcgaaa

SEQ ID NO: 18499 - DNA, 912 bp, Artificial Sequence
  chemically treated genomic DNA (Homo sapiens) CpG-island No: 18499
tagatttagtttgaaatggtggtttagtatattagtgttattggggtttcgttaagcgtgatttggtttgaggcgtttgtacgtgggtttcgaaggttcgaaggtttagtttattaagtttagttaattgttcgttggatgtttatatttttcggggtcgagcgtcgtgtagttgtttattatagcgttttaattaagtgcgtagtttagagatttggtagtcgtcggggttacggtcgttttggtatataatagtgttattttggatgatatagagacgttcgaagtaggcgttataggtcgagttgttggagttggttatggtgtcgaggattagagcgtagtcgggtgtattttgttgtagtattttcgttgcgttgattcggttttttaggtttcggtgttgtgggatgatgtagggagagttcgtggtgatttagtcgtcggaggggtgcgttttttcgatgtagatgatgaggaagtcgacgtcgcgttggtatttagtgattaggcgttggaaggcgtttatgcgcgttatgaacggtggttaggtgtagttgtcgaaattgagaattagcgggcggtttttttgcgcgtagtcgaggatgtgttggttttggaagtcgtcgggtagaattatttcggagttgggcgtcggatcgttttcgtgcgtttgtttgaagaaatttaatttttggttatgttatatcgttttgagcgacgttagggtgtataggcggttgtcgtcggatacgtagatgggcgggttatcgggaggtattttttcgtttttattgttgagttttatttcgggttcgggttgttttcggcggcggcggtttaggaaatgtttgcggatatataagaaatcgagaagttagagtatgaaggtcgtgtcgaggaagcgcggga

SEQ ID NO: 18500 - DNA, 912 bp, Artificial Sequence
  chemically treated genomic DNA (Homo sapiens) CpG-island No: 18500
tcccgcgcttcctcgacacgaccttcatactctaacttctcgatttcttatatatccgcaaacatttcctaaaccgccgccgccgaaaacaacccgaacccgaaataaaactcaacaataaaaacgaaaaaatacctcccgataacccgcccatctacgtatccgacgacaaccgcctatacaccctaacgtcgctcaaaacgatataacataaccaaaaattaaatttcttcaaacaaacgcacgaaaacgatccgacgcccaactccgaaataattctacccgacgacttccaaaaccaacacatcctcgactacgcgcaaaaaaaccgcccgctaattctcaatttcgacaactacacctaaccaccgttcataacgcgcataaacgccttccaacgcctaatcactaaataccaacgcgacgtcgacttcctcatcatctacatcgaaaaaacgcacccctccgacgactaaatcaccacgaactctccctacatcatcccacaacaccgaaacctaaaaaaccgaatcaacgcaacgaaaatactacaacaaaatacacccgactacgctctaatcctcgacaccataaccaactccaacaactcgacctataacgcctacttcgaacgtctctatatcatccaaaataacactattatataccaaaacgaccgtaaccccgacgactaccaaatctctaaactacgcacttaattaaaacgctataataaacaactacacgacgctcgaccccgaaaaatataaacatccaacgaacaattaactaaacttaataaactaaaccttcgaaccttcgaaacccacgtacaaacgcctcaaaccaaatcacgcttaacgaaaccccaataacactaatatactaaaccaccatttcaaactaaatcta

SEQ ID NO: 18501 - DNA, 744 bp, Artificial Sequence
  chemically treated genomic DNA (Homo sapiens) CpG-island No: 18501
ttagtatcgaggatagcggatatattttttttttcggggggttttcgtcgttaggaaggcggtgttgatagcgttcgtagggttgtaggtgttcgtatcgcgcgttcgttcgttcgtattttcgcggtatttttgcgcgtttatttttttttttcgtttcgcgtagggtagtcgcgcggcgttttatttttttggttggagtaatttggataatagttatagtagtcggtgattcgtaggattcggttttcgatagtggttatttcgttgggggtcgttttgatatttatagagagcgcggggcgacggtttcgagtgcggcggggcggagagcgtagcgcggggttcgggagttggtgtaggtgtcggagtcgttggtgttgattttgtagtttttgttttcgcgttcgggttttgattttatcgttcggcgtagtatcggtttcgtattatagcggcggcggcggcggcggcggcggagcggtttttattcgggtcggttttttcgttagtttggtagttttttcgcgcgttattcggagtattgttgttcgaatagcgtttttttattttcgacgtttatcgtggtcgggggcgggtgtgggcgttttatttggtcgttagtttttattattaatttttgcgcgatttttttcgaaaattagatattttaattttatttgatgaaagggatgtttggttagtggggcgcgagaggagaaggcgacggtggttaggggttta

SEQ ID NO: 18502 - DNA, 744 bp, Artificial Sequence
  chemically treated genomic DNA (Homo sapiens) CpG-island No: 18502
taaacccctaaccaccgtcgccttctcctctcgcgccccactaaccaaacatccctttcatcaaataaaattaaaatatctaattttcgaaaaaaatcgcgcaaaaattaataataaaaactaacgaccaaataaaacgcccacacccgcccccgaccacgataaacgtcgaaaataaaaaaacgctattcgaacaacaatactccgaataacgcgcgaaaaaactaccaaactaacgaaaaaaccgacccgaataaaaaccgctccgccgccgccgccgccgccgccgctataatacgaaaccgatactacgccgaacgataaaatcaaaacccgaacgcgaaaacaaaaactacaaaatcaacaccaacgactccgacacctacaccaactcccgaaccccgcgctacgctctccgccccgccgcactcgaaaccgtcgccccgcgctctctataaatatcaaaacgacccccaacgaaataaccactatcgaaaaccgaatcctacgaatcaccgactactataactattatccaaattactccaaccaaaaaaataaaacgccgcgcgactaccctacgcgaaacgaaaaaaaaaaataaacgcgcaaaaataccgcgaaaatacgaacgaacgaacgcgcgatacgaacacctacaaccctacgaacgctatcaacaccgccttcctaacgacgaaaaccccccgaaaaaaaaaatatatccgctatcctcgatactaa

SEQ ID NO: 18503 - DNA, 744 bp, Artificial Sequence
  chemically treated genomic DNA (Homo sapiens) CpG-island No: 18503
tgagtttttggttatcgtcgtttttttttttcgcgttttattgattaaatattttttttattaggtggggttggggtgtttagttttcgggaaggatcgcgtaagggttaatgatgaaagttggcgattaggtggggcgtttatattcgttttcggttacggtgggcgtcggaggtgagggggcgttattcgggtagtagtgtttcgggtggcgcgcgggagagttgttaggttgacggagaggtcggttcgagtgggggtcgtttcgtcgtcgtcgtcgtcgtcgtcgttgtgatgcggagtcggtgttgcgtcgggcggtggagttagagttcgggcgcgggagtaggagttgtaagattagtattagcggtttcggtatttgtattagttttcgggtttcgcgttgcgtttttcgtttcgtcgtattcggggtcgtcgtttcgcgttttttatggatgttaaggcggtttttaacggggtggttattatcgaggatcggattttgcggattatcggttattatggttattatttaggttattttagttagaaaagtaagacgtcgcgcggttgttttgcgcgaggcggggaagggaggtgggcgcgtaggggtgtcgcggggatgcggacgggcgggcgcgcggtacggatatttgtagttttgcggacgttgttaatatcgtttttttggcggcggggatttttcggggagaaaagtatgttcgttgttttcggtgttga

SEQ ID NO: 18504 - DNA, 744 bp, Artificial Sequence
  chemically treated genomic DNA (Homo sapiens) CpG-island No: 18504
tcaacaccgaaaacaacgaacatacttttctccccgaaaaatccccgccgccaaaaaaacgatattaacaacgtccgcaaaactacaaatatccgtaccgcgcgcccgcccgtccgcatccccgcgacacccctacgcgcccacctcccttccccgcctcgcgcaaaacaaccgcgcgacgtcttacttttctaactaaaataacctaaataataaccataataaccgataatccgcaaaatccgatcctcgataataaccaccccgttaaaaaccgccttaacatccataaaaaacgcgaaacgacgaccccgaatacgacgaaacgaaaaacgcaacgcgaaacccgaaaactaatacaaataccgaaaccgctaatactaatcttacaactcctactcccgcgcccgaactctaactccaccgcccgacgcaacaccgactccgcatcacaacgacgacgacgacgacgacgacgaaacgacccccactcgaaccgacctctccgtcaacctaacaactctcccgcgcgccacccgaaacactactacccgaataacgccccctcacctccgacgcccaccgtaaccgaaaacgaatataaacgccccacctaatcgccaactttcatcattaacccttacgcgatccttcccgaaaactaaacaccccaaccccacctaataaaaaaaatatttaatcaataaaacgcgaaaaaaaaaaacgacgataaccaaaaactca

SEQ ID NO: 18505 - DNA, 610 bp, Artificial Sequence
  chemically treated genomic DNA (Homo sapiens) CpG-island No: 18505
gttcgcgttattttcgttttttgggttatcgtcgtttagatagttttcggcggcgaatttaatacgtagttttcgtacgaattagtcgtatttgcgtatgaggaattttagtcgaggttgtttcgcgggcgagacgcggaggtagatgcggagttggggttatagggtcggatagaagaggtatttacgttagtgcgagtaggaggtcgaggttcgtagtcggtcgggcgtcggtagaaaagagaagatgtgtacgattagttcgttgggtagcgacgtagcgttcgtcgtttgttcgtatagagttattcggtttcgtcgtcggttgtcggttttcggtcgttttcgtagtattcggagtagttttcgtagtcgtcgtagttgttgtagtcgtagtcgtcgttatcgcgttattcgggcggtttcggttcgggttcgagttttcggcggtcggggttgcggtattgataagaataataatattaatgattaggaagaagggggcggaatcgtcgtgggtttcggcggaattaagtagaatataagttgtggagagggggaaaggtttttgcgggcgtggtttgtcgggagttagtttttgtttttttaa

SEQ ID NO: 18506 - DNA, 610 bp, Artificial Sequence
  chemically treated genomic DNA (Homo sapiens) CpG-island No: 18506
ttaaaaaaacaaaaactaactcccgacaaaccacgcccgcaaaaacctttccccctctccacaacttatattctacttaattccgccgaaacccacgacgattccgcccccttcttcctaatcattaatattattattcttatcaataccgcaaccccgaccgccgaaaactcgaacccgaaccgaaaccgcccgaataacgcgataacgacgactacgactacaacaactacgacgactacgaaaactactccgaatactacgaaaacgaccgaaaaccgacaaccgacgacgaaaccgaataactctatacgaacaaacgacgaacgctacgtcgctacccaacgaactaatcgtacacatcttctcttttctaccgacgcccgaccgactacgaacctcgacctcctactcgcactaacgtaaatacctcttctatccgaccctataaccccaactccgcatctacctccgcgtctcgcccgcgaaacaacctcgactaaaattcctcatacgcaaatacgactaattcgtacgaaaactacgtattaaattcgccgccgaaaactatctaaacgacgataacccaaaaaacgaaaataacgcgaac

SEQ ID NO: 18507 - DNA, 610 bp, Artificial Sequence
  chemically treated genomic DNA (Homo sapiens) CpG-island No: 18507
ttgagaagatagaggttggttttcggtaggttacgttcgtagaggtttttttttttttttataatttgtgttttatttggtttcgtcgagatttacgacggtttcgtttttttttttttagttattgatgttgttgtttttgttagtgtcgtagtttcgatcgtcgggagttcgaattcgagtcggggtcgttcgggtggcgcggtggcggcggttgcggttgtagtagttgcgacggttgcgggggttgtttcgggtattgcgggggcggtcgggagtcggtagtcggcggcggggtcggatggttttgtgcgggtaggcggcgggcgttgcgtcgttgtttagcgagttgatcgtgtatatttttttttttttgtcggcgttcgatcggttgcgggtttcggttttttgttcgtattggcgtgagtgttttttttattcggttttgtggttttagtttcgtatttgttttcgcgtttcgttcgcggagtagtttcggttggaattttttatgcgtaagtgcggttggttcgtgcgagagttgcgtgttgaattcgtcgtcgagaattatttgagcggcggtggtttaggggacggaggtggcgcggat

SEQ ID NO: 18508 - DNA, 610 bp, Artificial Sequence
  chemically treated genomic DNA (Homo sapiens) CpG-island No: 18508
atccgcgccacctccgtcccctaaaccaccgccgctcaaataattctcgacgacgaattcaacacgcaactctcgcacgaaccaaccgcacttacgcataaaaaattccaaccgaaactactccgcgaacgaaacgcgaaaacaaatacgaaactaaaaccacaaaaccgaataaaaaaaacactcacgccaatacgaacaaaaaaccgaaacccgcaaccgatcgaacgccgacaaaaaaaaaaaaatatacacgatcaactcgctaaacaacgacgcaacgcccgccgcctacccgcacaaaaccatccgaccccgccgccgactaccgactcccgaccgcccccgcaatacccgaaacaacccccgcaaccgtcgcaactactacaaccgcaaccgccgccaccgcgccacccgaacgaccccgactcgaattcgaactcccgacgatcgaaactacgacactaacaaaaacaacaacatcaataactaaaaaaaaaaaaacgaaaccgtcgtaaatctcgacgaaaccaaataaaacacaaattataaaaaaaaaaaaaaacctctacgaacgtaacctaccgaaaaccaacctctatcttctcaa

SEQ ID NO: 18509 - DNA, 507 bp, Artificial Sequence
  chemically treated genomic DNA (Homo sapiens) CpG-island No: 18509
ttttatatcgtgatgcggttaagcgcgtatcgttgtaatttatggtcgttatagaatagataaatcgttatttggttttattcggttttgttgagttaggcgattacgatgtcgtgggtcgagagtggtaacgattttttttttttaacgtatttttcgtattacgtattttatacgagatttattttttgggaatttagatttggttcggtttcggatttttacgatatattgagtttaataataggttttgtgtcgcgtcgtttcgtatagtttttagtttagcgtgttatttttatttcgaatcgttatcgtattagtagttaataggagagcgtgattttatacgtaagttcgttttttagcgttagtatggttaatcggaacgttagaattgggcgtcgatttaatgatatgcggggttaaaaatttatcggtcggaagtgttttttttataaagtaaattttttaggggtaagagtttagtttttaggtttcgttaatttt

SEQ ID NO: 18510 - DNA, 507 bp, Artificial Sequence
  chemically treated genomic DNA (Homo sapiens) CpG-island No: 18510
aaaattaacgaaacctaaaaactaaactcttacccctaaaaaatttactttataaaaaaaacacttccgaccgataaatttttaaccccgcatatcattaaatcgacgcccaattctaacgttccgattaaccatactaacgctaaaaaacgaacttacgtataaaatcacgctctcctattaactactaatacgataacgattcgaaataaaaataacacgctaaactaaaaactatacgaaacgacgcgacacaaaacctattattaaactcaatatatcgtaaaaatccgaaaccgaaccaaatctaaattcccaaaaaataaatctcgtataaaatacgtaatacgaaaaatacgttaaaaaaaaaaaatcgttaccactctcgacccacgacatcgtaatcgcctaactcaacaaaaccgaataaaaccaaataacgatttatctattctataacgaccataaattacaacgatacgcgcttaaccgcatcacgatataaaa

SEQ ID NO: 18511 - DNA, 507 bp, Artificial Sequence
  chemically treated genomic DNA (Homo sapiens) CpG-island No: 18511
gaaattggcggaatttagaggttgaatttttgtttttggagggtttgttttgtgaaaagaatattttcggtcggtgagtttttaatttcgtatgttattaggtcggcgtttaattttgacgtttcgattggttatgttgacgttggaaggcgggtttgcgtatggggttacgtttttttattggttgttggtgcggtggcggttcggagtgagggtagtacgttgagttgaaggttgtgcggagcggcgcggtatagagtttgttgttgagtttagtatgtcgtgggaattcggggtcgggttaggtttaggtttttaggggatggatttcgtgtggagtgcgtggtacggaaagtgcgttaaagggaaagggtcgttgttattttcggtttacggtatcgtggtcgtttggtttagtagggtcgagtgggattaggtgacggtttatttgttttgtgacgattataagttgtagcggtacgcgtttaatcgtattacggtgtggag

SEQ ID NO: 18512 - DNA, 507 bp, Artificial Sequence
  chemically treated genomic DNA (Homo sapiens) CpG-island No: 18512
ctccacaccgtaatacgattaaacgcgtaccgctacaacttataatcgtcacaaaacaaataaaccgtcacctaatcccactcgaccctactaaaccaaacgaccacgataccgtaaaccgaaaataacaacgaccctttccctttaacgcactttccgtaccacgcactccacacgaaatccatcccctaaaaacctaaacctaacccgaccccgaattcccacgacatactaaactcaacaacaaactctataccgcgccgctccgcacaaccttcaactcaacgtactaccctcactccgaaccgccaccgcaccaacaaccaataaaaaaacgtaaccccatacgcaaacccgccttccaacgtcaacataaccaatcgaaacgtcaaaattaaacgccgacctaataacatacgaaattaaaaactcaccgaccgaaaatattcttttcacaaaacaaaccctccaaaaacaaaaattcaacctctaaattccgccaatttc

SEQ ID NO: 18513 - DNA, 514 bp, Artificial Sequence
  chemically treated genomic DNA (Homo sapiens) CpG-island No: 18513
gtagtacgaattttttcgttaggcggagggcggcggggttcgatttttttttgttatcgtcgtcgtcgagtttttcgtttaggacgtcgttcgcggggttgttgaagagcggtaataggttttttacgggtatcgttttcgttgtttagtggttcggcgtcgcgtcgtttagtagttaaatttcgtcgtcgttgggagttcgcggttgcggggttgggttttgcgtagttaggtcgttcgattttttcggttgggttgcggattttttttgggggaataatttcgcgtcgggtttttttttcggggcggtttttcgggtatataggtacgcgcgatagatcgttggttgtagtttttgcggggagagaaatagtaaaacgtagtaattacggcgatgataaagtttttagcgggttttcgtttttcgatttttggcgagtttttaggatcgttttttttaagtagagttttgtttagttcgggtatcgttttcgtagtttattttttggatttg

SEQ ID NO: 18514 - DNA, 514 bp, Artificial Sequence
  chemically treated genomic DNA (Homo sapiens) CpG-island No: 18514
caaatccaaaaaataaactacgaaaacgatacccgaactaaacaaaactctacttaaaaaaaacgatcctaaaaactcgccaaaaatcgaaaaacgaaaacccgctaaaaactttatcatcgccgtaattactacgttttactatttctctccccgcaaaaactacaaccaacgatctatcgcgcgtacctatatacccgaaaaaccgccccgaaaaaaaaacccgacgcgaaattattcccccaaaaaaaatccgcaacccaaccgaaaaaatcgaacgacctaactacgcaaaacccaaccccgcaaccgcgaactcccaacgacgacgaaatttaactactaaacgacgcgacgccgaaccactaaacaacgaaaacgatacccgtaaaaaacctattaccgctcttcaacaaccccgcgaacgacgtcctaaacgaaaaactcgacgacgacgataacaaaaaaaaatcgaaccccgccgccctccgcctaacgaaaaaattcgtactac

SEQ ID NO: 18515 - DNA, 514 bp, Artificial Sequence
  chemically treated genomic DNA (Homo sapiens) CpG-island No: 18515
taagtttagagagtgggttgcgagggcggtgttcggattggataggattttgtttaaggggagcggttttggaggttcgttaggagtcggagggcggagattcgttggaaattttattatcgtcgtaattattacgttttattgttttttttttcgtaggggttgtagttagcggtttgtcgcgcgtgtttgtgtgttcgaggagtcgtttcggggagaagattcggcgcggagttgtttttttagggaggattcgtagtttagtcgagggggtcgggcggtttggttacgtaggatttagtttcgtagtcgcggatttttagcggcggcgaagtttggttgttgagcggcgcggcgtcggattattggatagcgggagcgatgttcgtggggggtttgttgtcgttttttagtagtttcgcgggcggcgttttgggcggggggttcggcggcggcggtggtaggaaggggtcgggtttcgtcgtttttcgtttgacggagaagttcgtgttgt

SEQ ID NO: 18516 - DNA, 514 bp, Artificial Sequence
  chemically treated genomic DNA (Homo sapiens) CpG-island No: 18516
acaacacgaacttctccgtcaaacgaaaaacgacgaaacccgaccccttcctaccaccgccgccgccgaaccccccgcccaaaacgccgcccgcgaaactactaaaaaacgacaacaaaccccccacgaacatcgctcccgctatccaataatccgacgccgcgccgctcaacaaccaaacttcgccgccgctaaaaatccgcgactacgaaactaaatcctacgtaaccaaaccgcccgaccccctcgactaaactacgaatcctccctaaaaaaacaactccgcgccgaatcttctccccgaaacgactcctcgaacacacaaacacgcgcgacaaaccgctaactacaacccctacgaaaaaaaaaacaataaaacgtaataattacgacgataataaaatttccaacgaatctccgccctccgactcctaacgaacctccaaaaccgctccccttaaacaaaatcctatccaatccgaacaccgccctcgcaacccactctctaaactta

SEQ ID NO: 18517 - DNA, 797 bp, Artificial Sequence
  chemically treated genomic DNA (Homo sapiens) CpG-island No: 18517
agcgcgcgagtatttcggggaggggtagcgtatttttgggtaggaggggcgtagcgtgggcgggagattcgttaatttcgttcgttttttattttcgcgttgagattgttgttttttttttaggttgggttgagcgcgttgttttacggtttcgtagtttcggcgcggtttaggtgggcgagcgcgtcgatttgcgggcgaatggtagcgagtagagtagtacggtatatttcgtcgcggtttcgcgagtattaattttattgtcggttttggggcggtggaaagcgagggaggcgacgcggtcggagagtgacggcgcggtcgggttaattacgcgtcgtttagggtttcgcgggggcggggtcgaggcgaggagggggatgcgcggggcggggagtttacgggaagcgtagtttcggcggggttcggtcggcggcggggaggtcgcggggtcgggaggcgcgaggtaggcgggagtcgcggtgaggaggacggtcgaattcgtggttgaggtttagcgtcgagaagcggtaggtagagttcggggtcggggagtttattttgcgttggtttcggtaggggttttcggggtggttgattttcgattggttcgggaggcgtttgggttcgcgcgggatttttttgttttttttttcgattcgtgcggggcggtcgggggcgttttcgagggggtttcgggaaaggcggggtttggtagggggttttgggcgttgggtcgtttagaagtacggttttattttagttattttttttttatttaaggtcggggtttttcg

SEQ ID NO: 18518 - DNA, 797 bp, Artificial Sequence
  chemically treated genomic DNA (Homo sapiens) CpG-island No: 18518
cgaaaaaccccgaccttaaataaaaaaaaaataactaaaataaaaccgtacttctaaacgacccaacgcccaaaaccccctaccaaaccccgcctttcccgaaaccccctcgaaaacgcccccgaccgccccgcacgaatcgaaaaaaaaaacaaaaaaatcccgcgcgaacccaaacgcctcccgaaccaatcgaaaatcaaccaccccgaaaacccctaccgaaaccaacgcaaaataaactccccgaccccgaactctacctaccgcttctcgacgctaaacctcaaccacgaattcgaccgtcctcctcaccgcgactcccgcctacctcgcgcctcccgaccccgcgacctccccgccgccgaccgaaccccgccgaaactacgcttcccgtaaactccccgccccgcgcatccccctcctcgcctcgaccccgcccccgcgaaaccctaaacgacgcgtaattaacccgaccgcgccgtcactctccgaccgcgtcgcctccctcgctttccaccgccccaaaaccgacaataaaattaatactcgcgaaaccgcgacgaaatataccgtactactctactcgctaccattcgcccgcaaatcgacgcgctcgcccacctaaaccgcgccgaaactacgaaaccgtaaaacaacgcgctcaacccaacctaaaaaaaaaacaacaatctcaacgcgaaaataaaaaacgaacgaaattaacgaatctcccgcccacgctacgcccctcctacccaaaaatacgctacccctccccgaaatactcgcgcgct

SEQ ID NO: 18519 - DNA, 797 bp, Artificial Sequence
  chemically treated genomic DNA (Homo sapiens) CpG-island No: 18519
cggggaatttcggttttggataaaaagagggtaattggagtaaagtcgtgtttttgaacgatttagcgtttaggattttttgttagatttcgtttttttcgggattttttcgggagcgttttcgatcgtttcgtacgggtcggaggaggaggtagagaggtttcgcgcggatttaggcgtttttcgggttagtcgaggattaattatttcggggatttttgtcgaggttagcgtaggataaatttttcgatttcgaattttgtttgtcgtttttcggcgttgggttttagttacgggttcgatcgttttttttatcgcggttttcgtttatttcgcgtttttcggtttcgcgattttttcgtcgtcggtcgggtttcgtcgaggttgcgtttttcgtaaatttttcgtttcgcgtattttttttttcgtttcggtttcgttttcgcgggattttgggcggcgcgtgattggttcggtcgcgtcgttatttttcggtcgcgtcgtttttttcgttttttatcgttttaagatcggtagtgagattagtgttcgcggggtcgcggcggagtgtatcgtgttgttttattcgttgttattcgttcgtaggtcggcgcgttcgtttatttgagtcgcgtcggggttgcgggatcgtgggatagcgcgtttagtttagtttaggaaagaggtagtagttttagcgcggagatggggagcgggcgaagttgacgagtttttcgtttacgttgcgttttttttgtttagaggtgcgttgttttttttcgaggtgttcgcgcgtt

SEQ ID NO: 18520 - DNA, 797 bp, Artificial Sequence
  chemically treated genomic DNA (Homo sapiens) CpG-island No: 18520
aacgcgcgaacacctcgaaaaaaaacaacgcacctctaaacaaaaaaaacgcaacgtaaacgaaaaactcgtcaacttcgcccgctccccatctccgcgctaaaactactacctctttcctaaactaaactaaacgcgctatcccacgatcccgcaaccccgacgcgactcaaataaacgaacgcgccgacctacgaacgaataacaacgaataaaacaacacgatacactccgccgcgaccccgcgaacactaatctcactaccgatcttaaaacgataaaaaacgaaaaaaacgacgcgaccgaaaaataacgacgcgaccgaaccaatcacgcgccgcccaaaatcccgcgaaaacgaaaccgaaacgaaaaaaaaaatacgcgaaacgaaaaatttacgaaaaacgcaacctcgacgaaacccgaccgacgacgaaaaaatcgcgaaaccgaaaaacgcgaaataaacgaaaaccgcgataaaaaaaacgatcgaacccgtaactaaaacccaacgccgaaaaacgacaaacaaaattcgaaatcgaaaaatttatcctacgctaacctcgacaaaaatccccgaaataattaatcctcgactaacccgaaaaacgcctaaatccgcgcgaaacctctctacctcctcctccgacccgtacgaaacgatcgaaaacgctcccgaaaaaatcccgaaaaaaacgaaatctaacaaaaaatcctaaacgctaaatcgttcaaaaacacgactttactccaattaccctctttttatccaaaaccgaaattccccg

SEQ ID NO: 18521 - DNA, 547 bp, Artificial Sequence
  chemically treated genomic DNA (Homo sapiens) CpG-island No: 18521
cgagtcgggtcgtattacgcgttttttgcgtatcgtgggtttggttcgtagaattcgcggcgttagtattagcgttagtagtagttttagggttaattttaggcggcggtcgcggttatcgcgcgttatcgtttcgaggagagggcggtcgagagggagacgttgagcgagcgataatagcggtagttcgggaatggggattcggagcgcggcggtagcgatagggttggggtcggcgcggaggaggggattggttagttttttcgttagtgttcgtttcgagtcggagtagaggggcgcgtttgggtttcgggttgggaagttgcgggcggtttcgttcgcgcgtttattggtcgttgagttgtcgggggaagtcggggtcgcggagttacgtcgttagttggggtggtgggcgcggggttcgtgtttcgtttcggttttttttcgcgattttgttgttaggggcgggttcgggcgaattgggttagggattggagggttcggaggaggattgggaagttttttgttaagtaatagatgtgtagga

SEQ ID NO: 18522 - DNA, 547 bp, Artificial Sequence
  chemically treated genomic DNA (Homo sapiens) CpG-island No: 18522
tcctacacatctattacttaacaaaaaacttcccaatcctcctccgaaccctccaatccctaacccaattcgcccgaacccgcccctaacaacaaaatcgcgaaaaaaaaccgaaacgaaacacgaaccccgcgcccaccaccccaactaacgacgtaactccgcgaccccgacttcccccgacaactcaacgaccaataaacgcgcgaacgaaaccgcccgcaacttcccaacccgaaacccaaacgcgcccctctactccgactcgaaacgaacactaacgaaaaaactaaccaatcccctcctccgcgccgaccccaaccctatcgctaccgccgcgctccgaatccccattcccgaactaccgctattatcgctcgctcaacgtctccctctcgaccgccctctcctcgaaacgataacgcgcgataaccgcgaccgccgcctaaaattaaccctaaaactactactaacgctaatactaacgccgcgaattctacgaaccaaacccacgatacgcaaaaaacgcgtaatacgacccgactcg

SEQ ID NO: 18523 - DNA, 547 bp, Artificial Sequence
  chemically treated genomic DNA (Homo sapiens) CpG-island No: 18523
ttttgtatatttgttgtttgataaagaattttttaattttttttcgagttttttagtttttagtttagttcgttcgggttcgtttttagtaataagatcgcggggaggggtcgaggcgaaatacgagtttcgcgtttattattttagttggcgacgtggtttcgcggtttcggtttttttcggtagtttagcgattaatgggcgcgcgagcggggtcgttcgtagttttttagttcgaggtttaggcgcgtttttttgtttcggttcggggcgggtattggcggagggattggttagttttttttttcgcgtcggttttaattttgtcgttgtcgtcgcgtttcgagtttttattttcgagttgtcgttgttgtcgttcgtttagcgtttttttttcggtcgtttttttttcgggacgatggcgcgcggtggtcgcggtcgtcgtttggggttagttttggggttgttgttggcgttggtgttggcgtcgcgggttttgcgggttaagtttacggtgcgtaaagagcgcgtggtgcggttcgattcg

SEQ ID NO: 18524 - DNA, 547 bp, Artificial Sequence
  chemically treated genomic DNA (Homo sapiens) CpG-island No: 18524
cgaatcgaaccgcaccacgcgctctttacgcaccgtaaacttaacccgcaaaacccgcgacgccaacaccaacgccaacaacaaccccaaaactaaccccaaacgacgaccgcgaccaccgcgcgccatcgtcccgaaaaaaaaacgaccgaaaaaaaaacgctaaacgaacgacaacaacgacaactcgaaaataaaaactcgaaacgcgacgacaacgacaaaattaaaaccgacgcgaaaaaaaaaactaaccaatccctccgccaatacccgccccgaaccgaaacaaaaaaacgcgcctaaacctcgaactaaaaaactacgaacgaccccgctcgcgcgcccattaatcgctaaactaccgaaaaaaaccgaaaccgcgaaaccacgtcgccaactaaaataataaacgcgaaactcgtatttcgcctcgacccctccccgcgatcttattactaaaaacgaacccgaacgaactaaactaaaaactaaaaaactcgaaaaaaaattaaaaaattctttatcaaacaacaaatatacaaaa

SEQ ID NO: 18525 - DNA, 792 bp, Artificial Sequence
  chemically treated genomic DNA (Homo sapiens) CpG-island No: 18525
tcgaggcgttttcggttcgtttttttttcggttttcggattcgagtcggttttcgggaaagagtttgttatcgcgttttcgtagttatttttttcgcgtgttcggttttttttagtggcgggggtacgtgggcgcgcggggtgcgtggtaagtcgtttttttttttacgttcgttcggtcgtttttcgcgcgcgcgtttcgtatatagttttcgtgtagtgggtagagttcggtttcgcgcgcgtttcgtttcgtttttggttagtcgcgttcgttttcgcgtttttgttttttttttttttttttttttcgttttttaggcgcgtattttttttttcgcgtttttttcgcgttttatatttatcgttcggcggagggggtttagttcgtagtcgtcgtcgttatcgtcgcgtttcggtttcggtgtaggtagcggtcgtcgtcgtcgagatagttgcgcgggcgagtatttttacgtagtaagttcgtttttttttcgtttgtgcgcgcgtgtgtgtttttcgttcgtcggcgttttgggtttcgggggagcggttgtttttttgtttcgtcgtcgtcgtcgttcggggttggtttttgcggtttcggttgtttggttttttagggttgggtattgcggtttcggcggtttcgttgaggtcgggggttaggggtcgtttcgggttgcggggtgcgggacgagggattgcgagtgcgaggttttttttggtgcgtgtttcggttttttttgggtttttggttcgatggggattaagaggtagtggggtggag

SEQ ID NO: 18526 - DNA, 792 bp, Artificial Sequence
  chemically treated genomic DNA (Homo sapiens) CpG-island No: 18526
ctccaccccactacctcttaatccccatcgaaccaaaaacccaaaaaaaaccgaaacacgcaccaaaaaaaacctcgcactcgcaatccctcgtcccgcaccccgcaacccgaaacgacccctaacccccgacctcaacgaaaccgccgaaaccgcaatacccaaccctaaaaaaccaaacaaccgaaaccgcaaaaaccaaccccgaacgacgacgacgacgaaacaaaaaaacaaccgctcccccgaaacccaaaacgccgacgaacgaaaaacacacacgcgcgcacaaacgaaaaaaaaacgaacttactacgtaaaaatactcgcccgcgcaactatctcgacgacgacgaccgctacctacaccgaaaccgaaacgcgacgataacgacgacgactacgaactaaaccccctccgccgaacgataaatataaaacgcgaaaaaaacgcgaaaaaaaaaatacgcgcctaaaaaacgaaaaaaaaaaaaaaaaaaaaaacaaaaacgcgaaaacgaacgcgactaaccaaaaacgaaacgaaacgcgcgcgaaaccgaactctacccactacacgaaaactatatacgaaacgcgcgcgcgaaaaacgaccgaacgaacgtaaaaaaaaaaacgacttaccacgcaccccgcgcgcccacgtacccccgccactaaaaaaaaccgaacacgcgaaaaaaataactacgaaaacgcgataacaaactctttcccgaaaaccgactcgaatccgaaaaccgaaaaaaaaacgaaccgaaaacgcctcga

SEQ ID NO: 18527 - DNA, 792 bp, Artificial Sequence
  chemically treated genomic DNA (Homo sapiens) CpG-island No: 18527
ttttattttattgttttttagtttttatcgagttaaaaatttagggaaggtcgaggtacgtattaggggggatttcgtattcgtagtttttcgtttcgtatttcgtagttcgggacggtttttggttttcggttttagcgaggtcgtcgaagtcgtagtatttagttttggaaggttaggtagtcgggatcgtagggattagtttcgagcggcggcggcggcggggtagaagggtagtcgttttttcgggatttaggacgtcggcgggcgggaggtatatacgcgcgtataagcggaaagaaagcgggtttattgcgtggggatgttcgttcgcgtagttgtttcggcggcggcggtcgttgtttgtatcgaggtcgaggcgcggcggtggcggcggcggttgcggattgagtttttttcgtcgggcggtggatgtagggcgcgggaggggcgcgaggggaggggtgcgcgtttgggaggcggggagggaaagaggggaggaagtaggagcgcgggggcgggcgcggttagttaggggcggggcggggcgcgcgcggggtcgggttttgtttattgtacggaggttgtgtgcggggcgcgcgcgcgggagacggtcggacgggcgtggggagaggggcggtttgttacgtatttcgcgcgtttacgtgttttcgttattggagagggtcgggtacgcggagagggtggttgcggggacgcggtggtaggttttttttcgaggatcggttcggattcgaagatcgggaggagggcgggtcgggggcgtttcgg

SEQ ID NO: 18528 - DNA, 792 bp, Artificial Sequence
  chemically treated genomic DNA (Homo sapiens) CpG-island No: 18528
ccgaaacgcccccgacccgccctcctcccgatcttcgaatccgaaccgatcctcgaaaaaaaacctaccaccgcgtccccgcaaccaccctctccgcgtacccgaccctctccaataacgaaaacacgtaaacgcgcgaaatacgtaacaaaccgcccctctccccacgcccgtccgaccgtctcccgcgcgcgcgccccgcacacaacctccgtacaataaacaaaacccgaccccgcgcgcgccccgccccgcccctaactaaccgcgcccgcccccgcgctcctacttcctcccctctttccctccccgcctcccaaacgcgcacccctcccctcgcgcccctcccgcgccctacatccaccgcccgacgaaaaaaactcaatccgcaaccgccgccgccaccgccgcgcctcgacctcgatacaaacaacgaccgccgccgccgaaacaactacgcgaacgaacatccccacgcaataaacccgctttctttccgcttatacgcgcgtatatacctcccgcccgccgacgtcctaaatcccgaaaaaacgactacccttctaccccgccgccgccgccgctcgaaactaatccctacgatcccgactacctaaccttccaaaactaaatactacgacttcgacgacctcgctaaaaccgaaaaccaaaaaccgtcccgaactacgaaatacgaaacgaaaaactacgaatacgaaatcccccctaatacgtacctcgaccttccctaaatttttaactcgataaaaactaaaaaacaataaaataaaa

SEQ ID NO: 18529 - DNA, 777 bp, Artificial Sequence
  chemically treated genomic DNA (Homo sapiens) CpG-island No: 18529
taggtcggcgtttatttcgtaggttgcgaggcgaggtttttagtattcgtatattttcgtttcggattggttagtttcgtagttatttagtatcgatacgttagggtagtcgtttttttttttttttcgttttttttttttcgcgtttggtaagaaaagcgggtaacgtggagcgggaataaaggatttcgcggtttacggcgatcggggatttcgtgttattttattttaggttcggggttggttgttcgtttatacgagtcgagtttcgagagtttttttagaagagaattttaaattttaggtaaattcgaggcgaggcgttcgtttttgatagtaagaacggggagtttcgcgtttttttttcggcgggttattttcgttcgcggcgttttaatttaggttttttaaaatttttcgaataaaaaatttttgttttttttagtttgttttattcgcgttagtgtagtaaaggggttttagttttcgcgtttttcgaggcgatcggcgttcgttttcggtcgttaacgtaatttggtaattatggtagcgttggagcgcgggtttagcgcggcgcgggttttacgttttagagggcggcggcggtcgtttggggttgttttttttgatgaggatatcgttttcgcgttttttattttttttttattcgtcggcgttatttttttttttcggattttagtcgcgtcgttttttttatttgtcgttcgtagaattagcgcgtattatttggtttatttttgaagagatggaaatatt

SEQ ID NO: 18530 - DNA, 777 bp, Artificial Sequence
  chemically treated genomic DNA (Homo sapiens) CpG-island No: 18530
aatatttccatctcttcaaaaataaaccaaataatacgcgctaattctacgaacgacaaataaaaaaaacgacgcgactaaaatccgaaaaaaaaaaataacgccgacgaataaaaaaaaaataaaaaacgcgaaaacgatatcctcatcaaaaaaaacaaccccaaacgaccgccgccgccctctaaaacgtaaaacccgcgccgcgctaaacccgcgctccaacgctaccataattaccaaattacgttaacgaccgaaaacgaacgccgatcgcctcgaaaaacgcgaaaactaaaacccctttactacactaacgcgaataaaacaaactaaaaaaaacaaaaattttttattcgaaaaattttaaaaaacctaaattaaaacgccgcgaacgaaaataacccgccgaaaaaaaaacgcgaaactccccgttcttactatcaaaaacgaacgcctcgcctcgaatttacctaaaatttaaaattctcttctaaaaaaactctcgaaactcgactcgtataaacgaacaaccaaccccgaacctaaaataaaataacacgaaatccccgatcgccgtaaaccgcgaaatcctttattcccgctccacgttacccgcttttcttaccaaacgcgaaaaaaaaaaaacgaaaaaaaaaaaaaaacgactaccctaacgtatcgatactaaataactacgaaactaaccaatccgaaacgaaaatatacgaatactaaaaacctcgcctcgcaacctacgaaataaacgccgaccta

SEQ ID NO: 18531 - DNA, 777 bp, Artificial Sequence
  chemically treated genomic DNA (Homo sapiens) CpG-island No: 18531
aatgtttttatttttttagagatgaattaggtaatacgcgttggttttacgaacgatagatgagggagacggcgcggttagaattcgagaagaagggatggcgtcggcggatgggaagagggtgggaggcgcggaagcggtgtttttattaggggaggtagttttaagcggtcgtcgtcgttttttgggacgtgaagttcgcgtcgcgttgggttcgcgttttagcgttgttatggttgttaagttgcgttggcggtcgagagcgggcgtcggtcgtttcggagagcgcggaggttggagtttttttgttatattggcgcgggtgaggtaggttgggaggaataagagttttttgttcgaagggttttggggggtttgggttagggcgtcgcgggcggggatgattcgtcggaaggagggcgcgggatttttcgtttttgttgttaggaacggacgtttcgtttcgggtttgtttggggtttgggatttttttttggaagagttttcgagattcggttcgtgtgggcgggtagttagtttcgggtttggagtagggtggtacggagttttcgatcgtcgtgggtcgcggggttttttgttttcgttttacgttgttcgttttttttgttaagcgcggggagaagggggcgggaggagggagggagcggttgttttgacgtgtcggtattgagtgattgcggggttggttaattcggggcgggggtgtgcgggtgttgggggtttcgtttcgtagtttgcggagtgggcgtcggtttg

SEQ ID NO: 18532 - DNA, 777 bp, Artificial Sequence
  chemically treated genomic DNA (Homo sapiens) CpG-island No: 18532
caaaccgacgcccactccgcaaactacgaaacgaaacccccaacacccgcacacccccgccccgaattaaccaaccccgcaatcactcaataccgacacgtcaaaacaaccgctccctccctcctcccgcccccttctccccgcgcttaacaaaaaaaacgaacaacgtaaaacgaaaacaaaaaaccccgcgacccacgacgatcgaaaactccgtaccaccctactccaaacccgaaactaactacccgcccacacgaaccgaatctcgaaaactcttccaaaaaaaaatcccaaaccccaaacaaacccgaaacgaaacgtccgttcctaacaacaaaaacgaaaaatcccgcgccctccttccgacgaatcatccccgcccgcgacgccctaacccaaaccccccaaaacccttcgaacaaaaaactcttattcctcccaacctacctcacccgcgccaatataacaaaaaaactccaacctccgcgctctccgaaacgaccgacgcccgctctcgaccgccaacgcaacttaacaaccataacaacgctaaaacgcgaacccaacgcgacgcgaacttcacgtcccaaaaaacgacgacgaccgcttaaaactacctcccctaataaaaacaccgcttccgcgcctcccaccctcttcccatccgccgacgccatcccttcttctcgaattctaaccgcgccgtctccctcatctatcgttcgtaaaaccaacgcgtattacctaattcatctctaaaaaaataaaaacatt

SEQ ID NO: 18533 - DNA, 658 bp, Artificial Sequence
  chemically treated genomic DNA (Homo sapiens) CpG-island No: 18533
cgggaatcggtttaacggaaagcgttagaaggcggcggaagacgggagcggttaagtagaaggacgaggggttagttcgtggagattgaaaggaagggggagcgttatcgagaattcgcgggaattcgttcgttcgtcgatatagtcgcgtcgaagtagtaggcggagaaattgcgtttagtagttttgagcgatcgatttttacgcgcgatcgggagatattgttttcgtcgtcgtcgatcgttcgcgtcgtattttttcgtacgttattacgtgcgttgtcgtcgtcgacgttttttagttcgttttcgtttcgaatttatttgtaaattataggcgagttttataaagattttattttaagtttcgttttattcgcggtttcgtttatatttcgtttcgtttttttttttggtttattggggttttttttttttcggtgtaattaggttagcgtaaggtgattttgaggagataggcggcgttcggggggcgttttcgttttttttatcgcgtttttgttttttttttcgttttttgtttcgtatttttattttcgtcgttttgtgcgttgtttgtttcggaattggtttttttaagtcgtttttatttgttttgattttttttcgaggtataatagtttgagagattagacgtg

SEQ ID NO: 18534 - DNA, 658 bp, Artificial Sequence
  chemically treated genomic DNA (Homo sapiens) CpG-island No: 18534
cacgtctaatctctcaaactattatacctcgaaaaaaaatcaaaacaaataaaaacgacttaaaaaaaccaattccgaaacaaacaacgcacaaaacgacgaaaataaaaatacgaaacaaaaaacgaaaaaaaaaacaaaaacgcgataaaaaaaacgaaaacgccccccgaacgccgcctatctcctcaaaatcaccttacgctaacctaattacaccgaaaaaaaaaaaaccccaataaaccaaaaaaaaaaacgaaacgaaatataaacgaaaccgcgaataaaacgaaacttaaaataaaatctttataaaactcgcctataatttacaaataaattcgaaacgaaaacgaactaaaaaacgtcgacgacgacaacgcacgtaataacgtacgaaaaaatacgacgcgaacgatcgacgacgacgaaaacaatatctcccgatcgcgcgtaaaaatcgatcgctcaaaactactaaacgcaatttctccgcctactacttcgacgcgactatatcgacgaacgaacgaattcccgcgaattctcgataacgctcccccttcctttcaatctccacgaactaacccctcgtccttctacttaaccgctcccgtcttccgccgccttctaacgctttccgttaaaccgattcccg

SEQ ID NO: 18535 - DNA, 658 bp, Artificial Sequence
  chemically treated genomic DNA (Homo sapiens) CpG-island No: 18535
tacgtttgattttttaggttattgtgtttcgaggggaagttagaataggtgagggcggtttgagggaattagtttcgggataggtaacgtatagggcggcgaaagtgagggtgcggggtaaggaacggagggagggataaaggcgcgataagaggaacgagggcgtttttcgagcgtcgtttatttttttaggattattttgcgttgatttagttatatcgagaaggaaggaattttagtagattagggaggaaggcggggcgggatgtgggcggggtcgcgggtggggcggggtttagagtgggatttttatggagttcgtttgtgatttgtagatggattcgagacggaagcgggttgggaggcgtcggcggcggtagcgtacgtggtgacgtgcgagggggtgcggcgcgagcggtcggcggcggcggaggtagtgtttttcggtcgcgcgtggaggtcggtcgtttagagttgttgggcgtagttttttcgtttgttgtttcggcgcggttgtatcggcgagcgagcgagttttcgcgagttttcggtggcgtttttttttttttttagtttttacggattggtttttcgtttttttatttgatcgttttcgtttttcgtcgttttttggcgtttttcgttgggtcgattttcg

SEQ ID NO: 18536 - DNA, 658 bp, Artificial Sequence
  chemically treated genomic DNA (Homo sapiens) CpG-island No: 18536
cgaaaatcgacccaacgaaaaacgccaaaaaacgacgaaaaacgaaaacgatcaaataaaaaaacgaaaaaccaatccgtaaaaactaaaaaaaaaaaaaaacgccaccgaaaactcgcgaaaactcgctcgctcgccgatacaaccgcgccgaaacaacaaacgaaaaaactacgcccaacaactctaaacgaccgacctccacgcgcgaccgaaaaacactacctccgccgccgccgaccgctcgcgccgcaccccctcgcacgtcaccacgtacgctaccgccgccgacgcctcccaacccgcttccgtctcgaatccatctacaaatcacaaacgaactccataaaaatcccactctaaaccccgccccacccgcgaccccgcccacatcccgccccgccttcctccctaatctactaaaattccttccttctcgatataactaaatcaacgcaaaataatcctaaaaaaataaacgacgctcgaaaaacgccctcgttcctcttatcgcgcctttatccctccctccgttccttaccccgcaccctcactttcgccgccctatacgttacctatcccgaaactaattccctcaaaccgccctcacctattctaacttcccctcgaaacacaataacctaaaaaatcaaacgta

SEQ ID NO: 18537 - DNA, 870 bp, Artificial Sequence
  chemically treated genomic DNA (Homo sapiens) CpG-island No: 18537
gcgcgaattattcggtttcgttcgttttttatgcgcgcgcgcgtttttgggttatatttaaaaggcgtgttttttatcgttagcgtgcgttgtttatttgtattacgttgggttttttgtcggtcgcgggcgcgtcgttgaatttgttggagggttgcggggtcggcgggtgcgggtcgttgtcgtagaggtatgagaagtagggttcgtcgtcgtagtttaggtttatgaggaatttgagtagcgataggtattttatggcgaatatgatggtggcggggaaggcggtggggtgcgtggcgatataggcgtcgatgttcgcgtcgtggtttagtagtagttgtattgtgcgtaggtagtcgtggcggatggttacgagtaaggggttgatgacgtcgcggttggggtcggcgtcgtgttgtagtagtagttcggtggcgtatacgttgttgttgattatcgcgaagtatagcgcggagtgcgtcggttttcgtagaggcgcgcgcgttcgggggttagcggcgtgtttacgtcgaagcgcgcgtttagtagcgtttttagtatttcgtcgtggttgcgttcggtcgttaggtgtagcggattgacgtcgttacggcgtatgcgcgtgcggttggttatcggtagtagtatttgtacgattttgtcgggtcgaggggcgggcgcgggtgaggggagggtcggggtgtggacgggtagggtcggtttcgttagtaggagagttcgggcgttaggttcggttggtcgttttgatcgcgggttgcgacgcggattttatcggtagggggcgtcgcgggttaattatttttattttattgggtagggtgggtcggttgtcgttttcgttttata

SEQ ID NO: 18538 - DNA, 870 bp, Artificial Sequence
  chemically treated genomic DNA (Homo sapiens) CpG-island No: 18538
tataaaacgaaaacgacaaccgacccaccctacccaataaaataaaaataattaacccgcgacgccccctaccgataaaatccgcgtcgcaacccgcgatcaaaacgaccaaccgaacctaacgcccgaactctcctactaacgaaaccgaccctacccgtccacaccccgaccctcccctcacccgcgcccgcccctcgacccgacaaaatcgtacaaatactactaccgataaccaaccgcacgcgcatacgccgtaacgacgtcaatccgctacacctaacgaccgaacgcaaccacgacgaaatactaaaaacgctactaaacgcgcgcttcgacgtaaacacgccgctaacccccgaacgcgcgcgcctctacgaaaaccgacgcactccgcgctatacttcgcgataatcaacaacaacgtatacgccaccgaactactactacaacacgacgccgaccccaaccgcgacgtcatcaaccccttactcgtaaccatccgccacgactacctacgcacaatacaactactactaaaccacgacgcgaacatcgacgcctatatcgccacgcaccccaccgccttccccgccaccatcatattcgccataaaatacctatcgctactcaaattcctcataaacctaaactacgacgacgaaccctacttctcatacctctacgacaacgacccgcacccgccgaccccgcaaccctccaacaaattcaacgacgcgcccgcgaccgacaaaaaacccaacgtaatacaaataaacaacgcacgctaacgataaaaaacacgccttttaaatataacccaaaaacgcgcgcgcgcataaaaaacgaacgaaaccgaataattcgcgc

SEQ ID NO: 18539 - DNA, 870 bp, Artificial Sequence
  chemically treated genomic DNA (Homo sapiens) CpG-island No: 18539
tgtaaagcggagacggtagtcgatttattttgtttagtggggtgagaatggttgattcgcggcgttttttgtcggtgggattcgcgtcgtagttcgcggttagggcgattagtcgagtttggcgttcgagtttttttgttggcggggtcggttttattcgtttatatttcgattttttttttattcgcgttcgtttttcgattcggtaggatcgtgtagatgttgttgtcggtgattagtcgtacgcgtatacgtcgtagcggcgttagttcgttgtatttggcggtcgagcgtaattacgacgaggtgttggaggcgttgttgagcgcgcgtttcgacgtgaatacgtcgttggttttcgagcgcgcgcgtttttacgaagatcggcgtatttcgcgttgtatttcgcggtggttaataataacgtgtacgttatcgagttgttgttgtaatacggcgtcgattttaatcgcgacgttattagttttttgttcgtggttattcgttacggttgtttgcgtataatgtagttgttgttggattacggcgcgaatatcgacgtttatatcgttacgtattttatcgtttttttcgttattattatgttcgttatgaagtgtttgtcgttgtttaagttttttatggatttgggttgcgacggcgagttttgttttttatgtttttacggtaacggttcgtattcgtcggtttcgtagttttttagtaggtttaacgacgcgttcgcggtcgataaggagtttagcgtggtgtaggtgggtagcgtacgttggcggtggggagtacgttttttgggtgtggtttagggacgcgcgcgcgtatgggaggcgggcggggtcgggtggttcgcgt

SEQ ID NO: 18540 - DNA, 870 bp, Artificial Sequence
  chemically treated genomic DNA (Homo sapiens) CpG-island No: 18540
acgcgaaccacccgaccccgcccgcctcccatacgcgcgcgcgtccctaaaccacacccaaaaaacgtactccccaccgccaacgtacgctacccacctacaccacgctaaactccttatcgaccgcgaacgcgtcgttaaacctactaaaaaactacgaaaccgacgaatacgaaccgttaccgtaaaaacataaaaaacaaaactcgccgtcgcaacccaaatccataaaaaacttaaacaacgacaaacacttcataacgaacataataataacgaaaaaaacgataaaatacgtaacgatataaacgtcgatattcgcgccgtaatccaacaacaactacattatacgcaaacaaccgtaacgaataaccacgaacaaaaaactaataacgtcgcgattaaaatcgacgccgtattacaacaacaactcgataacgtacacgttattattaaccaccgcgaaatacaacgcgaaatacgccgatcttcgtaaaaacgcgcgcgctcgaaaaccaacgacgtattcacgtcgaaacgcgcgctcaacaacgcctccaacacctcgtcgtaattacgctcgaccgccaaatacaacgaactaacgccgctacgacgtatacgcgtacgactaatcaccgacaacaacatctacacgatcctaccgaatcgaaaaacgaacgcgaataaaaaaaaaatcgaaatataaacgaataaaaccgaccccgccaacaaaaaaactcgaacgccaaactcgactaatcgccctaaccgcgaactacgacgcgaatcccaccgacaaaaaacgccgcgaatcaaccattctcaccccactaaacaaaataaatcgactaccgtctccgctttaca

SEQ ID NO: 18541 - DNA, 628 bp, Artificial Sequence
  chemically treated genomic DNA (Homo sapiens) CpG-island No: 18541
gtttcgcgtttcggtttttgattgttcgtttgagacgttaatcgtagggcgtgtgttttgttgggatatagtggaggtttaatttttggtttgcggagcggtcgggtgtatttttcgtcgtttttacgttttcgaggttttcgttatcgaattagcggcggagttcgttcgcgtttttcgcggtattttcgtatcggatcgtttttcgttggggcgggatttggtttggcggttttggttattatggttagtgatcgtgggggatcgcgaagggggagcgggtagggggcgcggtgggcggggtcgttgtcggagcgggtgtattcgcgggacgggggtcggacgcgaggtttagtttttagttcgttttcgtcgtttttcgattttttgaaatacggagttcggacggatattgagggttaagtcgcgtttttttgtatttcgtggatgtgtagttgaggaggtttagttcggtttcgagttttcgtttttagcgtgttcgttttaggtggttcggggcgtcgtttcgacggcgttgggtgggcgttttcgacggaagtagggatagggaggttgtagtattacgggtcgttttttttttgttaagtagttttttagttagtagttt

SEQ ID NO: 18542 - DNA, 628 bp, Artificial Sequence
  chemically treated genomic DNA (Homo sapiens) CpG-island No: 18542
aaactactaactaaaaaactacttaacaaaaaaaaaacgacccgtaatactacaacctccctatccctacttccgtcgaaaacgcccacccaacgccgtcgaaacgacgccccgaaccacctaaaacgaacacgctaaaaacgaaaactcgaaaccgaactaaacctcctcaactacacatccacgaaatacaaaaaaacgcgacttaaccctcaatatccgtccgaactccgtatttcaaaaaatcgaaaaacgacgaaaacgaactaaaaactaaacctcgcgtccgacccccgtcccgcgaatacacccgctccgacaacgaccccgcccaccgcgccccctacccgctcccccttcgcgatcccccacgatcactaaccataataaccaaaaccgccaaaccaaatcccgccccaacgaaaaacgatccgatacgaaaataccgcgaaaaacgcgaacgaactccgccgctaattcgataacgaaaacctcgaaaacgtaaaaacgacgaaaaatacacccgaccgctccgcaaaccaaaaattaaacctccactatatcccaacaaaacacacgccctacgattaacgtctcaaacgaacaatcaaaaaccgaaacgcgaaac

SEQ ID NO: 18543 - DNA, 628 bp, Artificial Sequence
  chemically treated genomic DNA (Homo sapiens) CpG-island No: 18543
ggattgttgattggggggttatttaataaagaggaggcgattcgtagtgttgtagtttttttgtttttgttttcgtcgagggcgtttatttagcgtcgtcgaggcggcgtttcgggttatttggggcggatacgttgggggcgggggttcggggtcgagttggatttttttagttgtatatttacggggtataggggggcgcgatttggtttttagtattcgttcggatttcgtattttagggggtcggaaagcggcgggggcgagttgggggttgagtttcgcgttcgattttcgtttcgcgggtgtattcgtttcggtagcgatttcgtttatcgcgttttttgttcgtttttttttcgcgattttttacgattattgattatagtgattagagtcgttaggttaggtttcgttttagcgaggagcgattcggtgcgggaatgtcgcgggaggcgcgggcgggtttcgtcgttggttcggtggcggggatttcgagggcgtgggggcggcggagaatatattcgatcgtttcgtaaattaaaggttagatttttattgtgttttagtaagatatacgttttgcgattgacgttttaggcgggtaattagaagtcgggacgcgggat

SEQ ID NO: 18544 - DNA, 628 bp, Artificial Sequence
  chemically treated genomic DNA (Homo sapiens) CpG-island No: 18544
atcccgcgtcccgacttctaattacccgcctaaaacgtcaatcgcaaaacgtatatcttactaaaacacaataaaaatctaacctttaatttacgaaacgatcgaatatattctccgccgcccccacgccctcgaaatccccgccaccgaaccaacgacgaaacccgcccgcgcctcccgcgacattcccgcaccgaatcgctcctcgctaaaacgaaacctaacctaacgactctaatcactataatcaataatcgtaaaaaatcgcgaaaaaaaaacgaacaaaaaacgcgataaacgaaatcgctaccgaaacgaatacacccgcgaaacgaaaatcgaacgcgaaactcaacccccaactcgcccccgccgctttccgaccccctaaaatacgaaatccgaacgaatactaaaaaccaaatcgcgcccccctataccccgtaaatatacaactaaaaaaatccaactcgaccccgaacccccgcccccaacgtatccgccccaaataacccgaaacgccgcctcgacgacgctaaataaacgccctcgacgaaaacaaaaacaaaaaaactacaacactacgaatcgcctcctctttattaaataaccccccaatcaacaatcc

SEQ ID NO: 18545 - DNA, 619 bp, Artificial Sequence
  chemically treated genomic DNA (Homo sapiens) CpG-island No: 18545
ggggtttaataaggagagggcgaggggtgttacgcgaatcgggcgaggatacggagagcgttaggtagagtagaagggtttttgttttttcgtgacgtcggtttcgcgcggttttttcgttttgttttaggtacgaacgcgcgtacgaaatcgagaaatcgagaagtcgagaagttaaggtcgttaggttttgatgatcggataaggagtttaaggcgcggggatcgtggtacgtagttcggttggacggtttgggtcggcggtcgttttttttggattcgggaatttatcggtttagagcgattcgcgataggaattcgggtttttggttttagtttttttttagagtcggttttaatttcgttcgttttggtatttatcgtgtggagacgttatcgtagtttcgttagtcgcgagtgaagaattttagaaatcgtcgttgtattttagttgtagtagtaattgtagtttcggggcgggatttttacgtacgtattcgtgcgcgttggggaggaagtttcgtttttatggtaaatttagttatttgattggttgtttcgcggatcgtagtagtgtcggcgggagagttggtttggggcgttggtatttttttttatag

SEQ ID NO: 18546 - DNA, 619 bp, Artificial Sequence
  chemically treated genomic DNA (Homo sapiens) CpG-island No: 18546
ctataaaaaaaaataccaacgccccaaaccaactctcccgccgacactactacgatccgcgaaacaaccaatcaaataactaaatttaccataaaaacgaaacttcctccccaacgcgcacgaatacgtacgtaaaaatcccgccccgaaactacaattactactacaactaaaatacaacgacgatttctaaaattcttcactcgcgactaacgaaactacgataacgtctccacacgataaataccaaaacgaacgaaattaaaaccgactctaaaaaaaaactaaaaccaaaaacccgaattcctatcgcgaatcgctctaaaccgataaattcccgaatccaaaaaaaacgaccgccgacccaaaccgtccaaccgaactacgtaccacgatccccgcgccttaaactccttatccgatcatcaaaacctaacgaccttaacttctcgacttctcgatttctcgatttcgtacgcgcgttcgtacctaaaacaaaacgaaaaaaccgcgcgaaaccgacgtcacgaaaaaacaaaaacccttctactctacctaacgctctccgtatcctcgcccgattcgcgtaacacccctcgccctctccttattaaacccc

SEQ ID NO: 18547 - DNA, 619 bp, Artificial Sequence
  chemically treated genomic DNA (Homo sapiens) CpG-island No: 18547
ttgtaagaggaggtgttagcgttttaagttagttttttcgtcggtattgttgcggttcgcgaggtagttaattaggtagttgagtttgttataggggcgggattttttttttagcgcgtacgagtacgtgcgtggaggtttcgtttcggaattgtagttgttgttgtagttgaggtatagcggcggtttttgaggttttttattcgcgattgacggagttgcggtggcgtttttatacggtgagtattaaaacgagcggggttggagtcgattttggagaggggttgaggttaggaattcgggtttttatcgcgggtcgttttgggtcggtgggttttcgggtttagagagggcggtcgtcggtttaagtcgtttaatcgagttgcgtgttacggttttcgcgttttgggttttttgttcggttattagagtttgacggttttggtttttcggtttttcggtttttcggtttcgtgcgcgcgttcgtgtttgagataaagcgagagggtcgcgcgggatcggcgttacgaggagatagaggtttttttattttgtttggcgtttttcgtgttttcgttcggttcgcgtggtatttttcgttttttttttgttgaatttt

SEQ ID NO: 18548 - DNA, 619 bp, Artificial Sequence
  chemically treated genomic DNA (Homo sapiens) CpG-island No: 18548
aaaattcaacaaaaaaaaaacgaaaaataccacgcgaaccgaacgaaaacacgaaaaacgccaaacaaaataaaaaaacctctatctcctcgtaacgccgatcccgcgcgaccctctcgctttatctcaaacacgaacgcgcgcacgaaaccgaaaaaccgaaaaaccgaaaaaccaaaaccgtcaaactctaataaccgaacaaaaaacccaaaacgcgaaaaccgtaacacgcaactcgattaaacgacttaaaccgacgaccgccctctctaaacccgaaaacccaccgacccaaaacgacccgcgataaaaacccgaattcctaacctcaacccctctccaaaatcgactccaaccccgctcgttttaatactcaccgtataaaaacgccaccgcaactccgtcaatcgcgaataaaaaacctcaaaaaccgccgctatacctcaactacaacaacaactacaattccgaaacgaaacctccacgcacgtactcgtacgcgctaaaaaaaaaatcccgcccctataacaaactcaactacctaattaactacctcgcgaaccgcaacaataccgacgaaaaaactaacttaaaacgctaacacctcctcttacaa

SEQ ID NO: 18549 - DNA, 679 bp, Artificial Sequence
  chemically treated genomic DNA (Homo sapiens) CpG-island No: 18549
tgggcggggtcgagttgcgcgcgattttcggcgcgttcggggaggtttagataggggtggtttttttggttttcgttttcgcgggttttatgatatcgtattggttcgcgggacggggcggggtcgggtgagggggaggagatagttttacgttttgcgattcgcggtgatttttacgcggaattttttcgcggtaattcgaagtatcgcgtttgcgtgttgtagtagcgtttggtggcggtggtagtttgttcgcgggtgtgtgaagggagatagtgtggaggttatagggtattcgttacgatgagtagtattttagttaagatcgcggagatagaagtagaggtaatggacgtagttggcggtttatttttagtttgagtattttttttttggtggcgtcgtttttttttgtttttttttgagtcgcgttaggatcgggtttagatttcgcgattttttttagcgaggttcgtgtttcgattgttttttgttacgattaggagttttcgattttttttagttagggtttttttttttttcgtttcgcgtttacgttttcggatttttttttgttcgggttcgcgtttcgtatttttgtattttaggtttttagttcgtttttttttttagtgtttggtttttgttttgatgttgttttttttcgttttgttttgag

SEQ ID NO: 18550 - DNA, 679 bp, Artificial Sequence
  chemically treated genomic DNA (Homo sapiens) CpG-island No: 18550
ctcaaaacaaaacgaaaaaaaacaacatcaaaacaaaaaccaaacactaaaaaaaaaaacgaactaaaaacctaaaatacaaaaatacgaaacgcgaacccgaacaaaaaaaaatccgaaaacgtaaacgcgaaacgaaaaaaaaaaaaaccctaactaaaaaaaatcgaaaactcctaatcgtaacaaaaaacaatcgaaacacgaacctcgctaaaaaaaatcgcgaaatctaaacccgatcctaacgcgactcaaaaaaaaacaaaaaaaaacgacgccaccaaaaaaaaaatactcaaactaaaaataaaccgccaactacgtccattacctctacttctatctccgcgatcttaactaaaatactactcatcgtaacgaataccctataacctccacactatctcccttcacacacccgcgaacaaactaccaccgccaccaaacgctactacaacacgcaaacgcgatacttcgaattaccgcgaaaaaattccgcgtaaaaatcaccgcgaatcgcaaaacgtaaaactatctcctccccctcacccgaccccgccccgtcccgcgaaccaatacgatatcataaaacccgcgaaaacgaaaaccaaaaaaaccacccctatctaaacctccccgaacgcgccgaaaatcgcgcgcaactcgaccccgccca

SEQ ID NO: 18551 - DNA, 679 bp, Artificial Sequence
  chemically treated genomic DNA (Homo sapiens) CpG-island No: 18551
tttagagtaaaacggaaagaaataatattagaataggagttaaatattgggagggggaacggattaagggtttaaggtgtaggggtgcggaacgcgggttcgggtaaaggggagttcgagagcgtagacgcgggacgaggggaaagggggttttgattgaggagagtcggggatttttaatcgtggtagagggtagtcggaatacgggtttcgttgagagaagtcgcggaatttaggttcggttttgacgcggtttaaaggagaataggaaggagcgacgttattaaagaaggaatgtttagattaagagtgaatcgttagttgcgtttattatttttgtttttattttcgcgattttagttaaggtgttgtttatcgtggcgagtattttgtggtttttatattgtttttttttatatattcgcgggtaaattgttatcgttattaggcgttattgtagtacgtaggcgcggtatttcgaattatcgcgagagagtttcgcgtaggggttatcgcgagtcgtaaagcgtggggttgtttttttttttttattcgatttcgtttcgtttcgcgagttagtgcggtgttatagagttcgcgggagcggaggttagagaggttatttttgtttgggttttttcgagcgcgtcgagggtcgcgcgtagttcggtttcgttta

SEQ ID NO: 18552 - DNA, 679 bp, Artificial Sequence
  chemically treated genomic DNA (Homo sapiens) CpG-island No: 18552
taaacgaaaccgaactacgcgcgaccctcgacgcgctcgaaaaaacccaaacaaaaataacctctctaacctccgctcccgcgaactctataacaccgcactaactcgcgaaacgaaacgaaatcgaataaaaaaaaaaaaacaaccccacgctttacgactcgcgataacccctacgcgaaactctctcgcgataattcgaaataccgcgcctacgtactacaataacgcctaataacgataacaatttacccgcgaatatataaaaaaaaacaatataaaaaccacaaaatactcgccacgataaacaacaccttaactaaaatcgcgaaaataaaaacaaaaataataaacgcaactaacgattcactcttaatctaaacattccttctttaataacgtcgctccttcctattctcctttaaaccgcgtcaaaaccgaacctaaattccgcgacttctctcaacgaaacccgtattccgactaccctctaccacgattaaaaatccccgactctcctcaatcaaaaccccctttcccctcgtcccgcgtctacgctctcgaactcccctttacccgaacccgcgttccgcacccctacaccttaaacccttaatccgttccccctcccaatatttaactcctattctaatattatttctttccgttttactctaaa

SEQ ID NO: 18553 - DNA, 1065 bp, Artificial Sequence
  chemically treated genomic DNA (Homo sapiens) CpG-island No: 18553
cgcggtagttcgggcgtcgagacgttttttagggacgcggttttacgggttagtttggttatcgtcgtggttcgtaataggtagaattgtatttgatttacggaaatgggtttttcggcgtcgcggtcgttcgtagatttgggtatttcgaggcggtcgatgaaggtttgtagttttttgcggaaggtttttatttgagcgttgatgcggtagagtagttcgtgttttcggatgcggttgtcgtcgtttttttcgtttatgagttcgaataggttttcgttggttacgtagatgcgcgtttcggtgatgatggtgttcgtgtcggcgatgagtcggtcgatggttttgtttaggcgttcggttttcgagcggatgttttttatttgttgtcgatcggagaagtttttgggttagggttcgggcgtcgggtagaaggagcgagtgggcgtgaggtagcggatgttgcgtatttttttcgagtcgttttcgtcgtcgatgggtttttcgcgtttgcggtgcggaggtcgcgagtcgtcgtcgtttttttttttgttcgcgtcgttttcggcgtcgttgtcgcgggggttgtcgcggatgtttaggtgcgaggttaggtcgtagcgttgtatgttggatataagtacgcggttttcgtattgtagttgtatgattttgtcgttgagttcgttgatttgtaggcgcgtcgtttttagttttttttgtagggtttcggttttggcgttgtcgtggtgtcgcgcgttgtcgtggtcgtcggatttgtatttgtatttgttgagtttcgtcgtgatgcgtttgttttgtttttttaggtcggttacgttttttcgtagtagtttcgtttcgttttttattagttgtaggtgttgtcgtagtttcgatagggattcgttttgtttttttatgagcgggttggtcgagtcgttgaagttatcgtttttaaggtcgtttagtttcgtttttaggtttttgttttttatttttagttcgacgatttttttgtttaggatgttggtttttttttttattagttttagtcgtagtttg

SEQ ID NO: 18554 - DNA, 1065 bp, Artificial Sequence
  chemically treated genomic DNA (Homo sapiens) CpG-island No: 18554
caaactacgactaaaactaataaaaaaaaaaaccaacatcctaaacaaaaaaatcgtcgaactaaaaataaaaaacaaaaacctaaaaacgaaactaaacgaccttaaaaacgataacttcaacgactcgaccaacccgctcataaaaaaacaaaacgaatccctatcgaaactacgacaacacctacaactaataaaaaacgaaacgaaactactacgaaaaaacgtaaccgacctaaaaaaacaaaacaaacgcatcacgacgaaactcaacaaatacaaatacaaatccgacgaccacgacaacgcgcgacaccacgacaacgccaaaaccgaaaccctacaaaaaaaactaaaaacgacgcgcctacaaatcaacgaactcaacgacaaaatcatacaactacaatacgaaaaccgcgtacttatatccaacatacaacgctacgacctaacctcgcacctaaacatccgcgacaacccccgcgacaacgacgccgaaaacgacgcgaacaaaaaaaaaaacgacgacgactcgcgacctccgcaccgcaaacgcgaaaaacccatcgacgacgaaaacgactcgaaaaaaatacgcaacatccgctacctcacgcccactcgctccttctacccgacgcccgaaccctaacccaaaaacttctccgatcgacaacaaataaaaaacatccgctcgaaaaccgaacgcctaaacaaaaccatcgaccgactcatcgccgacacgaacaccatcatcaccgaaacgcgcatctacgtaaccaacgaaaacctattcgaactcataaacgaaaaaaacgacgacaaccgcatccgaaaacacgaactactctaccgcatcaacgctcaaataaaaaccttccgcaaaaaactacaaaccttcatcgaccgcctcgaaatacccaaatctacgaacgaccgcgacgccgaaaaacccatttccgtaaatcaaatacaattctacctattacgaaccacgacgataaccaaactaacccgtaaaaccgcgtccctaaaaaacgtctcgacgcccgaactaccgcg

SEQ ID NO: 18555 - DNA, 1065 bp, Artificial Sequence
  chemically treated genomic DNA (Homo sapiens) CpG-island No: 18555
taagttacggttaaggttggtggaggaagaagttaatattttgggtaggaaaatcgtcgaattggaggtggagaatagaggtttgaaggcggaattggacgattttaggggcgatgattttaacggttcggttaattcgtttatgagggagtagagcgaatttttgtcggagttgcggtagtatttgtagttggtggaagacgagacggagttgttgcggaggaacgtggtcgatttggaggagtagaataagcgtattacggcggagtttaataagtataagtataagttcggcggttacgatagcgcgcggtattacgataacgttaagatcgaggttttgtaggaggagttgaaggcggcgcgtttgtagattaacgagtttagcggtaaggttatgtagttgtagtacgagaatcgcgtgtttatgtttaatatgtagcgttacgatttggtttcgtatttgggtattcgcggtagttttcgcgatagcgacgtcgagagcgacgcgggtaagaaggagagcgacgacgattcgcggttttcgtatcgtaagcgcgaagggtttatcggcggcgagagcgattcggaggaggtgcgtaatattcgttgttttacgtttattcgttttttttattcggcgttcgggttttggtttaagagttttttcgatcggtagtagatgaaggatattcgttcggaggtcgagcgtttgggtaagattatcgatcggtttatcgtcgatacgagtattattattatcgaggcgcgtatttacgtggttaacggggatttgttcggatttatggacgaggaggacgacggtagtcgtattcgggagtacgagttgttttatcgtattaacgtttagatgaaggtttttcgtaaggagttgtagatttttatcgatcgtttcgaggtgtttaagtttgcggacgatcgcggcgtcgaggagtttattttcgtgagttaggtatagttttgtttattgcgagttacggcggtggttaggttggttcgtggagtcgcgtttttggggggcgtttcggcgttcggattgtcgcg

SEQ ID NO: 18556 - DNA, 1065 bp, Artificial Sequence
  chemically treated genomic DNA (Homo sapiens) CpG-island No: 18556
cgcgacaatccgaacgccgaaacgccccccaaaaacgcgactccacgaaccaacctaaccaccgccgtaactcgcaataaacaaaactatacctaactcacgaaaataaactcctcgacgccgcgatcgtccgcaaacttaaacacctcgaaacgatcgataaaaatctacaactccttacgaaaaaccttcatctaaacgttaatacgataaaacaactcgtactcccgaatacgactaccgtcgtcctcctcgtccataaatccgaacaaatccccgttaaccacgtaaatacgcgcctcgataataataatactcgtatcgacgataaaccgatcgataatcttacccaaacgctcgacctccgaacgaatatccttcatctactaccgatcgaaaaaactcttaaaccaaaacccgaacgccgaataaaaaaaacgaataaacgtaaaacaacgaatattacgcacctcctccgaatcgctctcgccgccgataaacccttcgcgcttacgatacgaaaaccgcgaatcgtcgtcgctctccttcttacccgcgtcgctctcgacgtcgctatcgcgaaaactaccgcgaatacccaaatacgaaaccaaatcgtaacgctacatattaaacataaacacgcgattctcgtactacaactacataaccttaccgctaaactcgttaatctacaaacgcgccgccttcaactcctcctacaaaacctcgatcttaacgttatcgtaataccgcgcgctatcgtaaccgccgaacttatacttatacttattaaactccgccgtaatacgcttattctactcctccaaatcgaccacgttcctccgcaacaactccgtctcgtcttccaccaactacaaatactaccgcaactccgacaaaaattcgctctactccctcataaacgaattaaccgaaccgttaaaatcatcgcccctaaaatcgtccaattccgccttcaaacctctattctccacctccaattcgacgattttcctacccaaaatattaacttcttcctccaccaaccttaaccgtaactta

SEQ ID NO: 18557 - DNA, 598 bp, Artificial Sequence
  chemically treated genomic DNA (Homo sapiens) CpG-island No: 18557
gacgttgcgatttatttaaaggtattttttcgtttttttagttcgttgtttcgtcggttattttttcgttttcgtatttcgtagtagttttttcgcggttttcggtcgtcgaatttttagcggttgttaatgtttttatcgttttttttgtcgaggttttatcgtagtttagttttattagttttcgtcggttcgtagtggacgttttcgtttattttcgtcgttttttatttggcgttattggttgtttaggtttggtagtttttcgtgttgtggttttttatttttagttatcgtcgttgtcgtcgttatagtcgtcgtagtagtagttggatttgttgcgatcgtcgttatcgtcgttcgtttttttttatagttaacgtagttgtgcgagattggaagacgttttttaatagttattttcggattttggtttcggaaacggaagtagagttttttaaatagtcgcggggttattgttatattggaaatggtttcgtgtatagacgcgtcgaagggttaggtggggtaaaatttttagtgggaattaagaaagataaaagtgttttgtggggttttaacgttttgtagatttagg

SEQ ID NO: 18558 - DNA, 598 bp, Artificial Sequence
  chemically treated genomic DNA (Homo sapiens) CpG-island No: 18558
cctaaatctacaaaacgttaaaaccccacaaaacacttttatctttcttaattcccactaaaaattttaccccacctaacccttcgacgcgtctatacacgaaaccatttccaatataacaataaccccgcgactatttaaaaaactctacttccgtttccgaaaccaaaatccgaaaataactattaaaaaacgtcttccaatctcgcacaactacgttaactataaaaaaaaacgaacgacgataacgacgatcgcaacaaatccaactactactacgacgactataacgacgacaacgacgataactaaaaataaaaaaccacaacacgaaaaactaccaaacctaaacaaccaataacgccaaataaaaaacgacgaaaataaacgaaaacgtccactacgaaccgacgaaaactaataaaactaaactacgataaaacctcgacaaaaaaaacgataaaaacattaacaaccgctaaaaattcgacgaccgaaaaccgcgaaaaaactactacgaaatacgaaaacgaaaaaataaccgacgaaacaacgaactaaaaaaacgaaaaaatacctttaaataaatcgcaacgtc

SEQ ID NO: 18559 - DNA, 598 bp, Artificial Sequence
  chemically treated genomic DNA (Homo sapiens) CpG-island No: 18559
tttaagtttatagggcgttaggattttataaggtatttttgttttttttggtttttattgaagattttattttatttagtttttcgacgcgtttgtgtacggggttatttttaatatggtagtagtttcgcgattgtttggggggttttgttttcgttttcgggattagaattcggaagtggttgttgaggggcgttttttaatttcgtatagttgcgttggttgtagaagagaacggacggcgatggcgacggtcgtagtaaatttagttgttgttgcggcggttgtggcggcggtagcggcggtgattgaggatagagagttatagtacgaggagttgttaggtttggatagttagtggcgttagatagaaaacggcgagagtgggcgagaacgtttattgcgggtcggcgaaagttggtgaggttgggttgcggtggagtttcggtagagggaacggtgggggtattgataatcgttggggattcggcggtcgagggtcgcgggaaagttgttgcggggtgcgggggcgggggagtggtcggcgggatagcgggttaaaggggcggggaagtgtttttgaatgaatcgtaacgtt

SEQ ID NO: 18560 - DNA, 598 bp, Artificial Sequence
  chemically treated genomic DNA (Homo sapiens) CpG-island No: 18560
aacgttacgattcattcaaaaacacttccccgcccctttaacccgctatcccgccgaccactcccccgcccccgcaccccgcaacaactttcccgcgaccctcgaccgccgaatccccaacgattatcaatacccccaccgttccctctaccgaaactccaccgcaacccaacctcaccaactttcgccgacccgcaataaacgttctcgcccactctcgccgttttctatctaacgccactaactatccaaacctaacaactcctcgtactataactctctatcctcaatcaccgccgctaccgccgccacaaccgccgcaacaacaactaaatttactacgaccgtcgccatcgccgtccgttctcttctacaaccaacgcaactatacgaaattaaaaaacgcccctcaacaaccacttccgaattctaatcccgaaaacgaaaacaaaaccccccaaacaatcgcgaaactactaccatattaaaaataaccccgtacacaaacgcgtcgaaaaactaaataaaataaaatcttcaataaaaaccaaaaaaaacaaaaataccttataaaatcctaacgccctataaacttaaa

SEQ ID NO: 18561 - DNA, 1115 bp, Artificial Sequence
  chemically treated genomic DNA (Homo sapiens) CpG-island No: 18561
ttcgggttcgtgttttattcgtcggtcggcggtggttttttattgttatcgttcgggttttttagaaacgttggttttaagtatagtttcgggtacgttcgtttttttcggggtttacggggtagtttggagtttaatagtttaggggcgaggcgacggcgggttcgacggtagttttttttcgatatagattttcgtgatttattgacgaattaggatcgaggttgttcgttttggggtagttgtaagtgttttagttgacgggaaattcggtcgagtggttaagttttcgatatgattttgattcggagtttcgggagttcgtcgtaatcgatttcgggtttcgcgtaggtaggttcgggtcggggtttcgcgggcggcgggcgcgaacggagaagcgtcgcgtagggtttttagtagtttcgggtcgtcgttgtggtcggtttcggtaggggggacgagcgggttcgaggattcggcgtaggtttgcgagcgcgtttatttttttttgtcgttgcgcgtgggtcgtcgtcgcgtttaggttcgtcgtagtcgaggtcggagtagggtgcggaaaagcggggttcgcgttcgaaatagtcgtatcgtttcgggattgggtttatcgaattcgtcgtagcgtcgtcgtcgtcgttttagtttttaagatggtcgttcgcggggcggaattagtttagtttttgttttcggtgcgcggttcggggcggtgaggagggagggggagggttggtcgttttaggtagattggcggatcgcgtttacgattttttgtcgtcgtcgatttcggggtgggggatggggcggggggcggggcggcgtttgcgtattggcgggcggtttcgggtatcgttagtgggcgcgagagttttagatttcgaagtcgcgcgtttttttttttatgtgttacggtttagggcggtaggttcggttgagggcgatttcggtggagaaagaatttcgattttttcgtttttcggttttcgttttgtttttcgtttttacgttttattcggtttttaggggaggcgcggcgcggttcgggtatggagcgtttcgggtttttggaggtttagtggagggttgggttttaggga

SEQ ID NO: 18562 - DNA, 1115 bp, Artificial Sequence
  chemically treated genomic DNA (Homo sapiens) CpG-island No: 18562
tccctaaaacccaaccctccactaaacctccaaaaacccgaaacgctccatacccgaaccgcgccgcgcctcccctaaaaaccgaataaaacgtaaaaacgaaaaacaaaacgaaaaccgaaaaacgaaaaaatcgaaattctttctccaccgaaatcgccctcaaccgaacctaccgccctaaaccgtaacacataaaaaaaaaaacgcgcgacttcgaaatctaaaactctcgcgcccactaacgatacccgaaaccgcccgccaatacgcaaacgccgccccgccccccgccccatcccccaccccgaaatcgacgacgacaaaaaatcgtaaacgcgatccgccaatctacctaaaacgaccaaccctccccctccctcctcaccgccccgaaccgcgcaccgaaaacaaaaactaaactaattccgccccgcgaacgaccatcttaaaaactaaaacgacgacgacgacgctacgacgaattcgataaacccaatcccgaaacgatacgactatttcgaacgcgaaccccgcttttccgcaccctactccgacctcgactacgacgaacctaaacgcgacgacgacccacgcgcaacgacaaaaaaaaataaacgcgctcgcaaacctacgccgaatcctcgaacccgctcgtcccccctaccgaaaccgaccacaacgacgacccgaaactactaaaaaccctacgcgacgcttctccgttcgcgcccgccgcccgcgaaaccccgacccgaacctacctacgcgaaacccgaaatcgattacgacgaactcccgaaactccgaatcaaaatcatatcgaaaacttaaccactcgaccgaatttcccgtcaactaaaacacttacaactaccccaaaacgaacaacctcgatcctaattcgtcaataaatcacgaaaatctatatcgaaaaaaaactaccgtcgaacccgccgtcgcctcgcccctaaactattaaactccaaactaccccgtaaaccccgaaaaaaacgaacgtacccgaaactatacttaaaaccaacgtttctaaaaaacccgaacgataacaataaaaaaccaccgccgaccgacgaataaaacacgaacccgaa

SEQ ID NO: 18563 - DNA, 1115 bp, Artificial Sequence
  chemically treated genomic DNA (Homo sapiens) CpG-island No: 18563
tttttggagtttaattttttattgagtttttaggggttcgggacgttttatgttcgggtcgcgtcgcgttttttttaagggtcgggtggggcgtgggagcggaggataaggcgggagtcgggaggcgggagggtcggggttttttttttatcggggtcgtttttagtcgggtttgtcgttttgggtcgtggtatatggggagggaagcgcgcggtttcggggtttggggttttcgcgtttattaacggtgttcggagtcgttcgttagtgcgtaagcgtcgtttcgtttttcgttttattttttatttcggggtcgacggcgatagagagtcgtgggcgcggttcgttagtttgtttagagcggttagttttttttttttttttttatcgtttcggatcgcgtatcggaagtagaagttaggttggtttcgtttcgcgagcggttattttggaggttgaggcggcggcggcggcgttgcggcgggttcggtgggtttaatttcggggcggtgcggttgtttcgggcgcgggtttcgttttttcgtattttgtttcggtttcgattacggcgagtttgagcgcggcggcggtttacgcgtagcgatagggagaggtgagcgcgttcgtaggtttgcgtcgggttttcgggttcgttcgttttttttgtcggagtcggttatagcggcggttcggggttgttggggattttgcgcgacgttttttcgttcgcgttcgtcgttcgcggggtttcggttcgagtttgtttgcgcggaattcgaggtcggttacggcgggttttcggagtttcgggttagggttatgtcggggatttgattattcggtcgggtttttcgttagttgggatatttgtagttgttttaggacgggtagtttcgattttggttcgttagtggattacgggagtttgtgtcgggggagggttgtcgtcgagttcgtcgtcgtttcgtttttgaattgttagattttagattgtttcgtaaatttcgagagaaacgagcgtgttcgggattgtgtttagggttagcgtttttgggaaattcgggcggtgatagtgggagattatcgtcggtcggcgagtgagatacgagttcgga

SEQ ID NO: 18564 - DNA, 1115 bp, Artificial Sequence
  chemically treated genomic DNA (Homo sapiens) CpG-island No: 18564
tccgaactcgtatctcactcgccgaccgacgataatctcccactatcaccgcccgaatttcccaaaaacgctaaccctaaacacaatcccgaacacgctcgtttctctcgaaatttacgaaacaatctaaaatctaacaattcaaaaacgaaacgacgacgaactcgacgacaaccctcccccgacacaaactcccgtaatccactaacgaaccaaaatcgaaactacccgtcctaaaacaactacaaatatcccaactaacgaaaaacccgaccgaataatcaaatccccgacataaccctaacccgaaactccgaaaacccgccgtaaccgacctcgaattccgcgcaaacaaactcgaaccgaaaccccgcgaacgacgaacgcgaacgaaaaaacgtcgcgcaaaatccccaacaaccccgaaccgccgctataaccgactccgacaaaaaaaacgaacgaacccgaaaacccgacgcaaacctacgaacgcgctcacctctccctatcgctacgcgtaaaccgccgccgcgctcaaactcgccgtaatcgaaaccgaaacaaaatacgaaaaaacgaaacccgcgcccgaaacaaccgcaccgccccgaaattaaacccaccgaacccgccgcaacgccgccgccgccgcctcaacctccaaaataaccgctcgcgaaacgaaaccaacctaacttctacttccgatacgcgatccgaaacgataaaaaaaaaaaaaaaaaactaaccgctctaaacaaactaacgaaccgcgcccacgactctctatcgccgtcgaccccgaaataaaaaataaaacgaaaaacgaaacgacgcttacgcactaacgaacgactccgaacaccgttaataaacgcgaaaaccccaaaccccgaaaccgcgcgcttccctccccatataccacgacccaaaacgacaaacccgactaaaaacgaccccgataaaaaaaaaaccccgaccctcccgcctcccgactcccgccttatcctccgctcccacgccccacccgacccttaaaaaaaacgcgacgcgacccgaacataaaacgtcccgaacccctaaaaactcaataaaaaattaaactccaaaaa

SEQ ID NO: 18565 - DNA, 911 bp, Artificial Sequence
  chemically treated genomic DNA (Homo sapiens) CpG-island No: 18565
cgtgtttttgtttcgtttcgtgtttttgtttcgtttcgtgtttttgtttcgtttttcgtgtttttgtttcgtttcgtgtttgtttcgtttcgtgtttttgtttcgtttcgtgtttttgtttcgtttttcgtgtttttgtttcgtttcgtgtttttgtttcgtttcgtgtttttgtttcgtttcgtgtttttgtttcgtttttcgtgtttttgtttcgtttcgtgtttttgtttcgtttcgtgtttttgtttcgtttcgtgtttttgtttcgtttcgtgtttttgtttcgtttcgtgtttttgtttcgtttcgtgtttttgtttcgtttcgtgtttttgtttcgtttcgtgtttttgtttcgtttttcgtgtttttgtttcgtttcgtgtttttgtttcgtttcgtgtttttgtttcgtttcgtgtttttgtttcgtttcgtgtttttgtttcgtttcgtgtttttgtttcgtttcgtgtttttgtttcgtttttcgtgtttttgtttcgtttcgtgtttttgtttcgtttttcgtgtttgtttcgtttcgtgtttttgtttcgtttcgtgtttttgtttcgtttcgtgtttttgtttcgtttcgtgtttttgtttcgtttcgtgtttttgtttcgtttcgtgtttttgtttcgtttcgtgtttttgtttcgtttcgtgtttttgtttcgtttttcgtgtttttgtttcgtttcgtgtttttgtttcgtttcgtgtttttgtttcgtttcgtgtttttgtttcgtttcgtgtttttgtttcgtttcgtgtttttgtttcgtttcgtgtttttgtttcgtttcgtgtttttgtttcgtttttcgtgtttttgtttcgttttttatgttttcgttttattttatgtttttgtttattttttttgtttttaggtt

SEQ ID NO: 18566 - DNA, 911 bp, Artificial Sequence
  chemically treated genomic DNA (Homo sapiens) CpG-island No: 18566
aacctaaaaacaaaaaaaataaacaaaaacataaaataaaacgaaaacataaaaaacgaaacaaaaacacgaaaaacgaaacaaaaacacgaaacgaaacaaaaacacgaaacgaaacaaaaacacgaaacgaaacaaaaacacgaaacgaaacaaaaacacgaaacgaaacaaaaacacgaaacgaaacaaaaacacgaaacgaaacaaaaacacgaaaaacgaaacaaaaacacgaaacgaaacaaaaacacgaaacgaaacaaaaacacgaaacgaaacaaaaacacgaaacgaaacaaaaacacgaaacgaaacaaaaacacgaaacgaaacaaaaacacgaaacgaaacaaaaacacgaaacgaaacaaacacgaaaaacgaaacaaaaacacgaaacgaaacaaaaacacgaaaaacgaaacaaaaacacgaaacgaaacaaaaacacgaaacgaaacaaaaacacgaaacgaaacaaaaacacgaaacgaaacaaaaacacgaaacgaaacaaaaacacgaaacgaaacaaaaacacgaaaaacgaaacaaaaacacgaaacgaaacaaaaacacgaaacgaaacaaaaacacgaaacgaaacaaaaacacgaaacgaaacaaaaacacgaaacgaaacaaaaacacgaaacgaaacaaaaacacgaaacgaaacaaaaacacgaaacgaaacaaaaacacgaaaaacgaaacaaaaacacgaaacgaaacaaaaacacgaaacgaaacaaaaacacgaaacgaaacaaaaacacgaaaaacgaaacaaaaacacgaaacgaaacaaaaacacgaaacgaaacaaacacgaaacgaaacaaaaacacgaaaaacgaaacaaaaacacgaaacgaaacaaaaacacgaaacgaaacaaaaacacg

SEQ ID NO: 18567 - DNA, 911 bp, Artificial Sequence
  chemically treated genomic DNA (Homo sapiens) CpG-island No: 18567
ggtttggggataggggggatgagtagggatatgggatggagcggagatatgggggacggggtagagatacgggggacggggtagagatacgggacggggtagggatacgggacggagtagagatacgggacggggtagagatacgggacggggtagagatacgggacggggtagagatacgggacggagtagagatacgggacggagtagagatacgggggacggagtagagatacgggacggagtagagatacgggacggagtagagatacgggacggagtagagatacgggacggagtagggatacgggacggagtagagatacgggacggagtagggatacgggacggagtagggatacgggacggagtagatacgggggacggagtagagatacgggacggagtagagatacgggggacggggtagagatacgggacggagtagagatacgggacggagtagagatacgggacggagtagaaatacgggacggagtagggatacgggacggagtagagatacgggacggggtagagatacgggggacggagtagagatacgggacggagtagagatacgggacggagtagagatacgggacggagtagagatacgggacggagtagagatacgggacggggtagagatacgggacggggtagagatacgggacggagtagagatacgggacggagtagagatacgggggacggagtagagatacgggacggagtagggatacgggacggggtagagatacgggacggagtagagatacgggggacggggtagagatacgggacggagtagggatacgggacggagtagatacgggacggagtagagatacgggggacggagtagagatacgggacggagtagagatacgggacggagtagagatacg

SEQ ID NO: 18568 - DNA, 911 bp, Artificial Sequence
  chemically treated genomic DNA (Homo sapiens) CpG-island No: 18568
cgtatctctactccgtcccgtatctctactccgtcccgtatctctactccgtcccccgtatctctactccgtcccgtatctactccgtcccgtatccctactccgtcccgtatctctaccccgtcccccgtatctctactccgtcccgtatctctaccccgtcccgtatccctactccgtcccgtatctctactccgtcccccgtatctctactccgtcccgtatctctactccgtcccgtatctctaccccgtcccgtatctctaccccgtcccgtatctctactccgtcccgtatctctactccgtcccgtatctctactccgtcccgtatctctactccgtcccgtatctctactccgtcccccgtatctctaccccgtcccgtatctctactccgtcccgtatccctactccgtcccgtatttctactccgtcccgtatctctactccgtcccgtatctctactccgtcccgtatctctaccccgtcccccgtatctctactccgtcccgtatctctactccgtcccccgtatctactccgtcccgtatccctactccgtcccgtatccctactccgtcccgtatctctactccgtcccgtatccctactccgtcccgtatctctactccgtcccgtatctctactccgtcccgtatctctactccgtcccgtatctctactccgtcccccgtatctctactccgtcccgtatctctactccgtcccgtatctctaccccgtcccgtatctctaccccgtcccgtatctctaccccgtcccgtatctctactccgtcccgtatccctaccccgtcccgtatctctaccccgtcccccgtatctctaccccgtcccccatatctccgctccatcccatatccctactcatcccccctatccccaaacc

SEQ ID NO: 18569 - DNA, 806 bp, Artificial Sequence
  chemically treated genomic DNA (Homo sapiens) CpG-island No: 18569
gttggtcgtttgtattgcgatggttaacgggtttcgttgtttttggtttagggcgtgttggttcgcgtttcgttttaggaataggtaaatttggttgaggggcgaggtcggaggggcgtgtcggggcggggcggggcggggcgagtgtggtcgcgggggcgtggtcggatagggtatggcggatagggcgtagtcgggtcggggtaggcgtggtcggggtatagggcggggcgtgggttgcgcgttttattcggtgcggtttagtagcgtggcgtggtgtaggggcgttcggtttcggttgtttttttggtttacgttcgtttcgttttgtagtaggaatttatagacgattaaggagttttggggagtcggggtaatttagacggagttacggtatcggttttttttcgcgtttttgtattttgatttcggttttgggcgtttttagtcgggatcgaatttggtttttatcgcggataggcgatttttgtgtgggcgttatagaagatgtaaacgcgattgtgtatttgtgttttgcgcgtagttttcgtggttcgtttatttttagtacggtttgtattagcggcgttttgtttttatttttcgcgttcgtttagttgatttcggtttcgtgggttagcgtcgtcgttagcgtaggaaggtcgcgggtacgcgttgcgcggtgcgttaagagtttcgggtgtagttcgcgtacgttcgttaggttttaggtttcggttttagtgttttcgtttgttttatcgttggattttttcgattttgtattttttgtggggagggggcgg

SEQ ID NO: 18570 - DNA, 806 bp, Artificial Sequence
  chemically treated genomic DNA (Homo sapiens) CpG-island No: 18570
ccgccccctccccacaaaaaatacaaaatcgaaaaaatccaacgataaaacaaacgaaaacactaaaaccgaaacctaaaacctaacgaacgtacgcgaactacacccgaaactcttaacgcaccgcgcaacgcgtacccgcgaccttcctacgctaacgacgacgctaacccacgaaaccgaaatcaactaaacgaacgcgaaaaataaaaacaaaacgccgctaatacaaaccgtactaaaaataaacgaaccacgaaaactacgcgcaaaacacaaatacacaatcgcgtttacatcttctataacgcccacacaaaaatcgcctatccgcgataaaaaccaaattcgatcccgactaaaaacgcccaaaaccgaaatcaaaatacaaaaacgcgaaaaaaaaccgataccgtaactccgtctaaattaccccgactccccaaaactccttaatcgtctataaattcctactacaaaacgaaacgaacgtaaaccaaaaaaacaaccgaaaccgaacgcccctacaccacgccacgctactaaaccgcaccgaataaaacgcgcaacccacgccccgccctataccccgaccacgcctaccccgacccgactacgccctatccgccataccctatccgaccacgcccccgcgaccacactcgccccgccccgccccgccccgacacgcccctccgacctcgcccctcaaccaaatttacctattcctaaaacgaaacgcgaaccaacacgccctaaaccaaaaacaacgaaacccgttaaccatcgcaatacaaacgaccaac

SEQ ID NO: 18571 - DNA, 806 bp, Artificial Sequence
  chemically treated genomic DNA (Homo sapiens) CpG-island No: 18571
tcgttttttttttatagagggtgtagagtcggaggagtttagcggtgaggtagacggggatattgaggtcgaggtttggggtttggcggacgtgcgcgagttgtattcggggtttttggcgtatcgcgtagcgcgtgttcgcgatttttttgcgttggcggcggcgttggtttacggggtcgaggttaattgggcggacgcggaggatgagggtaagacgtcgttggtgtaggtcgtgttaggggtgagcgagttacgggggttgcgcgtaggatataggtgtatagtcgcgtttgtattttttgtggcgtttatataagggtcgtttgttcgcggtggggattaagttcggtttcggttgggggcgtttaaggtcggggttagggtgtagaggcgcggagaggggtcggtgtcgtggtttcgtttgagttgtttcggttttttagggttttttgatcgtttgtgagtttttgttgtaaaacggagcggacgtgaattaaagagatagtcggggtcgggcgtttttgtattacgttacgttgttgggtcgtatcgggtgagacgcgtaatttacgtttcgttttgtgtttcgattacgtttatttcggttcggttacgttttgttcgttatgttttattcggttacgttttcgcgattatattcgtttcgtttcgtttcgtttcgatacgttttttcgatttcgttttttagttaggtttgtttgtttttgaagcggggcgcggattagtacgttttggattaagagtagcgggattcgttggttatcgtagtgtaggcggttaat

SEQ ID NO: 18572 - DNA, 806 bp, Artificial Sequence
  chemically treated genomic DNA (Homo sapiens) CpG-island No: 18572
attaaccgcctacactacgataaccaacgaatcccgctactcttaatccaaaacgtactaatccgcgccccgcttcaaaaacaaacaaacctaactaaaaaacgaaatcgaaaaaacgtatcgaaacgaaacgaaacgaaacgaatataatcgcgaaaacgtaaccgaataaaacataacgaacaaaacgtaaccgaaccgaaataaacgtaatcgaaacacaaaacgaaacgtaaattacgcgtctcacccgatacgacccaacaacgtaacgtaatacaaaaacgcccgaccccgactatctctttaattcacgtccgctccgttttacaacaaaaactcacaaacgatcaaaaaaccctaaaaaaccgaaacaactcaaacgaaaccacgacaccgacccctctccgcgcctctacaccctaaccccgaccttaaacgcccccaaccgaaaccgaacttaatccccaccgcgaacaaacgacccttatataaacgccacaaaaaatacaaacgcgactatacacctatatcctacgcgcaacccccgtaactcgctcacccctaacacgacctacaccaacgacgtcttaccctcatcctccgcgtccgcccaattaacctcgaccccgtaaaccaacgccgccgccaacgcaaaaaaatcgcgaacacgcgctacgcgatacgccaaaaaccccgaatacaactcgcgcacgtccgccaaaccccaaacctcgacctcaatatccccgtctacctcaccgctaaactcctccgactctacaccctctataaaaaaaaaacga

SEQ ID NO: 18573 - DNA, 642 bp, Artificial Sequence
  chemically treated genomic DNA (Homo sapiens) CpG-island No: 18573
ttcggtttttttttacgttttattatttcggtttttttttacgttgttttattatttcggtttttttttacgttttattatttcggtttttttttacgttttattatttcggtttttttttacgttgttttattatttcggtttttttttacgttttattatttcggtttttttttatattttattatttcggtttttttttatattgttttattatttcggtttttttttacgttgttttattatttcggtttttttttacgttttattatttcggtttttttttatattttattatttcggtttttttttatattgttttattatttcggtttttttttacgttgttttattatttcggtttttttttatattttattatttcggtttttttttatattgttttattatttcggtttttttttatattgttttattatttcggtttttttttacgttttattatttcggtttttttttatattttattatttcggtttttttttacgttgttttattatttcggtttttttttacgttttattatttcggtttttttttatattttattatttcggtttttttttatattgttttattatttcggtttttttttacgttgttttattattttggtttttt

SEQ ID NO: 18574 - DNA, 642 bp, Artificial Sequence
  chemically treated genomic DNA (Homo sapiens) CpG-island No: 18574
aaaaaaccaaaataataaaacaacgtaaaaaaaaaccgaaataataaaacaatataaaaaaaaaccgaaataataaaatataaaaaaaaaccgaaataataaaacgtaaaaaaaaaccgaaataataaaacaacgtaaaaaaaaaccgaaataataaaatataaaaaaaaaccgaaataataaaacgtaaaaaaaaaccgaaataataaaacaatataaaaaaaaaccgaaataataaaacaatataaaaaaaaaccgaaataataaaatataaaaaaaaaccgaaataataaaacaacgtaaaaaaaaaccgaaataataaaacaatataaaaaaaaaccgaaataataaaatataaaaaaaaaccgaaataataaaacgtaaaaaaaaaccgaaataataaaacaacgtaaaaaaaaaccgaaataataaaacaatataaaaaaaaaccgaaataataaaatataaaaaaaaaccgaaataataaaacgtaaaaaaaaaccgaaataataaaacaacgtaaaaaaaaaccgaaataataaaacgtaaaaaaaaaccgaaataataaaacgtaaaaaaaaaccgaaataataaaacaacgtaaaaaaaaaccgaaataataaaacgtaaaaaaaaaccgaa

SEQ ID NO: 18575 - DNA, 642 bp, Artificial Sequence
  chemically treated genomic DNA (Homo sapiens) CpG-island No: 18575
gaggagttaaggtggtggagtagcgtggggaggagtcgaggtgatggagtagtgtggggaggagtcgaggtggtggagtgtggggaggagtcgaggtggtggagcgtgggaaggagtcgaggtggtggagtagcgtggggaggagtcgaggtggtggagtgtggggaggagtcgaggtggtggagcgtgggaaggagtcgaggtggtggagtagtgtggggaggagtcgaggtgatggagtagtgtggggaggagtcgaggtggtggagtgtgggaaggagtcgaggtggtggagtagcgtggggaggagtcgaggtgatggagtagtgtggggaggagtcgaggtggtggagtgtggggaggagtcgaggtggtggagcgtgggaaggagtcgaggtggtggagtagcgtggggaggagtcgaggtgatggagtagtgtggggaggagtcgaggtggtggagtgtggggaggagtcgaggtggtggagcgtggggaggagtcgaggtggtggagtagcgtggggaggagtcgaggtggtggagcgtggggaggagtcgaggtggtggagcgtgggaaggagtcgaggtggtggagtagcgtggggaggagtcgaggtggtggagcgtggggaggagtcgag

SEQ ID NO: 18576 - DNA, 642 bp, Artificial Sequence
  chemically treated genomic DNA (Homo sapiens) CpG-island No: 18576
ctcgactcctccccacgctccaccacctcgactcctccccacgctactccaccacctcgactccttcccacgctccaccacctcgactcctccccacgctccaccacctcgactcctccccacgctactccaccacctcgactcctccccacgctccaccacctcgactcctccccacactccaccacctcgactcctccccacactactccatcacctcgactcctccccacgctactccaccacctcgactccttcccacgctccaccacctcgactcctccccacactccaccacctcgactcctccccacactactccatcacctcgactcctccccacgctactccaccacctcgactccttcccacactccaccacctcgactcctccccacactactccatcacctcgactcctccccacactactccaccacctcgactccttcccacgctccaccacctcgactcctccccacactccaccacctcgactcctccccacgctactccaccacctcgactccttcccacgctccaccacctcgactcctccccacactccaccacctcgactcctccccacactactccatcacctcgactcctccccacgctactccaccaccttaactcctc

SEQ ID NO: 18577 - DNA, 670 bp, Artificial Sequence
  chemically treated genomic DNA (Homo sapiens) CpG-island No: 18577
cgtaggtacgagttgcgtatatagttcgaggagtagcggcggttggcgatattcgagggcggtcgtgggattcggttaggtattttattcgtatacgatgttttcggcgttttcgtgttgtagaacgagtatttattttaggtatagttgcgcgtcgtcgtttttacgttgtttttgtttacggttacgtgggttttcggggcgttggcggtgtcgtagggttattttttggatatggtttttagttgtttgtacggcgttttttgcgtgattttgggatttttcgtgtttatttattattgcgttaagcgtgaggacgtgtggtagtgttggtgggtatgttgttcgtttcgtaaggacgtttattttgtatttgacgttaacggggtcgcgttgggtcgcgtcgtttgtttgtattcgtcgggattgggttagttacggggtttcgcgtatttatcgggtttttgtaagatgattaatttgtaggtcgcgtagggttacgttagttgtttgttatcggttatttcgtgttgcgttaagatgtattgcgagttattgacggcggacgaggcgtacgtgtatttgtaggaggagggcgttttcgggtacgatttttatttgtacgggtgtttttagggtagaattaagtcgttttattttagtcggtatt

SEQ ID NO: 18578 - DNA, 670 bp, Artificial Sequence
  chemically treated genomic DNA (Homo sapiens) CpG-island No: 18578
aataccgactaaaataaaacgacttaattctaccctaaaaacacccgtacaaataaaaatcgtacccgaaaacgccctcctcctacaaatacacgtacgcctcgtccgccgtcaataactcgcaatacatcttaacgcaacacgaaataaccgataacaaacaactaacgtaaccctacgcgacctacaaattaatcatcttacaaaaacccgataaatacgcgaaaccccgtaactaacccaatcccgacgaatacaaacaaacgacgcgacccaacgcgaccccgttaacgtcaaatacaaaataaacgtccttacgaaacgaacaacatacccaccaacactaccacacgtcctcacgcttaacgcaataataaataaacacgaaaaatcccaaaatcacgcaaaaaacgccgtacaaacaactaaaaaccatatccaaaaaataaccctacgacaccgccaacgccccgaaaacccacgtaaccgtaaacaaaaacaacgtaaaaacgacgacgcgcaactatacctaaaataaatactcgttctacaacacgaaaacgccgaaaacatcgtatacgaataaaatacctaaccgaatcccacgaccgccctcgaatatcgccaaccgccgctactcctcgaactatatacgcaactcgtacctacg

SEQ ID NO: 18579 - DNA, 670 bp, Artificial Sequence
  chemically treated genomic DNA (Homo sapiens) CpG-island No: 18579
ggtgtcggttaaagtagggcggtttagttttgttttgaaggtattcgtgtaggtgggggtcgtgttcgaaggcgttttttttttgtaggtgtacgtgcgtttcgttcgtcgttagtggttcgtagtgtattttggcgtagtacggggtggtcggtgataggtaattggcgtggttttgcgcggtttgtaggttggttattttgtaggggttcggtgggtgcgcgaagtttcgtggttggtttagtttcggcgagtgtaggtaggcggcgcggtttagcgcggtttcgttggcgttaagtgtagggtgggcgtttttgcggggcgggtagtatgtttattagtattgttatacgtttttacgtttggcgtagtggtggatgagtacgaagagttttagggttacgtagaaggcgtcgtataggtagttgaagattatgtttaggaagtggttttgcgatatcgttagcgtttcgaaggtttacgtggtcgtgaataggaatagcgtgaaggcggcggcgcgtagttgtgtttggaatgagtgttcgttttgtagtacggaggcgtcgggggtatcgtgtgcgggtggggtgtttggtcggattttacggtcgttttcgggtgtcgttagtcgtcgttgtttttcgggttgtgtgcgtagttcgtatttgcg

SEQ ID NO: 18580 - DNA, 670 bp, Artificial Sequence
  chemically treated genomic DNA (Homo sapiens) CpG-island No: 18580
cgcaaatacgaactacgcacacaacccgaaaaacaacgacgactaacgacacccgaaaacgaccgtaaaatccgaccaaacaccccacccgcacacgatacccccgacgcctccgtactacaaaacgaacactcattccaaacacaactacgcgccgccgccttcacgctattcctattcacgaccacgtaaaccttcgaaacgctaacgatatcgcaaaaccacttcctaaacataatcttcaactacctatacgacgccttctacgtaaccctaaaactcttcgtactcatccaccactacgccaaacgtaaaaacgtataacaatactaataaacatactacccgccccgcaaaaacgcccaccctacacttaacgccaacgaaaccgcgctaaaccgcgccgcctacctacactcgccgaaactaaaccaaccacgaaacttcgcgcacccaccgaacccctacaaaataaccaacctacaaaccgcgcaaaaccacgccaattacctatcaccgaccaccccgtactacgccaaaatacactacgaaccactaacgacgaacgaaacgcacgtacacctacaaaaaaaaaacgccttcgaacacgacccccacctacacgaataccttcaaaacaaaactaaaccgccctactttaaccgacacc

SEQ ID NO: 18581 - DNA, 1269 bp, Artificial Sequence
  chemically treated genomic DNA (Homo sapiens) CpG-island No: 18581
ttttcgcgttagtagggtcggttttgtagtgaggtttttgcgtatttaggtggagttcgattcgtagttttcggttgggtcggttttatttgattcgtcggcgcgttaggcgggggcgttgtagggcggggttttcggggtttttcgcggtttagtgcgtattcgcggtttcgcggtcgggaggagcgtagacggcggcgggcgcgggtcggagttcgaggttgcgcgggttcggttatttgggtcggtagcgattgcgtcgcgttttttttttcgtcgtttttttcgaggagtcggcgtcgagtcgagcgggcgggcgcgcgtttttaggtcggagtagcggcgtttcgcgggcggcgaggcggttcgagattttttgttaattttttcgttttcgttcgtttttttcgcggcgttttttttttttcgttcgttttttttttttttgtttagaaagatataaatcgtttttcggagtggcgtttttagtcgcggcggagcgcggcgttggcggcggatggagggcgcgagcgggcggtcgcggaggttgtattcggcggggcgttgatgcggcgtttggattttcgttgcgcgatttcgggggcgtcggtcgagttgggatttcgcgatgtagtttttgaaggcgttttgggtattggtaggggtcgcgttttgttgttttttcgttttagtgatttacgcgtagttttttaaagaaggtaattgttttcgggcgcgcggatcggtttttcgcgttttgttcggttcgcggcggtttcggcgttcgattcggtttttagtacgtttcgttgtcgtcgcgttcggttgaggttcgtggagcgttattgcgggttcggagcggtcggcggcgcgattttattaggagttcgatttttcgcggatttcgttgtttcgcgtttatcggggtttatcggtagggcgcggggtcggggcgcgttgcgttttcggtgtttttggcgtcgtttcggatttttagtttaagtcgaggttgtcgtttttattttttgttttattgggttcggtggtagcggcgttcgttcgtacgtcgtcgggttttcggtagatggtattagcgttttacggtggtcggtcgggttggggcgggagcggagttgggattcgttagggtgggcgtcgggttgggattcgcggacgtcgggaaatcggtttgcgtatttgttttttagggtttaagtcgttttttagagatttataggtttgggaagtaggggtttggttatcggggtg

SEQ ID NO: 18582 - DNA, 1269 bp, Artificial Sequence
  chemically treated genomic DNA (Homo sapiens) CpG-island No: 18582
caccccgataaccaaacccctacttcccaaacctataaatctctaaaaaacgacttaaaccctaaaaaacaaatacgcaaaccgatttcccgacgtccgcgaatcccaacccgacgcccaccctaacgaatcccaactccgctcccgccccaacccgaccgaccaccgtaaaacgctaataccatctaccgaaaacccgacgacgtacgaacgaacgccgctaccaccgaacccaataaaacaaaaaataaaaacgacaacctcgacttaaactaaaaatccgaaacgacgccaaaaacaccgaaaacgcaacgcgccccgaccccgcgccctaccgataaaccccgataaacgcgaaacaacgaaatccgcgaaaaatcgaactcctaataaaatcgcgccgccgaccgctccgaacccgcaataacgctccacgaacctcaaccgaacgcgacgacaacgaaacgtactaaaaaccgaatcgaacgccgaaaccgccgcgaaccgaacaaaacgcgaaaaaccgatccgcgcgcccgaaaacaattaccttctttaaaaaactacgcgtaaatcactaaaacgaaaaaacaacaaaacgcgacccctaccaatacccaaaacgccttcaaaaactacatcgcgaaatcccaactcgaccgacgcccccgaaatcgcgcaacgaaaatccaaacgccgcatcaacgccccgccgaatacaacctccgcgaccgcccgctcgcgccctccatccgccgccaacgccgcgctccgccgcgactaaaaacgccactccgaaaaacgatttatatctttctaaacaaaaaaaaaaaaaacgaacgaaaaaaaaaaaacgccgcgaaaaaaacgaacgaaaacgaaaaaattaacaaaaaatctcgaaccgcctcgccgcccgcgaaacgccgctactccgacctaaaaacgcgcgcccgcccgctcgactcgacgccgactcctcgaaaaaaacgacgaaaaaaaaaacgcgacgcaatcgctaccgacccaaataaccgaacccgcgcaacctcgaactccgacccgcgcccgccgccgtctacgctcctcccgaccgcgaaaccgcgaatacgcactaaaccgcgaaaaaccccgaaaaccccgccctacaacgcccccgcctaacgcgccgacgaatcaaataaaaccgacccaaccgaaaactacgaatcgaactccacctaaatacgcaaaaacctcactacaaaaccgaccctactaacgcgaaaa

SEQ ID NO: 18583 - DNA, 1269 bp, Artificial Sequence
  chemically treated genomic DNA (Homo sapiens) CpG-island No: 18583
tatttcggtgattaagtttttgttttttaaatttatgggtttttggaaggcggtttgggttttggggaataggtgcgtaggtcggtttttcgacgttcgcgggttttagttcggcgtttattttggcgggttttagtttcgttttcgttttagttcggtcggttatcgtggagcgttggtgttatttatcgagggttcggcggcgtgcgggcgggcgtcgttgttatcgagtttagtggggtaggggatgggaacggtagtttcggtttgggttggggattcggggcggcgttagaggtatcgagaacgtagcgcgtttcgatttcgcgttttgtcggtgagtttcgatgggcgcggggtagcgagattcgcggggggtcgggtttttggtagggtcgcgtcgtcggtcgtttcgggttcgtagtggcgttttacgagttttagtcgagcgcggcggtagcggaacgtgttggaagtcgggtcgggcgtcggagtcgtcgcgagtcgggtagagcgcggaggatcggttcgcgcgttcggggataattattttttttgaggaattgcgcgtggattattaggacgaggaagtagtagagcgcggtttttgttagtgtttagagcgtttttaggagttgtatcgcggagttttaattcggtcgacgttttcgaagtcgcgtagcgaaggtttaggcgtcgtattagcgtttcgtcgggtgtagttttcgcggtcgttcgttcgcgttttttattcgtcgttaacgtcgcgtttcgtcgcgattggaggcgttatttcgggaggcgatttgtgtttttttgggtaggggggaggggagcgggcggggggaggggggcgtcgcggagggggcgggcgggggcggggaggttagtagaaagtttcgggtcgtttcgtcgttcgcgggacgtcgttgtttcggtttggaggcgcgcgttcgttcgttcggttcggcgtcggtttttcgggggaggcggcgggagggggagcgcggcgtagtcgttgtcggtttaggtggtcgggttcgcgtagtttcggatttcggttcgcgttcgtcgtcgtttgcgtttttttcggtcgcggagtcgcggatgcgtattgggtcgcgagggatttcggggatttcgttttgtagcgttttcgtttggcgcgtcggcgggttaggtggggtcggtttagtcgaaaattgcgggtcgggttttatttaggtgcgtaggggttttattgtagagtcggttttgttggcgcgggag

SEQ ID NO: 18584 - DNA, 1269 bp, Artificial Sequence
  chemically treated genomic DNA (Homo sapiens) CpG-island No: 18584
ctcccgcgccaacaaaaccgactctacaataaaacccctacgcacctaaataaaacccgacccgcaattttcgactaaaccgaccccacctaacccgccgacgcgccaaacgaaaacgctacaaaacgaaatccccgaaatccctcgcgacccaatacgcatccgcgactccgcgaccgaaaaaaacgcaaacgacgacgaacgcgaaccgaaatccgaaactacgcgaacccgaccacctaaaccgacaacgactacgccgcgctccccctcccgccgcctcccccgaaaaaccgacgccgaaccgaacgaacgaacgcgcgcctccaaaccgaaacaacgacgtcccgcgaacgacgaaacgacccgaaactttctactaacctccccgcccccgcccgccccctccgcgacgcccccctccccccgcccgctcccctcccccctacccaaaaaaacacaaatcgcctcccgaaataacgcctccaatcgcgacgaaacgcgacgttaacgacgaataaaaaacgcgaacgaacgaccgcgaaaactacacccgacgaaacgctaatacgacgcctaaaccttcgctacgcgacttcgaaaacgtcgaccgaattaaaactccgcgatacaactcctaaaaacgctctaaacactaacaaaaaccgcgctctactacttcctcgtcctaataatccacgcgcaattcctcaaaaaaaataattatccccgaacgcgcgaaccgatcctccgcgctctacccgactcgcgacgactccgacgcccgacccgacttccaacacgttccgctaccgccgcgctcgactaaaactcgtaaaacgccactacgaacccgaaacgaccgacgacgcgaccctaccaaaaacccgaccccccgcgaatctcgctaccccgcgcccatcgaaactcaccgacaaaacgcgaaatcgaaacgcgctacgttctcgatacctctaacgccgccccgaatccccaacccaaaccgaaactaccgttcccatcccctaccccactaaactcgataacaacgacgcccgcccgcacgccgccgaaccctcgataaataacaccaacgctccacgataaccgaccgaactaaaacgaaaacgaaactaaaacccgccaaaataaacgccgaactaaaacccgcgaacgtcgaaaaaccgacctacgcacctattccccaaaacccaaaccgccttccaaaaacccataaatttaaaaaacaaaaacttaatcaccgaaata

SEQ ID NO: 18585 - DNA, 1172 bp, Artificial Sequence
  chemically treated genomic DNA (Homo sapiens) CpG-island No: 18585
cgcgcgcgcgcgcgcgcgcgcgcgcgcgcgcgcgcgcgcgcgcgtacgcgcgcgcgcgcgcgcgcgcgcgcgcgcgcgcgcgtacgcgcgcgcgcgcgcgcgcgcgcgcgcgcgcgcgcgcgcgcgcgcgcgcgcgcgcgcgcgcgcgcgcgcgcgcgcgcgcgcgcgcgcgcgcgcgcgcgcgcgcgcgcgcgcgcgtacgcgcgcgcgcgcgcgcgcgcgcgcgcgcgcgcgcgcgcgcgcgcgcgcgcgcgcgcgcgcgcgcgcgcgcgcgcgcgcgcgcgcgcgcgcgcgcgcgcgcgcgcgcgcgcgcgcgcgcgcgcgcgcgcgcgcgcgcgcgcgcgcgcgcgcgcgcgcgcgcgcgcgcgcgcgcgcgcgcgcgcgcgcgcgcgcgcgcgcgcgcgcgcgcgcgcgcgcgcgcgcgcgcgcgcgcgcgcgcgcgcgcgcgcgcgcgcgcgcgcgcgcgcgcgcgcgcgcgcgcgcgcgcgcgcgcgcgcgcgcgcgcgcgcgcgcgcgcgcgcgcgcgcgcgcgcgcgcgcgcgcgcgcgcgcgcgcgcgcgcgcgcgcgcgcgcgcgcgcgcgcgcgcgcgcgcgcgcgcgcgcgcgcgcgcgcgcgcgcgcgcgcgcgcgcgcgcgcgcgcgcgcgcgcgcgcgcgcgcgcgcgcgcgcgcgcgcgcgcgcgcgcgcgcgcgcgcgcgcgcgcgcgcgcgcgcgcgcgcgcgcgcgcgcgcgcgcgcgcgcgcgcgcgcgcgcgcgcgcgcgcgcgcgcgcgcgcgcgcgcgcgcgcgcgcgcgcgcgcgcgcgcgcgcgcgcgcgcgcgcgcgcgcgcgcgcgcgcgcgcgcgcgcgcgcgcgcgcgcgcgcgcgcgcgcgcgcgcgcgcgcgcgcgcgcgcgcgcgcgcgcgcgcgcgcgcgcgcgcgcgcgcgcgcgcgcgcgcgcgcgcgcgcgcgcgcgcgcgcgcgcgcgcgcgcgcgcgcgcgcgcgcgcgcgcgcgcgcgcgcgcgcgcgcgcgcgcgcgcgcgcgcgcgcgcgcgcgcgcgcgcgcgcgcgcgcgcgcgcgcgcgcgcgcgcgcgcgcgcgcgcgcgcgcgcgcgcgcgcgcgcgcgcgcgcgcgcgcgcgcgcgcgcgcgcgcgcgcgcgcgcgcgcgcgcgcgcgcgcgcgcgcgcgcgcg

SEQ ID NO: 18586 - DNA, 1172 bp, Artificial Sequence
  chemically treated genomic DNA (Homo sapiens) CpG-island No: 18586
cgcgcgcgcgcgcgcgcgcgcgcgcgcgcgcgcgcgcgcgcgcgcgcgcgcgcgcgcgcgcgcgcgcgcgcgcgcgcgcgcgcgcgcgcgcgcgcgcgcgcgcgcgcgcgcgcgcgcgcgcgcgcgcgcgcgcgcgcgcgcgcgcgcgcgcgcgcgcgcgcgcgcgcgcgcgcgcgcgcgcgcgcgcgcgcgcgcgcgcgcgcgcgcgcgcgcgcgcgcgcgcgcgcgcgcgcgcgcgcgcgcgcgcgcgcgcgcgcgcgcgcgcgcgcgcgcgcgcgcgcgcgcgcgcgcgcgcgcgcgcgcgcgcgcgcgcgcgcgcgcgcgcgcgcgcgcgcgcgcgcgcgcgcgcgcgcgcgcgcgcgcgcgcgcgcgcgcgcgcgcgcgcgcgcgcgcgcgcgcgcgcgcgcgcgcgcgcgcgcgcgcgcgcgcgcgcgcgcgcgcgcgcgcgcgcgcgcgcgcgcgcgcgcgcgcgcgcgcgcgcgcgcgcgcgcgcgcgcgcgcgcgcgcgcgcgcgcgcgcgcgcgcgcgcgcgcgcgcgcgcgcgcgcgcgcgcgcgcgcgcgcgcgcgcgcgcgcgcgcgcgcgcgcgcgcgcgcgcgcgcgcgcgcgcgcgcgcgcgcgcgcgcgcgcgcgcgcgcgcgcgcgcgcgcgcgcgcgcgcgcgcgcgcgcgcgcgcgcgcgcgcgcgcgcgcgcgcgcgcgcgcgcgcgcgcgcgcgcgcgcgcgcgcgcgcgcgcgcgcgcgcgcgcgcgcgcgcgcgcgcgcgcgcgcgcgcgcgcgcgcgcgcgcgcgcgcgcgcgcgcgcgcgcgcgcgcgcgcgcgcgcgcgcgcgcgcgcgcgcgcgcgcgcgcgcgcgcgcgcgcgcgcgcgcgcgcgcgcgcgcgcgcgcgcgcgcgcgcgcgcgcgcgcgcgcgcgcgcgcgcgcgcgcgcgcgcgcgcgcgcgcgcgcgcgcgcgcgcgcgcgcgcgcgcgcgtacgcgcgcgcgcgcgcgcgcgcgcgcgcgcgcgcgcgcgcgcgcgcgcgcgcgcgcgcgcgcgcgcgcgcgcgcgcgcgcgcgcgcgcgcgcgcgcgcgcgcgcgcgcgcgcgcgtacgcgcgcgcgcgcgcgcgcgcgcgcgcgcgcgcgcgtacgcgcgcgcgcgcgcgcgcgcgcgcgcgcgcgcgcgcgcgcgcg

SEQ ID NO: 18587 - DNA, 1172 bp, Artificial Sequence
  chemically treated genomic DNA (Homo sapiens) CpG-island No: 18587
cgcgcgcgcgcgcgcgcgcgcgcgcgcgcgcgcgcgcgcgcgcgcgcgcgcgcgcgcgcgcgcgcgcgcgcgcgcgcgcgcgcgcgcgcgcgcgcgcgcgcgcgcgcgcgcgcgcgcgcgcgcgcgcgcgcgcgcgcgcgcgcgcgcgcgcgcgcgcgcgcgcgcgcgcgcgcgcgcgcgcgcgcgcgcgcgcgcgcgcgcgcgcgcgcgcgcgcgcgcgcgcgcgcgcgcgcgcgcgcgcgcgcgcgcgcgcgcgcgcgcgcgcgcgcgcgcgcgcgcgcgcgcgcgcgcgcgcgcgcgcgcgcgcgcgcgcgcgcgcgcgcgcgcgcgcgcgcgcgcgcgcgcgcgcgcgcgcgcgcgcgcgcgcgcgcgcgcgcgcgcgcgcgcgcgcgcgcgcgcgcgcgcgcgcgcgcgcgcgcgcgcgcgcgcgcgcgcgcgcgcgcgcgcgcgcgcgcgcgcgcgcgcgcgcgcgcgcgcgcgcgcgcgcgcgcgcgcgcgcgcgcgcgcgcgcgcgcgcgcgcgcgcgcgcgcgcgcgcgcgcgcgcgcgcgcgcgcgcgcgcgcgcgcgcgcgcgcgcgcgcgcgcgcgcgcgcgcgcgcgcgcgcgcgcgcgcgcgcgcgcgcgcgcgcgcgcgcgcgcgcgcgcgcgcgcgcgcgcgcgcgcgcgcgcgcgcgcgcgcgcgcgcgcgcgcgcgcgcgcgcgcgcgcgcgcgcgcgcgcgcgcgcgcgcgcgcgcgcgcgcgcgcgcgcgcgcgcgcgcgcgcgcgcgcgcgcgcgcgcgcgcgcgcgcgcgcgcgcgcgcgcgcgcgcgcgcgcgcgcgcgcgcgcgcgcgcgcgcgcgcgcgcgcgcgcgcgcgcgcgcgcgcgcgcgcgcgcgcgcgcgcgcgcgcgcgcgcgcgcgcgcgcgcgcgcgcgcgcgcgcgcgcgcgcgcgcgcgcgcgcgcgcgcgcgcgcgcgcgcgcgcgcgcgcgcgtgcgcgcgcgcgcgcgcgcgcgcgcgcgcgcgcgcgcgcgcgcgcgcgcgcgcgcgcgcgcgcgcgcgcgcgcgcgcgcgcgcgcgcgcgcgcgcgcgcgcgcgcgcgcgcgcgcgtgcgcgcgcgcgcgcgcgcgcgcgcgcgcgcgcgcgcgtgcgcgcgcgcgcgcgcgcgcgcgcgcgcgcgcgcgcgcgcgcgcg

SEQ ID NO: 18588 - DNA, 1172 bp, Artificial Sequence
  chemically treated genomic DNA (Homo sapiens) CpG-island No: 18588
cgcgcgcgcgcgcgcgcgcgcgcgcgcgcgcgcgcgcgcgcgcgcacgcgcgcgcgcgcgcgcgcgcgcgcgcgcgcgcgcgcacgcgcgcgcgcgcgcgcgcgcgcgcgcgcgcgcgcgcgcgcgcgcgcgcgcgcgcgcgcgcgcgcgcgcgcgcgcgcgcgcgcgcgcgcgcgcgcgcgcgcgcgcgcgcgcgcgcacgcgcgcgcgcgcgcgcgcgcgcgcgcgcgcgcgcgcgcgcgcgcgcgcgcgcgcgcgcgcgcgcgcgcgcgcgcgcgcgcgcgcgcgcgcgcgcgcgcgcgcgcgcgcgcgcgcgcgcgcgcgcgcgcgcgcgcgcgcgcgcgcgcgcgcgcgcgcgcgcgcgcgcgcgcgcgcgcgcgcgcgcgcgcgcgcgcgcgcgcgcgcgcgcgcgcgcgcgcgcgcgcgcgcgcgcgcgcgcgcgcgcgcgcgcgcgcgcgcgcgcgcgcgcgcgcgcgcgcgcgcgcgcgcgcgcgcgcgcgcgcgcgcgcgcgcgcgcgcgcgcgcgcgcgcgcgcgcgcgcgcgcgcgcgcgcgcgcgcgcgcgcgcgcgcgcgcgcgcgcgcgcgcgcgcgcgcgcgcgcgcgcgcgcgcgcgcgcgcgcgcgcgcgcgcgcgcgcgcgcgcgcgcgcgcgcgcgcgcgcgcgcgcgcgcgcgcgcgcgcgcgcgcgcgcgcgcgcgcgcgcgcgcgcgcgcgcgcgcgcgcgcgcgcgcgcgcgcgcgcgcgcgcgcgcgcgcgcgcgcgcgcgcgcgcgcgcgcgcgcgcgcgcgcgcgcgcgcgcgcgcgcgcgcgcgcgcgcgcgcgcgcgcgcgcgcgcgcgcgcgcgcgcgcgcgcgcgcgcgcgcgcgcgcgcgcgcgcgcgcgcgcgcgcgcgcgcgcgcgcgcgcgcgcgcgcgcgcgcgcgcgcgcgcgcgcgcgcgcgcgcgcgcgcgcgcgcgcgcgcgcgcgcgcgcgcgcgcgcgcgcgcgcgcgcgcgcgcgcgcgcgcgcgcgcgcgcgcgcgcgcgcgcgcgcgcgcgcgcgcgcgcgcgcgcgcgcgcgcgcgcgcgcgcgcgcgcgcgcgcgcgcgcgcgcgcgcgcgcgcgcgcgcgcgcgcgcgcgcgcgcgcgcgcgcgcgcgcgcgcgcgcgcgcgcgcgcgcgcgcgcgcgcgcgcg

SEQ ID NO: 18589 - DNA, 1066 bp, Artificial Sequence
  chemically treated genomic DNA (Homo sapiens) CpG-island No: 18589
tttatagcggaagtttttgtcgtagttcgtatatttgtgcggtttgttgttcgtgtggatgcggcggtggcggattaggtgggagttttggataaagtttttgtcgtattcgatgtacgtgtagggtttttcgttcgtgtgcgtgcgttggtgttgcgtgagcgtggagaagtcgttgaagcgtttttcgtattggttatagcggaagggtttttcgtcggtgtgtacgcgtaggtggtttattaggtgcgagttacgttcgaagtttttttcgtattcgcggtatacgtagggtcgtttattcgagtgcgtgcgtttgtgcgtgaagaggtgcgagttgacgttgaaggtttcgtcgtattcggagtatatgtagggtttttcgttcgtgtgtacgcgttggtgttttattaagttcgagcgttagttgaagcgtttgtcgtattcgttatagtcgtgcggtttttcgttcgtgtggatgcgttggtggttggttaggtgcgaacggcgtacgaagtttttgtcgtatttttcgtaggcgaagggtcgtagcgtcgtcgttttcgcgtcgttggtcgtcgcgtgcgcgcgtcggtggtttaatagatgcgagttgaggttgaaggtttcgtcgtattcggggtacgggtagggtttttcgttcgtgtgtaggcgtcggtgtttgagtaggtcggcgcgttagttgaagtttttgtcgtagtcggcgtataggttgggtcgttcgttcgtgtgtaggcgtaggtggttggttaggtaggtgttgcggttgaagtttttgtcgtatttttcgtagcggaagggtttttcgcggcgggtcgggttagcgggggttcggtttcgaagtttttcgttatatttatttttattatgtttattatcgcgtcgtattcgttcgttaggtcgaagggttttaggttggcggcggtagcggttttagttaggcggtgaatgcgttggtgttgtaggaaggcggcgttaggattgaagtttttttcgtagtcggggtagatggtgggcgcgtttatgatgttggttattaggttat

SEQ ID NO: 18590 - DNA, 1066 bp, Artificial Sequence
  chemically treated genomic DNA (Homo sapiens) CpG-island No: 18590
ataacctaataaccaacatcataaacgcgcccaccatctaccccgactacgaaaaaaacttcaatcctaacgccgccttcctacaacaccaacgcattcaccgcctaactaaaaccgctaccgccgccaacctaaaacccttcgacctaacgaacgaatacgacgcgataataaacataataaaaataaatataacgaaaaacttcgaaaccgaacccccgctaacccgacccgccgcgaaaaacccttccgctacgaaaaatacgacaaaaacttcaaccgcaacacctacctaaccaaccacctacgcctacacacgaacgaacgacccaacctatacgccgactacgacaaaaacttcaactaacgcgccgacctactcaaacaccgacgcctacacacgaacgaaaaaccctacccgtaccccgaatacgacgaaaccttcaacctcaactcgcatctattaaaccaccgacgcgcgcacgcgacgaccaacgacgcgaaaacgacgacgctacgacccttcgcctacgaaaaatacgacaaaaacttcgtacgccgttcgcacctaaccaaccaccaacgcatccacacgaacgaaaaaccgcacgactataacgaatacgacaaacgcttcaactaacgctcgaacttaataaaacaccaacgcgtacacacgaacgaaaaaccctacatatactccgaatacgacgaaaccttcaacgtcaactcgcacctcttcacgcacaaacgcacgcactcgaataaacgaccctacgtataccgcgaatacgaaaaaaacttcgaacgtaactcgcacctaataaaccacctacgcgtacacaccgacgaaaaacccttccgctataaccaatacgaaaaacgcttcaacgacttctccacgctcacgcaacaccaacgcacgcacacgaacgaaaaaccctacacgtacatcgaatacgacaaaaactttatccaaaactcccacctaatccgccaccgccgcatccacacgaacaacaaaccgcacaaatatacgaactacgacaaaaacttccgctataaa

SEQ ID NO: 18591 - DNA, 1066 bp, Artificial Sequence
  chemically treated genomic DNA (Homo sapiens) CpG-island No: 18591
atagtttggtggttagtattatggacgcgtttattatttgtttcgattgcggggagagttttagttttggcgtcgtttttttgtagtattagcgtatttatcgtttggttgaggtcgttgtcgtcgttagtttggagtttttcggtttggcgggcgagtgcgacgcgatggtgggtatgatgggggtgggtgtggcggggggtttcggggtcgggttttcgttggttcggttcgtcgcgaaaagttttttcgttgcggggagtgcggtaagggttttagtcgtaatatttatttgattaattatttgcgtttgtatacgggcgagcggtttaatttgtgcgtcgattgcggtaagagttttagttggcgcgtcgatttgtttaagtatcggcgtttgtatacgggcgagaagttttattcgtgtttcgagtgcggcgaggtttttagttttagttcgtatttgttgagttatcggcgcgcgtacgcggcggttagcggcgcgggggcggcggcgttgcggtttttcgtttgcggggagtgcggtaagggtttcgtgcgtcgttcgtatttggttaattattagcgtatttatacgggcgagaagtcgtacggttgtggcgagtgcggtaagcgttttagttggcgttcggatttggtgaagtattagcgcgtgtatacgggcgagaagttttatatgtgtttcgagtgcggcgagatttttagcgttagttcgtatttttttacgtataagcgtacgtattcgggtgagcggttttacgtgtgtcgcgagtgcgggaagggtttcgggcgtaattcgtatttggtgaattatttgcgcgtgtatatcggcgagaagttttttcgttgtggttagtgcgagaagcgttttagcgatttttttacgtttacgtagtattagcgtacgtatacgggcgagaagttttatacgtgtatcgagtgcggtaagagttttatttagagtttttatttgattcgttatcgtcgtatttatacgggtaataagtcgtataagtgtgcgggttgcggtaaaggttttcgttataaa

SEQ ID NO: 18592 - DNA, 1066 bp, Artificial Sequence
  chemically treated genomic DNA (Homo sapiens) CpG-island No: 18592
tttataacgaaaacctttaccgcaacccgcacacttatacgacttattacccgtataaatacgacgataacgaatcaaataaaaactctaaataaaactcttaccgcactcgatacacgtataaaacttctcgcccgtatacgtacgctaatactacgtaaacgtaaaaaaatcgctaaaacgcttctcgcactaaccacaacgaaaaaacttctcgccgatatacacgcgcaaataattcaccaaatacgaattacgcccgaaacccttcccgcactcgcgacacacgtaaaaccgctcacccgaatacgtacgcttatacgtaaaaaaatacgaactaacgctaaaaatctcgccgcactcgaaacacatataaaacttctcgcccgtatacacgcgctaatacttcaccaaatccgaacgccaactaaaacgcttaccgcactcgccacaaccgtacgacttctcgcccgtataaatacgctaataattaaccaaatacgaacgacgcacgaaacccttaccgcactccccgcaaacgaaaaaccgcaacgccgccgcccccgcgccgctaaccgccgcgtacgcgcgccgataactcaacaaatacgaactaaaactaaaaacctcgccgcactcgaaacacgaataaaacttctcgcccgtatacaaacgccgatacttaaacaaatcgacgcgccaactaaaactcttaccgcaatcgacgcacaaattaaaccgctcgcccgtatacaaacgcaaataattaatcaaataaatattacgactaaaacccttaccgcactccccgcaacgaaaaaacttttcgcgacgaaccgaaccaacgaaaacccgaccccgaaaccccccgccacacccacccccatcatacccaccatcgcgtcgcactcgcccgccaaaccgaaaaactccaaactaacgacgacaacgacctcaaccaaacgataaatacgctaatactacaaaaaaacgacgccaaaactaaaactctccccgcaatcgaaacaaataataaacgcgtccataatactaaccaccaaactat

SEQ ID NO: 18593 - DNA, 548 bp, Artificial Sequence
  chemically treated genomic DNA (Homo sapiens) CpG-island No: 18593
agttggcgaggttcgtagcgaaaatttaaagtagtcgagttcggagagcgtcgttttagcgggcgagggcgtagttcggggaatgtacggaggttcgtttagttagtcggggcgcgttttttggaggaggaggagaaggatttgcggtcggagttatcgggataaatgtaggaggcggggtagttagcgggcgtggttttgcggaggttttcggtcgaaaggaggagataggggtcggtcgcgtatttaaagcggacgcgggggaagttttttcggtgtttgttttagtcgtatagttcggtgggttcgtggcgtagtcgaacgtttttttagaagtttttcggtttcgtttagtttttaaattcgcgacgttgggtttgttgggttcggcgcgtataggttcgaaggagtcgggtttattcggtttggtttagtagttgcgggcggcggggagtagtttagttcggttggagtagtttttcgtaggtgagggcgcggggcgggcggacgggttttagttttcggtagttttgtttatcgcgttcggg

SEQ ID NO: 18594 - DNA, 548 bp, Artificial Sequence
  chemically treated genomic DNA (Homo sapiens) CpG-island No: 18594
cccgaacgcgataaacaaaactaccgaaaactaaaacccgtccgcccgccccgcgccctcacctacgaaaaactactccaaccgaactaaactactccccgccgcccgcaactactaaaccaaaccgaataaacccgactccttcgaacctatacgcgccgaacccaacaaacccaacgtcgcgaatttaaaaactaaacgaaaccgaaaaacttctaaaaaaacgttcgactacgccacgaacccaccgaactatacgactaaaacaaacaccgaaaaaacttcccccgcgtccgctttaaatacgcgaccgacccctatctcctcctttcgaccgaaaacctccgcaaaaccacgcccgctaactaccccgcctcctacatttatcccgataactccgaccgcaaatccttctcctcctcctccaaaaaacgcgccccgactaactaaacgaacctccgtacattccccgaactacgccctcgcccgctaaaacgacgctctccgaactcgactactttaaattttcgctacgaacctcgccaact

SEQ ID NO: 18595 - DNA, 548 bp, Artificial Sequence
  chemically treated genomic DNA (Homo sapiens) CpG-island No: 18595
ttcgggcgcggtaggtagagttgtcgagggttgggattcgttcgttcgtttcgcgtttttatttgcgggaggttgttttagtcgggttgggttgtttttcgtcgttcgtagttgttgggttaaatcgagtagattcggttttttcgagtttgtgcgcgtcggatttagtagatttagcgtcgcgagtttaggggttggacggggtcggggagtttttgggaaaacgttcgattgcgttacgagtttatcgagttgtgcgattgaggtagatatcgggagggtttttttcgcgttcgttttaagtacgcggtcggtttttgtttttttttttcgatcggggattttcgtagggttacgttcgttggttgtttcgttttttgtatttatttcggtagtttcggtcgtaagttttttttttttttttttaggaagcgcgtttcgattgattagacggattttcgtgtatttttcgggttacgttttcgttcgttgagacggcgtttttcgagttcggttgttttgggttttcgttgcgagtttcgttaatt

SEQ ID NO: 18596 - DNA, 548 bp, Artificial Sequence
  chemically treated genomic DNA (Homo sapiens) CpG-island No: 18596
aattaacgaaactcgcaacgaaaacccaaaacaaccgaactcgaaaaacgccgtctcaacgaacgaaaacgtaacccgaaaaatacacgaaaatccgtctaatcaatcgaaacgcgcttcctaaaaaaaaaaaaaaaaaacttacgaccgaaactaccgaaataaatacaaaaaacgaaacaaccaacgaacgtaaccctacgaaaatccccgatcgaaaaaaaaaaacaaaaaccgaccgcgtacttaaaacgaacgcgaaaaaaaccctcccgatatctacctcaatcgcacaactcgataaactcgtaacgcaatcgaacgttttcccaaaaactccccgaccccgtccaacccctaaactcgcgacgctaaatctactaaatccgacgcgcacaaactcgaaaaaaccgaatctactcgatttaacccaacaactacgaacgacgaaaaacaacccaacccgactaaaacaacctcccgcaaataaaaacgcgaaacgaacgaacgaatcccaaccctcgacaactctacctaccgcgcccgaa

SEQ ID NO: 18597 - DNA, 594 bp, Artificial Sequence
  chemically treated genomic DNA (Homo sapiens) CpG-island No: 18597
tcgtagcgcgtcggtttcgagtagggtttttagcgtcggcgcgtatgggtcgttcgtaggggtttcggttaaggttatgacgtttacggttcgcgcggttcgggtgataggcggcggcggcggcgcgggtttatggcggtaggtttcggcgagggttcgatttcgtttcgttttcggtcgtcgttgtttgtaaagtttcggttatttttacgcgttaaattttttttgtcgcgaaagagttacgagtcgtcgagcgtcgttataattggttgtttcggtcgtgacgggaataacggcggcggtttttattggttttaacgcgtcggattcggcggcgaggggcgggatggggcggcggcgcggggcggtacggttaatggcggggcggggcgcgcgtaggttttgttcggatggtattaggcgcggtttgatttttcgtttttagttcgggcgttttttgttggaggcgtggggatatcggaatataggtttcgtttcgtttcgacgttttcgtattttattgatttttttatagtgtaggtttagaatagagttttttttttgtacgtgatttttaatttgtagtttttaata

SEQ ID NO: 18598 - DNA, 594 bp, Artificial Sequence
  chemically treated genomic DNA (Homo sapiens) CpG-island No: 18598
tattaaaaactacaaattaaaaatcacgtacaaaaaaaaaactctattctaaacctacactataaaaaaatcaataaaatacgaaaacgtcgaaacgaaacgaaacctatattccgatatccccacgcctccaacaaaaaacgcccgaactaaaaacgaaaaatcaaaccgcgcctaataccatccgaacaaaacctacgcgcgccccgccccgccattaaccgtaccgccccgcgccgccgccccatcccgcccctcgccgccgaatccgacgcgttaaaaccaataaaaaccgccgccgttattcccgtcacgaccgaaacaaccaattataacgacgctcgacgactcgtaactctttcgcgacaaaaaaaatttaacgcgtaaaaataaccgaaactttacaaacaacgacgaccgaaaacgaaacgaaatcgaaccctcgccgaaacctaccgccataaacccgcgccgccgccgccgcctatcacccgaaccgcgcgaaccgtaaacgtcataaccttaaccgaaacccctacgaacgacccatacgcgccgacgctaaaaaccctactcgaaaccgacgcgctacga

SEQ ID NO: 18599 - DNA, 594 bp, Artificial Sequence
  chemically treated genomic DNA (Homo sapiens) CpG-island No: 18599
tgttgggggttataggttgagggttacgtgtagaagagaggttttgttttgaatttgtattatagaaaggttagtgggatgcgggagcgtcggggcggggcggggtttatgtttcggtgtttttacgtttttagtaggggacgttcgggttgggggcggggagttagatcgcgtttggtattattcggataaagtttgcgcgcgtttcgtttcgttattggtcgtatcgtttcgcgtcgtcgttttatttcgtttttcgtcgtcgggttcggcgcgttaaagttaataggaatcgtcgtcgttgttttcgttacggtcggggtagttaattgtggcggcgttcggcggttcgtggttttttcgcggtaaaaaggatttggcgcgtaaaagtggtcgggattttgtaggtagcggcggtcgggggcggagcgggatcgagttttcgtcgaggtttgtcgttatgggttcgcgtcgtcgtcgtcgtttgttattcgggtcgcgcgggtcgtgagcgttatggttttggtcggggtttttgcgggcggtttatgcgcgtcggcgttggaggttttgttcggggtcggcgcgttgcgg

SEQ ID NO: 18600 - DNA, 594 bp, Artificial Sequence
  chemically treated genomic DNA (Homo sapiens) CpG-island No: 18600
ccgcaacgcgccgaccccgaacaaaacctccaacgccgacgcgcataaaccgcccgcaaaaaccccgaccaaaaccataacgctcacgacccgcgcgacccgaataacaaacgacgacgacgacgcgaacccataacgacaaacctcgacgaaaactcgatcccgctccgcccccgaccgccgctacctacaaaatcccgaccacttttacgcgccaaatcctttttaccgcgaaaaaaccacgaaccgccgaacgccgccacaattaactaccccgaccgtaacgaaaacaacgacgacgattcctattaactttaacgcgccgaacccgacgacgaaaaacgaaataaaacgacgacgcgaaacgatacgaccaataacgaaacgaaacgcgcgcaaactttatccgaataataccaaacgcgatctaactccccgcccccaacccgaacgtcccctactaaaaacgtaaaaacaccgaaacataaaccccgccccgccccgacgctcccgcatcccactaacctttctataatacaaattcaaaacaaaacctctcttctacacgtaaccctcaacctataacccccaaca

SEQ ID NO: 18601 - DNA, 704 bp, Artificial Sequence
  chemically treated genomic DNA (Homo sapiens) CpG-island No: 18601
cgtttagtcggaaggtggtttggtgttacgagtgattcgcgtagatgggcgtggcgtggtatacgttcgcgttcgtttttacggttagttcgttgaacgcgtcggtggagtagagcgttagtaacgcggtgttagttatgtggtacgcgggtattgttagggtttcgaatagtagtttcgttattttttcgcggttcgcgggcggcgttaacggcgagtcgtttattagtacgggttattgttttgggtatattcgtaggtcgtttattagtaggcgtttttatagtttttttagcgttttttagttcgttattacgtcgtgtttgatggggtgcgttcgcgttacgtcgttcgttagttcgtagttcggcgtttcgggtagtatcggtcggttttagttgggtattaagttagagttttttagtattatgcgcggttggttttcgttcgcgaagttcgttttggtgaagttcgagttttggtttattattatcgcgatgcggtttagggaggacggtcggtgtacgcggcggtttttcgatatcgacgttattttcgggttcggtttagtcgcggggttgaaggtttcgttttttcgcgttattcggtttcgtcggttcgatatttttcggtttttgttttagggagtagttttttttagtttttggttttgttttcggagtttaagtttttttttttttgga

SEQ ID NO: 18602 - DNA, 704 bp, Artificial Sequence
  chemically treated genomic DNA (Homo sapiens) CpG-island No: 18602
tccaaaaaaaaaaaaacttaaactccgaaaacaaaaccaaaaactaaaaaaaactactccctaaaacaaaaaccgaaaaatatcgaaccgacgaaaccgaataacgcgaaaaaacgaaaccttcaaccccgcgactaaaccgaacccgaaaataacgtcgatatcgaaaaaccgccgcgtacaccgaccgtcctccctaaaccgcatcgcgataataataaaccaaaactcgaacttcaccaaaacgaacttcgcgaacgaaaaccaaccgcgcataatactaaaaaactctaacttaatacccaactaaaaccgaccgatactacccgaaacgccgaactacgaactaacgaacgacgtaacgcgaacgcaccccatcaaacacgacgtaataacgaactaaaaaacgctaaaaaaactataaaaacgcctactaataaacgacctacgaatatacccaaaacaataacccgtactaataaacgactcgccgttaacgccgcccgcgaaccgcgaaaaaataacgaaactactattcgaaaccctaacaatacccgcgtaccacataactaacaccgcgttactaacgctctactccaccgacgcgttcaacgaactaaccgtaaaaacgaacgcgaacgtataccacgccacgcccatctacgcgaatcactcgtaacaccaaaccaccttccgactaaacg

SEQ ID NO: 18603 - DNA, 704 bp, Artificial Sequence
  chemically treated genomic DNA (Homo sapiens) CpG-island No: 18603
tttagaagaggaagaatttaggtttcggaggtagagttaaaggttgaaggggattattttttaggatagaggtcgggaggtatcgggtcgacgaagtcgagtggcgcggaggagcggagtttttagtttcgcggttgggtcgagttcgaaggtggcgtcggtgtcggggagtcgtcgcgtgtatcggtcgttttttttgggtcgtatcgcggtggtggtggattagggttcgggttttattaaggcgggtttcgcgggcgagaattagtcgcgtatagtgttgaagagttttagtttggtgtttagttgggatcggtcggtgttgttcggagcgtcgggttgcgagttggcgggcggcgtggcgcgggcgtattttattaagtacggcgtggtggcggattgggaggcgttggaagggttgtgggagcgtttgttggtgggcggtttgcgggtgtgtttagagtagtggttcgtgttggtgagcgattcgtcgttggcgtcgttcgcgggtcgcgaaagggtggcggagttgttgttcgagattttggtagtgttcgcgtgttatatggttagtatcgcgttgttggcgttttgttttatcggcgcgtttagcgggttggtcgtggaggcgggcgcgggcgtgtgttacgttacgtttatttacgcgggttattcgtggtattaggttatttttcgattgaacg

SEQ ID NO: 18604 - DNA, 704 bp, Artificial Sequence
  chemically treated genomic DNA (Homo sapiens) CpG-island No: 18604
cgttcaatcgaaaaataacctaataccacgaataacccgcgtaaataaacgtaacgtaacacacgcccgcgcccgcctccacgaccaacccgctaaacgcgccgataaaacaaaacgccaacaacgcgatactaaccatataacacgcgaacactaccaaaatctcgaacaacaactccgccaccctttcgcgacccgcgaacgacgccaacgacgaatcgctcaccaacacgaaccactactctaaacacacccgcaaaccgcccaccaacaaacgctcccacaacccttccaacgcctcccaatccgccaccacgccgtacttaataaaatacgcccgcgccacgccgcccgccaactcgcaacccgacgctccgaacaacaccgaccgatcccaactaaacaccaaactaaaactcttcaacactatacgcgactaattctcgcccgcgaaacccgccttaataaaacccgaaccctaatccaccaccaccgcgatacgacccaaaaaaaacgaccgatacacgcgacgactccccgacaccgacgccaccttcgaactcgacccaaccgcgaaactaaaaactccgctcctccgcgccactcgacttcgtcgacccgatacctcccgacctctatcctaaaaaataatccccttcaacctttaactctacctccgaaacctaaattcttcctcttctaaa

SEQ ID NO: 18605 - DNA, 588 bp, Artificial Sequence
  chemically treated genomic DNA (Homo sapiens) CpG-island No: 18605
ttcgatttcgcgtttagacgttttcgatagggttcgtaggcgttagggttgttacgtattttttattgggcggggttcgggttaagcgtttaaagttgcgggcgagggtagcggtatcgtttgcgcggttgtttttcggcggggtcggtttcgcggggagtttttttcggggatcggaagcgcgagagtagtcgcggttagtttagagttgttttggtttcgttttttttcggtcgtcgcgttttttgtcgtcgtagtagtagtagtatcggtattttcggttcgcgttcgttattttcgttcgtttcgcgtaatttgggtgtcgtcggggagtttagtttagcgtcggacgcgtagttaattcgttgtttagcgttggttagcggttgtcgtttgtttagggggagaattagtacgattttggtttgggggtggaataggggcgtgaggcgggagagcgcgttagggtcgagtttacgattcggggtcgtttcgcgttttttttgggattttcgtttattcgggttttgtcgtttattcgggttttgttattttttcgtgtatagggttggaggggatttttgttta

SEQ ID NO: 18606 - DNA, 588 bp, Artificial Sequence
  chemically treated genomic DNA (Homo sapiens) CpG-island No: 18606
taaacaaaaatcccctccaaccctatacacgaaaaaataacaaaacccgaataaacgacaaaacccgaataaacgaaaatcccaaaaaaaacgcgaaacgaccccgaatcgtaaactcgaccctaacgcgctctcccgcctcacgcccctattccacccccaaaccaaaatcgtactaattctccccctaaacaaacgacaaccgctaaccaacgctaaacaacgaattaactacgcgtccgacgctaaactaaactccccgacgacacccaaattacgcgaaacgaacgaaaataacgaacgcgaaccgaaaataccgatactactactactacgacgacaaaaaacgcgacgaccgaaaaaaaacgaaaccaaaacaactctaaactaaccgcgactactctcgcgcttccgatccccgaaaaaaactccccgcgaaaccgaccccgccgaaaaacaaccgcgcaaacgataccgctaccctcgcccgcaactttaaacgcttaacccgaaccccgcccaataaaaaatacgtaacaaccctaacgcctacgaaccctatcgaaaacgtctaaacgcgaaatcgaa

SEQ ID NO: 18607 - DNA, 588 bp, Artificial Sequence
  chemically treated genomic DNA (Homo sapiens) CpG-island No: 18607
tggataggggttttttttagttttgtgtacgagaggatgataggattcgggtggacgataggattcgggtggacgagggttttaggagaagcgcggagcggtttcgggtcgtgggttcggttttagcgcgttttttcgttttacgtttttgttttatttttagattaggatcgtgttgattttttttttggataagcggtagtcgttggttaacgttgggtaacggattgattacgcgttcggcgttgggttgggtttttcggcggtatttagattgcgcggagcgggcgaaggtagcgagcgcgagtcgaggatgtcggtattgttgttgttgcggcggtaagaggcgcggcggtcggaagagggcggggttagggtagttttgagttggtcgcggttgttttcgcgttttcggttttcggggaaggtttttcgcgaagtcggtttcgtcgaggagtagtcgcgtaaacggtgtcgttgttttcgttcgtagttttaaacgtttggttcggatttcgtttaataaagagtgcgtggtaattttggcgtttgcgaattttgtcggaggcgtttgggcgcggagtcggg

SEQ ID NO: 18608 - DNA, 588 bp, Artificial Sequence
  chemically treated genomic DNA (Homo sapiens) CpG-island No: 18608
cccgactccgcgcccaaacgcctccgacaaaattcgcaaacgccaaaattaccacgcactctttattaaacgaaatccgaaccaaacgtttaaaactacgaacgaaaacaacgacaccgtttacgcgactactcctcgacgaaaccgacttcgcgaaaaaccttccccgaaaaccgaaaacgcgaaaacaaccgcgaccaactcaaaactaccctaaccccgccctcttccgaccgccgcgcctcttaccgccgcaacaacaacaataccgacatcctcgactcgcgctcgctaccttcgcccgctccgcgcaatctaaataccgccgaaaaacccaacccaacgccgaacgcgtaatcaatccgttacccaacgttaaccaacgactaccgcttatccaaaaaaaaaatcaacacgatcctaatctaaaaataaaacaaaaacgtaaaacgaaaaaacgcgctaaaaccgaacccacgacccgaaaccgctccgcgcttctcctaaaaccctcgtccacccgaatcctatcgtccacccgaatcctatcatcctctcgtacacaaaactaaaaaaaacccctatcca

SEQ ID NO: 18609 - DNA, 744 bp, Artificial Sequence
  chemically treated genomic DNA (Homo sapiens) CpG-island No: 18609
tacggcgggtttttggtattatattgtggtcgtatgtgtatattgtagttttcgttcgtatttgggggtcgtagtcgttagcgttcggggatttagttgcggcgaaagttgtcgggcgcgcgtttcgtcgtagtttcgcgttttcgttaaaatttagtgagaaattatttgtatttttggagtttgtaggagcgagaaatgagttgtaggagtcggtgggtagtaacggcggtaggcggatggaagagagtaaggggtcgtcgttcgtgttttattcgttcgagttaaggggcggttttttaaaattttaacgttattgttttttcggggtcggtaggtgtgaaaattcggcggtagaatggaagttcggtagtttgcgagggttcgcggtttttttaggcgcgtagttgagtttttttaatttcgtttcgggttcgtttgttttcgggtttcggcgcggcgttatttggcggtcgtttgtggaggttgtagttgtcgttaagttacggggatgttgtcggttttaggtgttttcggtcgagttttcgcggagaggaggattggtagattataggaaacgggaggacggcgttgggtttttagtaggcgttttagttttttggtttgtcgtaagagtagtcggaggcggcggcggtagggagggagcgggtggggagtgggagaggtcgttcgttttttcgtttagttcggaggattttttagttggtttttttatcgttaaaa

SEQ ID NO: 18610 - DNA, 744 bp, Artificial Sequence
  chemically treated genomic DNA (Homo sapiens) CpG-island No: 18610
ttttaacgataaaaaaaccaactaaaaaatcctccgaactaaacgaaaaaacgaacgacctctcccactccccacccgctccctccctaccgccgccgcctccgactactcttacgacaaaccaaaaaactaaaacgcctactaaaaacccaacgccgtcctcccgtttcctataatctaccaatcctcctctccgcgaaaactcgaccgaaaacacctaaaaccgacaacatccccgtaacttaacgacaactacaacctccacaaacgaccgccaaataacgccgcgccgaaacccgaaaacaaacgaacccgaaacgaaattaaaaaaactcaactacgcgcctaaaaaaaccgcgaaccctcgcaaactaccgaacttccattctaccgccgaattttcacacctaccgaccccgaaaaaacaataacgttaaaattttaaaaaaccgccccttaactcgaacgaataaaacacgaacgacgaccccttactctcttccatccgcctaccgccgttactacccaccgactcctacaactcatttctcgctcctacaaactccaaaaatacaaataatttctcactaaattttaacgaaaacgcgaaactacgacgaaacgcgcgcccgacaactttcgccgcaactaaatccccgaacgctaacgactacgacccccaaatacgaacgaaaactacaatatacacatacgaccacaatataataccaaaaacccgccgta

SEQ ID NO: 18611 - DNA, 744 bp, Artificial Sequence
  chemically treated genomic DNA (Homo sapiens) CpG-island No: 18611
ttttgacggtgagggaattagttgggaggtttttcgagttggacggggaggcgggcggttttttttattttttattcgttttttttttgtcgtcgtcgttttcggttgtttttgcgataagttaagaagttggggcgtttgttgggagtttagcgtcgttttttcgttttttgtgatttattagttttttttttcgcggaggttcggtcgggggtatttgaggtcggtagtattttcgtggtttggcggtagttgtaatttttatagacggtcgttaggtggcgtcgcgtcggggttcgggagtaggcgggttcggggcggggttggagggatttagttacgcgtttggggaggtcgcgggttttcgtagattatcgaatttttattttgtcgtcgggtttttatatttgtcggtttcgaggaaataatgacgttgggattttggggggtcgttttttgattcgggcgaatgggatacgaacggcgattttttgtttttttttattcgtttgtcgtcgttgttgtttatcgatttttatagtttatttttcgtttttgtaggttttaggaatgtaaataattttttattgggttttggcgggggcgcggagttgcggcgaagcgcgcgttcgatagttttcgtcgtagttgggttttcgggcgttggcggttgcggtttttagatacgggcggaggttgtaatatgtatatgcggttatagtgtggtgttaggggttcgtcgtg

SEQ ID NO: 18612 - DNA, 744 bp, Artificial Sequence
  chemically treated genomic DNA (Homo sapiens) CpG-island No: 18612
cacgacgaacccctaacaccacactataaccgcatatacatattacaacctccgcccgtatctaaaaaccgcaaccgccaacgcccgaaaacccaactacgacgaaaactatcgaacgcgcgcttcgccgcaactccgcgcccccgccaaaacccaataaaaaattatttacattcctaaaacctacaaaaacgaaaaataaactataaaaatcgataaacaacaacgacgacaaacgaataaaaaaaaacaaaaaatcgccgttcgtatcccattcgcccgaatcaaaaaacgaccccccaaaatcccaacgtcattatttcctcgaaaccgacaaatataaaaacccgacgacaaaataaaaattcgataatctacgaaaacccgcgacctccccaaacgcgtaactaaatccctccaaccccgccccgaacccgcctactcccgaaccccgacgcgacgccacctaacgaccgtctataaaaattacaactaccgccaaaccacgaaaatactaccgacctcaaatacccccgaccgaacctccgcgaaaaaaaaaactaataaatcacaaaaaacgaaaaaacgacgctaaactcccaacaaacgccccaacttcttaacttatcgcaaaaacaaccgaaaacgacgacgacaaaaaaaaaacgaataaaaaataaaaaaaaccgcccgcctccccgtccaactcgaaaaacctcccaactaattccctcaccgtcaaaa

SEQ ID NO: 18613 - DNA, 655 bp, Artificial Sequence
  chemically treated genomic DNA (Homo sapiens) CpG-island No: 18613
tttcgaaatttagcggttcggtcgtttttaaaggttaggcggaatatacgtttatatcgcggtttttttttcgaagtaagatcgtcgggttacggtcgtttttaggaagtttcgcgtttcgtattttatattcggggatataaataggcgtcgggtagtcgcgagggtcggcgcggcgtttttaagaggcggcgggcggcgttgttttttggcggtcgtttcgtcgttttttcgtcgtcgcgggtttaagcggggcggtcgggttagcgcggggcggcggcgggtaggggcggcgagtgcgcgggcgttcgtcgtcgtttttttcggcgggtagcgcgcgaggattaggtcgaggaggaagtggcggcggcggcggcgggtgaggatttttggtcgggtcgagtggtcgcgtgcgtttcgtcggggtttaagcgcgtttaggggttacggttcggttgggaatattagagggcgaggattcgggcgggaggaggagggaggaagggttcggaggtcgcgtttttgtcgtcgtttgagggcgtgtggttcgggttcgcgcggcgggagggcgggtagggcgggggcggtgtttgcggaggttcggtttttttttttgcgggttttggttttagtttcgatttagatttaggtttag

SEQ ID NO: 18614 - DNA, 655 bp, Artificial Sequence
  chemically treated genomic DNA (Homo sapiens) CpG-island No: 18614
ctaaacctaaatctaaatcgaaactaaaaccaaaacccgcaaaaaaaaaaaccgaacctccgcaaacaccgcccccgccctacccgccctcccgccgcgcgaacccgaaccacacgccctcaaacgacgacaaaaacgcgacctccgaacccttcctccctcctcctcccgcccgaatcctcgccctctaatattcccaaccgaaccgtaacccctaaacgcgcttaaaccccgacgaaacgcacgcgaccactcgacccgaccaaaaatcctcacccgccgccgccgccgccacttcctcctcgacctaatcctcgcgcgctacccgccgaaaaaaacgacgacgaacgcccgcgcactcgccgcccctacccgccgccgccccgcgctaacccgaccgccccgcttaaacccgcgacgacgaaaaaacgacgaaacgaccgccaaaaaacaacgccgcccgccgcctcttaaaaacgccgcgccgaccctcgcgactacccgacgcctatttatatccccgaatataaaatacgaaacgcgaaacttcctaaaaacgaccgtaacccgacgatcttacttcgaaaaaaaaaccgcgatataaacgtatattccgcctaacctttaaaaacgaccgaaccgctaaatttcgaaa

SEQ ID NO: 18615 - DNA, 655 bp, Artificial Sequence
  chemically treated genomic DNA (Homo sapiens) CpG-island No: 18615
ttgagtttgagtttgagtcggagttggggttagggttcgtaggaggggaagtcgggttttcgtagatatcgttttcgttttgttcgttttttcgtcgcgcgggttcgagttatacgtttttaggcggcggtagaagcgcggttttcgagttttttttttttttttttttcgttcgggttttcgttttttgatgtttttagtcgggtcgtaatttttgggcgcgtttggatttcggcggggcgtacgcggttattcggttcggttagagatttttattcgtcgtcgtcgtcgttatttttttttcggtttggttttcgcgcgttgttcgtcgagaagggcggcggcgagcgttcgcgtattcgtcgtttttgttcgtcgtcgtttcgcgttggttcggtcgtttcgtttgagttcgcggcggcgaggaagcggcggggcggtcgttagggggtagcgtcgttcgtcgttttttaaaggcgtcgcgtcggttttcgcggttattcggcgtttgtttgtgttttcgggtgtggggtgcggggcgcggggttttttgggggcggtcgtggttcggcggttttatttcgggaagggagtcgcggtgtgggcgtgtgtttcgtttggtttttgggggcgatcgagtcgttgagtttcggaa

SEQ ID NO: 18616 - DNA, 655 bp, Artificial Sequence
  chemically treated genomic DNA (Homo sapiens) CpG-island No: 18616
ttccgaaactcaacgactcgatcgcccccaaaaaccaaacgaaacacacgcccacaccgcgactcccttcccgaaataaaaccgccgaaccacgaccgcccccaaaaaaccccgcgccccgcaccccacacccgaaaacacaaacaaacgccgaataaccgcgaaaaccgacgcgacgcctttaaaaaacgacgaacgacgctaccccctaacgaccgccccgccgcttcctcgccgccgcgaactcaaacgaaacgaccgaaccaacgcgaaacgacgacgaacaaaaacgacgaatacgcgaacgctcgccgccgcccttctcgacgaacaacgcgcgaaaaccaaaccgaaaaaaaaataacgacgacgacgacgaataaaaatctctaaccgaaccgaataaccgcgtacgccccgccgaaatccaaacgcgcccaaaaattacgacccgactaaaaacatcaaaaaacgaaaacccgaacgaaaaaaaaaaaaaaaaaaaactcgaaaaccgcgcttctaccgccgcctaaaaacgtataactcgaacccgcgcgacgaaaaaacgaacaaaacgaaaacgatatctacgaaaacccgacttcccctcctacgaaccctaaccccaactccgactcaaactcaaactcaa

SEQ ID NO: 18617 - DNA, 838 bp, Artificial Sequence
  chemically treated genomic DNA (Homo sapiens) CpG-island No: 18617
tgcggtaaggcgggaatagggatagtcgggtcgggaaggggaggttcggcgggagcgggggagaggaggttcgggtcgcgcgtttatttgagagtaggagtatttttcggagtcgttgtcgtttaggatagcgtacgttttattttttagtttttcgttttttttaaggacgtcgattaacgatattacgggttttagtttcgattgtcgtttagcggcgttttcggtttcggttatttttaattgttagtcgaatagcggttcggtttcggcggaggcgggaaaagcggtcgtgaggggcgtagtcggaggaggtggggttcgagtgttaggaattaatgataaggaaaaaaagcgaaggaagggggaggagcgattttcgataaacggatgttattttttttttttttttcgtttgcgtcggacgcgggttgattttcgttttcgggtggcgtttttcggtgtcgtgttttggaagtttagcggttattatggagttgttgggagagtacgtcgggtaggaagggaagtcgtagaagttgcgggtgttttgtgaggcgtcgggtgacggcgattttttttagggtttgttgtttggcgtggtttagatgaaggatatggtaacggaattattcgattttttggtatagggggaagtgtagtatcgggtggcggcggttttagacgaggatttggacggtgagttttgagacggtgttgtagtgatcggaggacggggcgggcgtttaggggaaattggtttggggagttcgtgtagagtggtagatttggataaagtgagtttcgaggaaagaagaattgtatttaaaaatttttg

SEQ ID NO: 18618 - DNA, 838 bp, Artificial Sequence
  chemically treated genomic DNA (Homo sapiens) CpG-island No: 18618
caaaaatttttaaatacaattcttctttcctcgaaactcactttatccaaatctaccactctacacgaactccccaaaccaatttcccctaaacgcccgccccgtcctccgatcactacaacaccgtctcaaaactcaccgtccaaatcctcgtctaaaaccgccgccacccgatactacacttccccctataccaaaaaatcgaataattccgttaccatatccttcatctaaaccacgccaaacaacaaaccctaaaaaaaatcgccgtcacccgacgcctcacaaaacacccgcaacttctacgacttcccttcctacccgacgtactctcccaacaactccataataaccgctaaacttccaaaacacgacaccgaaaaacgccacccgaaaacgaaaatcaacccgcgtccgacgcaaacgaaaaaaaaaaaaaaaataacatccgtttatcgaaaatcgctcctcccccttccttcgctttttttccttatcattaattcctaacactcgaaccccacctcctccgactacgcccctcacgaccgcttttcccgcctccgccgaaaccgaaccgctattcgactaacaattaaaaataaccgaaaccgaaaacgccgctaaacgacaatcgaaactaaaacccgtaatatcgttaatcgacgtccttaaaaaaaacgaaaaactaaaaaataaaacgtacgctatcctaaacgacaacgactccgaaaaatactcctactctcaaataaacgcgcgacccgaacctcctctcccccgctcccgccgaacctccccttcccgacccgactatccctattcccgccttaccgca

SEQ ID NO: 18619 - DNA, 838 bp, Artificial Sequence
  chemically treated genomic DNA (Homo sapiens) CpG-island No: 18619
taaaaatttttagatgtaattttttttttttcgaggtttattttgtttaagtttgttattttatacgggttttttaagttaattttttttgggcgttcgtttcgtttttcggttattgtagtatcgttttagagtttatcgtttaagttttcgtttggagtcgtcgttattcggtgttgtatttttttttgtattagagggtcgaataatttcgttattatgttttttatttgggttacgttagataataggttttggaaagggtcgtcgttattcggcgttttataggatattcgtagtttttgcggtttttttttttgttcgacgtatttttttagtagttttatggtgatcgttaagtttttagaatacgatatcgggaagcgttattcggaggcggaaattagttcgcgttcggcgtaggcgggagaagggagaggagtgatattcgtttgtcggaagtcgttttttttttttttttcgttttttttttttgttattggtttttggtattcgggttttatttttttcggttacgttttttacggtcgtttttttcgttttcgtcggggtcgagtcgttgttcggttgatagttgaggatggtcggagtcgagggcgtcgttgggcggtagtcggagttggagttcgtggtatcgttggtcgacgtttttgaggaggacgaggagttggagaatgaggcgtgcgttgttttgggcggtagcgatttcgagaagtgtttttatttttaggtgggcgcgcggttcgggttttttttttttcgttttcgtcgaatttttttttttcggttcggttgtttttattttcgttttgtcgta

SEQ ID NO: 18620 - DNA, 838 bp, Artificial Sequence
  chemically treated genomic DNA (Homo sapiens) CpG-island No: 18620
tacgacaaaacgaaaataaaaacaaccgaaccgaaaaaaaaaaattcgacgaaaacgaaaaaaaaaaaacccgaaccgcgcgcccacctaaaaataaaaacacttctcgaaatcgctaccgcccaaaacaacgcacgcctcattctccaactcctcgtcctcctcaaaaacgtcgaccaacgataccacgaactccaactccgactaccgcccaacgacgccctcgactccgaccatcctcaactatcaaccgaacaacgactcgaccccgacgaaaacgaaaaaaacgaccgtaaaaaacgtaaccgaaaaaaataaaacccgaataccaaaaaccaataacaaaaaaaaaaaacgaaaaaaaaaaaaaaaacgacttccgacaaacgaatatcactcctctcccttctcccgcctacgccgaacgcgaactaatttccgcctccgaataacgcttcccgatatcgtattctaaaaacttaacgatcaccataaaactactaaaaaaatacgtcgaacaaaaaaaaaaaccgcaaaaactacgaatatcctataaaacgccgaataacgacgaccctttccaaaacctattatctaacgtaacccaaataaaaaacataataacgaaattattcgaccctctaatacaaaaaaaaatacaacaccgaataacgacgactccaaacgaaaacttaaacgataaactctaaaacgatactacaataaccgaaaaacgaaacgaacgcccaaaaaaaattaacttaaaaaacccgtataaaataacaaacttaaacaaaataaacctcgaaaaaaaaaaaattacatctaaaaattttta

SEQ ID NO: 18621 - DNA, 684 bp, Artificial Sequence
  chemically treated genomic DNA (Homo sapiens) CpG-island No: 18621
tcggattttatttttttgtttcgtggtggttagttcgttcgtcgtttcggatgtcgtcgtagtcggagttttcggttcgggtcggaagcgcgcgcgtttcgttttcgaggttcgttttttatgacgttagatcgttttcgttcgtcgcgtagttttttcgagcgagattaaaataggtggaattcgggttggagtcggagtttcggcggcgcgggtggcggtacgtttttttaggtgggtggttttttgggtttggcgatttagcgttttttagttttgttttttggtgttcgttcgcgattgttatcgttttattatttttcgttgtagatagtattataggtatttggagtatcggtatcggtcgttgtggttttcgagtgttcgttagagtttaggggagtttgttttttcgcgtttcgtcggggttcggttaggtattttggtcgtcggcgtacggacgcgggtacgagtattagattacggtgagtggaagcgggttcgacgcggttttgtaggttcgatattcgttaggtattagggttgggaggggtgaggggcgcgcgtcgtagtgcggttgttttggcgtcgtcgttgggggtagggcgcgcggggtttggggtttgtacgtttgttttggacgttggtatttttagttaatttgtttgttttgttttgtaggtt

SEQ ID NO: 18622 - DNA, 684 bp, Artificial Sequence
  chemically treated genomic DNA (Homo sapiens) CpG-island No: 18622
aacctacaaaacaaaacaaacaaattaactaaaaataccaacgtccaaaacaaacgtacaaaccccaaaccccgcgcgccctacccccaacgacgacgccaaaacaaccgcactacgacgcgcgcccctcacccctcccaaccctaatacctaacgaatatcgaacctacaaaaccgcgtcgaacccgcttccactcaccgtaatctaatactcgtacccgcgtccgtacgccgacgaccaaaatacctaaccgaaccccgacgaaacgcgaaaaaacaaactcccctaaactctaacgaacactcgaaaaccacaacgaccgataccgatactccaaatacctataatactatctacaacgaaaaataataaaacgataacaatcgcgaacgaacaccaaaaaacaaaactaaaaaacgctaaatcgccaaacccaaaaaaccacccacctaaaaaaacgtaccgccacccgcgccgccgaaactccgactccaacccgaattccacctattttaatctcgctcgaaaaaactacgcgacgaacgaaaacgatctaacgtcataaaaaacgaacctcgaaaacgaaacgcgcgcgcttccgacccgaaccgaaaactccgactacgacgacatccgaaacgacgaacgaactaaccaccacgaaacaaaaaaataaaatccga

SEQ ID NO: 18623 - DNA, 684 bp, Artificial Sequence
  chemically treated genomic DNA (Homo sapiens) CpG-island No: 18623
agtttgtaagatagagtagataggttagttaaaggtgttaacgtttagggtaagcgtgtaggttttaagtttcgcgcgttttgtttttagcggcgacgttagggtagtcgtattgcggcgcgcgttttttattttttttagttttggtgtttggcggatgtcgggtttgtagggtcgcgtcgggttcgtttttatttatcgtgatttagtgttcgtgttcgcgttcgtgcgtcggcggttaaggtgtttggtcgggtttcgacgaggcgcgggagggtaggtttttttaggttttgacggatattcgggggttatagcgatcgatgtcggtattttaggtgtttgtggtattgtttgtaacgagaagtgatggggcgatgatagtcgcgagcgggtattagggggtaaggttgaggagcgttgagtcgttagatttagagagttatttatttggagggacgtgtcgttattcgcgtcgtcggagtttcggttttagttcggattttatttgttttggtttcgttcggggaagttgcgcggcgggcgggggcgatttgacgttatgaggggcgggtttcgggggcggggcgcgcgcgttttcggttcgagtcggaagtttcgattgcggcggtattcgggacggcgggcgggttggttattacgggataggaaggtgagattcgg

SEQ ID NO: 18624 - DNA, 684 bp, Artificial Sequence
  chemically treated genomic DNA (Homo sapiens) CpG-island No: 18624
ccgaatctcaccttcctatcccgtaataaccaacccgcccgccgtcccgaataccgccgcaatcgaaacttccgactcgaaccgaaaacgcgcgcgccccgcccccgaaacccgcccctcataacgtcaaatcgcccccgcccgccgcgcaacttccccgaacgaaaccaaaacaaataaaatccgaactaaaaccgaaactccgacgacgcgaataacgacacgtccctccaaataaataactctctaaatctaacgactcaacgctcctcaaccttaccccctaatacccgctcgcgactatcatcgccccatcacttctcgttacaaacaataccacaaacacctaaaataccgacatcgatcgctataacccccgaatatccgtcaaaacctaaaaaaacctaccctcccgcgcctcgtcgaaacccgaccaaacaccttaaccgccgacgcacgaacgcgaacacgaacactaaatcacgataaataaaaacgaacccgacgcgaccctacaaacccgacatccgccaaacaccaaaactaaaaaaaataaaaaacgcgcgccgcaatacgactaccctaacgtcgccgctaaaaacaaaacgcgcgaaacttaaaacctacacgcttaccctaaacgttaacacctttaactaacctatctactctatcttacaaact

SEQ ID NO: 18625 - DNA, 559 bp, Artificial Sequence
  chemically treated genomic DNA (Homo sapiens) CpG-island No: 18625
cggtagcggttttttatatataataaatttcggtatgttttcgagcggtttgaggtggagggttttagaaggcgtgacgtggggtcgagagcgggattcgaggttggcgggttttggtagtagttgtggttgcggttgtcgggtttggggacgcgggcggtcgaggtcgtcgtcgtagttttttcgtttcgtcggttatggttgcgttcggtcggttttttagcggtttttttttgagcggcggttcggattttttgtagtcgtcgtagtcggtttttttcggtcgggttttttcgtcgggggttgacggcgtcgagttggtttcgcggtcgggatttcgcgtagtttttagtagtttcgttgggagtgcggcgcgcggacggtgaggagttcgtcgggcgtagggcgtagggcgggcgggcgggcgggtaggttgggcgtttttcgcggcgggcgcgggtaggggcgcgggtttcgcgtcggggttttttgattttttttttacggtttttcgcgggagtttcgtagtttagtttatagatgaagaaattgattttcg

SEQ ID NO: 18626 - DNA, 559 bp, Artificial Sequence
  chemically treated genomic DNA (Homo sapiens) CpG-island No: 18626
cgaaaatcaatttcttcatctataaactaaactacgaaactcccgcgaaaaaccgtaaaaaaaaaatcaaaaaaccccgacgcgaaacccgcgcccctacccgcgcccgccgcgaaaaacgcccaacctacccgcccgcccgcccgccctacgccctacgcccgacgaactcctcaccgtccgcgcgccgcactcccaacgaaactactaaaaactacgcgaaatcccgaccgcgaaaccaactcgacgccgtcaacccccgacgaaaaaacccgaccgaaaaaaaccgactacgacgactacaaaaaatccgaaccgccgctcaaaaaaaaaccgctaaaaaaccgaccgaacgcaaccataaccgacgaaacgaaaaaactacgacgacgacctcgaccgcccgcgtccccaaacccgacaaccgcaaccacaactactaccaaaacccgccaacctcgaatcccgctctcgaccccacgtcacgccttctaaaaccctccacctcaaaccgctcgaaaacataccgaaatttattatatataaaaaaccgctaccg

SEQ ID NO: 18627 - DNA, 559 bp, Artificial Sequence
  chemically treated genomic DNA (Homo sapiens) CpG-island No: 18627
cggggattagtttttttatttgtaaattgggttgcgaagttttcgcggagggtcgtggggagggagttaaaaagtttcggcgcggagttcgcgtttttgttcgcgttcgtcgcgaggggcgtttagtttgttcgttcgttcgttcgttttgcgttttgcgttcgacgggttttttatcgttcgcgcgtcgtatttttagcgggattgttagggattgcgcgaggtttcggtcgcggggttaattcggcgtcgttagttttcggcgggaaggttcggtcggggaaggtcggttgcggcggttgtaggaagttcgagtcgtcgtttagagggaggtcgttgaagggtcggtcgagcgtagttatagtcggcgagacgaggaggttgcgacggcggtttcggtcgttcgcgtttttaggttcggtagtcgtagttatagttattgttaaaattcgttagtttcggatttcgttttcgattttacgttacgttttttagaattttttattttaggtcgttcgggggtatgtcgggatttgttgtgtgtagagggtcgttgtcg

SEQ ID NO: 18628 - DNA, 559 bp, Artificial Sequence
  chemically treated genomic DNA (Homo sapiens) CpG-island No: 18628
cgacaacgaccctctacacacaacaaatcccgacatacccccgaacgacctaaaataaaaaattctaaaaaacgtaacgtaaaatcgaaaacgaaatccgaaactaacgaattttaacaataactataactacgactaccgaacctaaaaacgcgaacgaccgaaaccgccgtcgcaacctcctcgtctcgccgactataactacgctcgaccgacccttcaacgacctccctctaaacgacgactcgaacttcctacaaccgccgcaaccgaccttccccgaccgaaccttcccgccgaaaactaacgacgccgaattaaccccgcgaccgaaacctcgcgcaatccctaacaatcccgctaaaaatacgacgcgcgaacgataaaaaacccgtcgaacgcaaaacgcaaaacgaacgaacgaacgaacaaactaaacgcccctcgcgacgaacgcgaacaaaaacgcgaactccgcgccgaaactttttaactccctccccacgaccctccgcgaaaacttcgcaacccaatttacaaataaaaaaactaatccccg

SEQ ID NO: 18629 - DNA, 1235 bp, Artificial Sequence
  chemically treated genomic DNA (Homo sapiens) CpG-island No: 18629
cgtttttagagaggacgtttatcgttcggagtaggttgcggtttcggttttcgtcgaattttagtaatcgcgaggagaaatgtttgtcgtagggggcggagcgtagcgggggcggagcgcggacgaaggggcggagcgaggacgaaggggcggagtagaaacgacgggcggggggcggagcgagaataatggggtggagtaagacggcgggcgggggcggagcgaggacgacggggcggagcgtagatcgcgggcggggggcggagttgggatgatggggaggagcgaggataaaggggcggagtatagatagaaataggggcggggaggggaggggcgttttcggtttttgggattcgtttttcgtcgtaggcgcgtttgtttcgtttttttattttttacggcggcggttgcggaggtcgagggcggggagggaggggagagcgggttacgacgttgtcggggcggggataattttttacgtggagtagatgaaagggtcgcggcgcgacggtcgggggagtcgagttgagtttgcgatttataaagtcgtcgtcgtcgtcgtcgtgatggggttgtgaggcgttcgttcgcgttcggtttttagtcggttcgcgattatgttcggtcgcgttcgtttttcgcgttttttcgtcgtaggattatgaggtcgcgttcgggcgggcgtttaggggttacgggtcgtcgtcgtcgtcgtttgcgtcgtcgttttcgcggttttcggtgtagtcgtttgtcgtcgtcgtcgtcgttgtcgttgttgttcgggttgttgttggcggtcgcggggttcggcgcggcgcgggttaaggagacggcgttcgtggaggtggtgttgttcgagtcgagtttaagcggcgattatattatttatattatcggttttacgggtcgtttttcgcgggtcggggttacgtttagcgtcgagggcgagatcgtgtaggtagttgttcgtcgttcgggtttcgcgtcgttttcgttataagatggtttcgggggttgcgttcgtcgatttcgtcgcgggttgtttgattggcgggcgggcgggaggggtggtcgagaggtcggcggtattttttttttgcgggcgggtaggcgggcgggacgcggttttcggggcgtattcgcggggggcgagcgtacgtgggggttagagtttttgtgaatttcggggcgggaggggtattttgggttcggtatttatgttggggtag

SEQ ID NO: 18630 - DNA, 1235 bp, Artificial Sequence
  chemically treated genomic DNA (Homo sapiens) CpG-island No: 18630
ctaccccaacataaataccgaacccaaaatacccctcccgccccgaaattcacaaaaactctaacccccacgtacgctcgccccccgcgaatacgccccgaaaaccgcgtcccgcccgcctacccgcccgcaaaaaaaaaataccgccgacctctcgaccacccctcccgcccgcccgccaatcaaacaacccgcgacgaaatcgacgaacgcaacccccgaaaccatcttataacgaaaacgacgcgaaacccgaacgacgaacaactacctacacgatctcgccctcgacgctaaacgtaaccccgacccgcgaaaaacgacccgtaaaaccgataatataaataatataatcgccgcttaaactcgactcgaacaacaccacctccacgaacgccgtctccttaacccgcgccgcgccgaaccccgcgaccgccaacaacaacccgaacaacaacgacaacgacgacgacgacgacaaacgactacaccgaaaaccgcgaaaacgacgacgcaaacgacgacgacgacgacccgtaacccctaaacgcccgcccgaacgcgacctcataatcctacgacgaaaaaacgcgaaaaacgaacgcgaccgaacataatcgcgaaccgactaaaaaccgaacgcgaacgaacgcctcacaaccccatcacgacgacgacgacgacgactttataaatcgcaaactcaactcgactcccccgaccgtcgcgccgcgaccctttcatctactccacgtaaaaaattatccccgccccgacaacgtcgtaacccgctctcccctccctccccgccctcgacctccgcaaccgccgccgtaaaaaataaaaaaacgaaacaaacgcgcctacgacgaaaaacgaatcccaaaaaccgaaaacgcccctcccctccccgcccctatttctatctatactccgcccctttatcctcgctcctccccatcatcccaactccgccccccgcccgcgatctacgctccgccccgtcgtcctcgctccgcccccgcccgccgtcttactccaccccattattctcgctccgccccccgcccgtcgtttctactccgccccttcgtcctcgctccgccccttcgtccgcgctccgcccccgctacgctccgccccctacgacaaacatttctcctcgcgattactaaaattcgacgaaaaccgaaaccgcaacctactccgaacgataaacgtcctctctaaaaacg

SEQ ID NO: 18631 - DNA, 1235 bp, Artificial Sequence
  chemically treated genomic DNA (Homo sapiens) CpG-island No: 18631
ttgttttagtatgggtgtcgggtttaggatgtttttttcgtttcggggtttataggagttttagtttttacgtgcgttcgtttttcgcggatgcgtttcggaggtcgcgtttcgttcgtttgttcgttcgtaggggagggatgtcgtcggtttttcggttatttttttcgttcgttcgttagttaggtagttcgcggcggggtcggcgggcgtagttttcggagttattttgtggcggaggcggcgcggggttcgggcggcgggtagttatttgtacgatttcgttttcggcgttgagcgtggtttcggttcgcgagaagcggttcgtgaggtcggtggtgtaggtggtgtaatcgtcgtttgggttcgattcgaatagtattatttttacgaacgtcgtttttttggttcgcgtcgcgtcgggtttcgcggtcgttagtagtagttcgagtagtagcggtagcggcggcggcggcggtaggcggttgtatcggaggtcgcgggggcggcggcgtaggcggcggcggcggcggttcgtggtttttgggcgttcgttcgagcgcggttttatggttttgcggcgggagggcgcggagggcgggcgcggtcgggtatagtcgcgggtcggttgaggatcgaacgcgggcggacgttttatagttttattacggcggcggcggcggcggttttgtgggtcgtaggtttagttcggttttttcggtcgtcgcgtcgcggtttttttatttgttttacgtgaggggttattttcgtttcggtagcgtcgtgattcgttttttttttttttttcgttttcggttttcgtagtcgtcgtcgtggggagtgagaaggcggggtaggcgcgtttgcggcgagaggcgggttttaaaggtcgagaacgtttttttttttttcgtttttgtttttatttgtgtttcgtttttttattttcgtttttttttattattttagtttcgtttttcgttcgcggtttgcgtttcgtttcgtcgttttcgtttcgttttcgttcgtcgttttgttttattttattattttcgtttcgtttttcgttcgtcgtttttatttcgttttttcgttttcgtttcgttttttcgttcgcgtttcgttttcgttgcgtttcgttttttacggtagatattttttttcgcggttgttagagttcggcgggaatcgggatcgtaatttgtttcgggcgatgggcgttttttttggaggcg

SEQ ID NO: 18632 - DNA, 1235 bp, Artificial Sequence
  chemically treated genomic DNA (Homo sapiens) CpG-island No: 18632
cgcctccaaaaaaaacgcccatcgcccgaaacaaattacgatcccgattcccgccgaactctaacaaccgcgaaaaaaaatatctaccgtaaaaaacgaaacgcaacgaaaacgaaacgcgaacgaaaaaacgaaacgaaaacgaaaaaacgaaataaaaacgacgaacgaaaaacgaaacgaaaataataaaataaaacaaaacgacgaacgaaaacgaaacgaaaacgacgaaacgaaacgcaaaccgcgaacgaaaaacgaaactaaaataataaaaaaaaacgaaaataaaaaaacgaaacacaaataaaaacaaaaacgaaaaaaaaaaaaacgttctcgacctttaaaacccgcctctcgccgcaaacgcgcctaccccgccttctcactccccacgacgacgactacgaaaaccgaaaacgaaaaaaaaaaaaaaaacgaatcacgacgctaccgaaacgaaaataacccctcacgtaaaacaaataaaaaaaccgcgacgcgacgaccgaaaaaaccgaactaaacctacgacccacaaaaccgccgccgccgccgccgtaataaaactataaaacgtccgcccgcgttcgatcctcaaccgacccgcgactatacccgaccgcgcccgccctccgcgccctcccgccgcaaaaccataaaaccgcgctcgaacgaacgcccaaaaaccacgaaccgccgccgccgccgcctacgccgccgcccccgcgacctccgatacaaccgcctaccgccgccgccgccgctaccgctactactcgaactactactaacgaccgcgaaacccgacgcgacgcgaaccaaaaaaacgacgttcgtaaaaataatactattcgaatcgaacccaaacgacgattacaccacctacaccaccgacctcacgaaccgcttctcgcgaaccgaaaccacgctcaacgccgaaaacgaaatcgtacaaataactacccgccgcccgaaccccgcgccgcctccgccacaaaataactccgaaaactacgcccgccgaccccgccgcgaactacctaactaacgaacgaacgaaaaaaataaccgaaaaaccgacgacatccctcccctacgaacgaacaaacgaacgaaacgcgacctccgaaacgcatccgcgaaaaacgaacgcacgtaaaaactaaaactcctataaaccccgaaacgaaaaaaacatcctaaacccgacacccatactaaaacaa

SEQ ID NO: 18633 - DNA, 1542 bp, Artificial Sequence
  chemically treated genomic DNA (Homo sapiens) CpG-island No: 18633
gtcggtcgagtcgggtttcgagattttcgttcgtagttcggtttcgaagttaggtcggtttagggtcgttttattttattttggtattcggtatttttagtttatttttcgggtattattagagttttcgggcgacgcgattacgcgtttagttggggaggaggaagaagggaggcgtaggtcggggagggttattttcgcgtcgcggttttttaggtttcggggagtcgttaggagtggtttgtcggtggtcgtgggaatgagcgtgtttcgaggcggtagttgttgcgcgggataaattcggaagaagtcgcgagacggattgaagtcggttaggagcgtattgcgcggcggggtcgcgggcgttcgattttatttttatttgggcgatgttatagggagtttcgcgttttttatattttagggcgttcgttcgagggggttggggttggaatttcgttgcgtcggtgttttggtttcgcgggcgaggaggaggaggagtaggaggaggagtcgcgggtgaggcgcgaggttatcgtttattcggttcggaggaggcggatttattcggagcgtcgcgcgcgcgtcgggttgagttttgtaaataagtgtttgtgttgtgttttcgcggtttttttcgcgtcggggtcgtttttttcgggtaggagggagtaagggagttttcgtcgcgcggttcgcgagtcgtcgtcgttttcggttcgcgtattttcgcgcgggggtcgcggattcgattaggttgttaggcgtagcgatatcgggtcgcggtgcgagcggcgtttcggttttcgtcgagaggtttttgatagaaaaacgtgcgtggttgtttttatttttgggaggggttgtcggtgtcgcgcgcggtcgtttagtcgttagcgtttttttttgggaggattcgttgtcggaggaaggagtggatttaatttggtcgcgtcgtagaagtggttttcgaggaagtcggcgtcggggtcgtcgtttcgtgttttttcggggcgtagtgttcgggggtcggcgggttagagtcgaggcgcggtcggggagtcgggggttgcggggtcgagcgggtagtcgcgcgagggggcgggcgttcggcgattcgggggtcggtcgggttgagtttcgcgtttcgggacgcgggttggaagcgacggaggagtgttgtcgcgggttgcggattagcgtcgtttttttacggagcggggattttgttatgatagttgggtttttcggagggttaatttgggtgttttcggtaaagttgtcgtcgagtcgggagttcgtgtaggggtcgcggcgtcgcggttcggggggcggtcgggcggtcggcggcggtcgtggttcggcggggttcgcgcggtcggggggtttttgggggtgtgcgtttttagtcggttgttttcgtggatgtttttcggcggcggcgggtttatgaaagattgcgagtatagttagattagtatttatagttttttttttatggagtcgttttataagaagaagaaaatcgcggttcggaggaaa

SEQ ID NO: 18634 - DNA, 1542 bp, Artificial Sequence
  chemically treated genomic DNA (Homo sapiens) CpG-island No: 18634
tttcctccgaaccgcgattttcttcttcttataaaacgactccataaaaaaaaaactataaatactaatctaactatactcgcaatctttcataaacccgccgccgccgaaaaacatccacgaaaacaaccgactaaaaacgcacacccccaaaaaccccccgaccgcgcgaaccccgccgaaccacgaccgccgccgaccgcccgaccgccccccgaaccgcgacgccgcgacccctacacgaactcccgactcgacgacaactttaccgaaaacacccaaattaaccctccgaaaaacccaactatcataacaaaatccccgctccgtaaaaaaacgacgctaatccgcaacccgcgacaacactcctccgtcgcttccaacccgcgtcccgaaacgcgaaactcaacccgaccgacccccgaatcgccgaacgcccgccccctcgcgcgactacccgctcgaccccgcaacccccgactccccgaccgcgcctcgactctaacccgccgacccccgaacactacgccccgaaaaaacacgaaacgacgaccccgacgccgacttcctcgaaaaccacttctacgacgcgaccaaattaaatccactccttcctccgacaacgaatcctcccaaaaaaaaacgctaacgactaaacgaccgcgcgcgacaccgacaacccctcccaaaaataaaaacaaccacgcacgtttttctatcaaaaacctctcgacgaaaaccgaaacgccgctcgcaccgcgacccgatatcgctacgcctaacaacctaatcgaatccgcgacccccgcgcgaaaatacgcgaaccgaaaacgacgacgactcgcgaaccgcgcgacgaaaactcccttactccctcctacccgaaaaaaacgaccccgacgcgaaaaaaaccgcgaaaacacaacacaaacacttatttacaaaactcaacccgacgcgcgcgcgacgctccgaataaatccgcctcctccgaaccgaataaacgataacctcgcgcctcacccgcgactcctcctcctactcctcctcctcctcgcccgcgaaaccaaaacaccgacgcaacgaaattccaaccccaaccccctcgaacgaacgccctaaaatataaaaaacgcgaaactccctataacatcgcccaaataaaaataaaatcgaacgcccgcgaccccgccgcgcaatacgctcctaaccgacttcaatccgtctcgcgacttcttccgaatttatcccgcgcaacaactaccgcctcgaaacacgctcattcccacgaccaccgacaaaccactcctaacgactccccgaaacctaaaaaaccgcgacgcgaaaataaccctccccgacctacgcctcccttcttcctcctccccaactaaacgcgtaatcgcgtcgcccgaaaactctaataatacccgaaaaataaactaaaaataccgaataccaaaataaaataaaacgaccctaaaccgacctaacttcgaaaccgaactacgaacgaaaatctcgaaacccgactcgaccgac

SEQ ID NO: 18635 - DNA, 1542 bp, Artificial Sequence
  chemically treated genomic DNA (Homo sapiens) CpG-island No: 18635
tttttttcgggtcgcgatttttttttttttgtggggcgattttatgggggaggagttgtgggtgttgatttggttgtattcgtagttttttatgggttcgtcgtcgtcgggaggtatttacgagggtagtcggttgggggcgtatatttttaggagtttttcggtcgcgcgggtttcgtcgagttacgatcgtcgtcggtcgttcggtcgtttttcgagtcgcggcgtcgcggtttttatacgggttttcggttcggcgataattttgtcgaggatatttaggttaatttttcggggagtttaattgttatagtagaattttcgtttcgtgaggggacggcgttggttcgtagttcgcggtagtattttttcgtcgtttttagttcgcgtttcggggcgcggggtttagttcggtcggttttcgggtcgtcgagcgttcgttttttcgcgcggttgttcgttcggtttcgtagttttcggtttttcggtcgcgtttcggttttggttcgtcgattttcgagtattgcgtttcgaggggatacgaggcggcggtttcggcgtcggttttttcgggagttatttttgcggcgcggttaggttgggtttattttttttttcggtagcggatttttttaggagagagcgttggcgattgggcggtcgcgcgcggtatcggtaattttttttaggggtggggataattacgtacgtttttttgttaggagtttttcggcgagagtcggggcgtcgttcgtatcgcgattcggtgtcgttgcgtttggtagtttagtcgaattcgcggttttcgcgcggggatgcgcgggtcgagggcggcggcggttcgcgggtcgcgcggcgagggtttttttgtttttttttattcggaggaagcggtttcggcgcgaggagggtcgcggggatatagtatagatatttgtttgtaaggtttagttcggcgcgcgcgcggcgtttcgagtgggttcgtttttttcgggtcgggtgggcggtggtttcgcgttttattcgcggtttttttttttgttttttttttttttcgttcgcgaagttagggtatcggcgtagcgagattttagttttagttttttcgggcgggcgttttggggtgtggaaggcgcggggttttttgtggtatcgtttaagtagggatggggtcgggcgttcgcggtttcgtcgcgtagtgcgtttttggtcgattttagttcgtttcgcggtttttttcgggtttatttcgcgtagtagttgtcgtttcgggatacgtttatttttacggttatcggtaagttatttttggcgatttttcgggatttgaggagtcgcggcgcggaggtgatttttttcggtttgcgtttttttttttttttttttttagttgggcgcgtggtcgcgtcgttcggggattttggtgatgttcgagaaatgggttgggggtgtcgggtgttaggatggggtggggcggttttaggtcggtttgatttcgggatcgggttgcgggcgagggtttcggggttcggttcggtcggt

SEQ ID NO: 18636 - DNA, 1542 bp, Artificial Sequence
  chemically treated genomic DNA (Homo sapiens) CpG-island No: 18636
accgaccgaaccgaaccccgaaaccctcgcccgcaacccgatcccgaaatcaaaccgacctaaaaccgccccaccccatcctaacacccgacacccccaacccatttctcgaacatcaccaaaatccccgaacgacgcgaccacgcgcccaactaaaaaaaaaaaaaaaaaaaaacgcaaaccgaaaaaaatcacctccgcgccgcgactcctcaaatcccgaaaaatcgccaaaaataacttaccgataaccgtaaaaataaacgtatcccgaaacgacaactactacgcgaaataaacccgaaaaaaaccgcgaaacgaactaaaatcgaccaaaaacgcactacgcgacgaaaccgcgaacgcccgaccccatccctacttaaacgataccacaaaaaaccccgcgccttccacaccccaaaacgcccgcccgaaaaaactaaaactaaaatctcgctacgccgataccctaacttcgcgaacgaaaaaaaaaaaaaacaaaaaaaaaaaccgcgaataaaacgcgaaaccaccgcccacccgacccgaaaaaaacgaacccactcgaaacgccgcgcgcgcgccgaactaaaccttacaaacaaatatctatactatatccccgcgaccctcctcgcgccgaaaccgcttcctccgaataaaaaaaaacaaaaaaaccctcgccgcgcgacccgcgaaccgccgccgccctcgacccgcgcatccccgcgcgaaaaccgcgaattcgactaaactaccaaacgcaacgacaccgaatcgcgatacgaacgacgccccgactctcgccgaaaaactcctaacaaaaaaacgtacgtaattatccccacccctaaaaaaaattaccgataccgcgcgcgaccgcccaatcgccaacgctctctcctaaaaaaatccgctaccgaaaaaaaaaataaacccaacctaaccgcgccgcaaaaataactcccgaaaaaaccgacgccgaaaccgccgcctcgtatcccctcgaaacgcaatactcgaaaatcgacgaaccaaaaccgaaacgcgaccgaaaaaccgaaaactacgaaaccgaacgaacaaccgcgcgaaaaaacgaacgctcgacgacccgaaaaccgaccgaactaaaccccgcgccccgaaacgcgaactaaaaacgacgaaaaaatactaccgcgaactacgaaccaacgccgtcccctcacgaaacgaaaattctactataacaattaaactccccgaaaaattaacctaaatatcctcgacaaaattatcgccgaaccgaaaacccgtataaaaaccgcgacgccgcgactcgaaaaacgaccgaacgaccgacgacgatcgtaactcgacgaaacccgcgcgaccgaaaaactcctaaaaatatacgcccccaaccgactaccctcgtaaatacctcccgacgacgacgaacccataaaaaactacgaatacaaccaaatcaacacccacaactcctcccccataaaatcgccccacaaaaaaaaaaaaatcgcgacccgaaaaaaa

SEQ ID NO: 18637 - DNA, 535 bp, Artificial Sequence
  chemically treated genomic DNA (Homo sapiens) CpG-island No: 18637
aaaattcgtcgcgttcgaaggagagtgtggaggggtgcggggcgtcgcgcggtgttcggattttaaggtgggtaggggcgttcggaattttttttcgcgagtttttcgcgttcgtttattttgttcggcgtagagtagaagagttaggatagcggcggacggtatggcggattcgggcgtcgagtagttggcggtgtggggtcgggtatttaggtatcgggcgaggggcggttggattggcggtcggggtcgggttgcggtggtatcggcgcggggttgggggcgtagtgtttcggcgtgcgttcgtttgtcggtcgattttttcgtaagtttttttgtacggggttcgagtattgtagtggtaggagcggtggtagtagtagcgttttcgcgtttcgtttatatatttcgatttcggaaatgacgttagcggtgtcgttttttttttttttttttattttttaggtgtttagttttcgttcgtttttatttttaattttatttttcgttatttttggttttcgtcgtttggagt

SEQ ID NO: 18638 - DNA, 535 bp, Artificial Sequence
  chemically treated genomic DNA (Homo sapiens) CpG-island No: 18638
actccaaacgacgaaaaccaaaaataacgaaaaataaaattaaaaataaaaacgaacgaaaactaaacacctaaaaaataaaaaaaaaaaaaaaaaacgacaccgctaacgtcatttccgaaatcgaaatatataaacgaaacgcgaaaacgctactactaccaccgctcctaccactacaatactcgaaccccgtacaaaaaaacttacgaaaaaatcgaccgacaaacgaacgcacgccgaaacactacgcccccaaccccgcgccgataccaccgcaacccgaccccgaccgccaatccaaccgcccctcgcccgatacctaaatacccgaccccacaccgccaactactcgacgcccgaatccgccataccgtccgccgctatcctaactcttctactctacgccgaacaaaataaacgaacgcgaaaaactcgcgaaaaaaaattccgaacgcccctacccaccttaaaatccgaacaccgcgcgacgccccgcacccctccacactctccttcgaacgcgacgaatttt

SEQ ID NO: 18639 - DNA, 535 bp, Artificial Sequence
  chemically treated genomic DNA (Homo sapiens) CpG-island No: 18639
gttttaagcggcggaggttagaggtagcgaggggtgaggttagaggtgggggcgagcggggattggatatttggggagtggggaaaggggaagggggcggtatcgttgacgttattttcggggtcggggtatataagcggggcgcgagggcgttgttgttgttatcgtttttgttattgtagtgttcgagtttcgtgtaggggagtttgcgggaggatcgatcgatagacgaacgtacgtcgaggtattgcgtttttagtttcgcgtcggtgttatcgtagttcgatttcggtcgttagtttagtcgtttttcgttcggtgtttaggtgttcggttttatatcgttagttgttcggcgttcgggttcgttatgtcgttcgtcgttgttttggtttttttgttttgcgtcgggtaaggtgagcgagcgcggggagttcgcgggagagggtttcgggcgtttttgtttattttgaggttcgggtatcgcgcggcgtttcgtatttttttatattttttttcgggcgcggcgagtttt

SEQ ID NO: 18640 - DNA, 535 bp, Artificial Sequence
  chemically treated genomic DNA (Homo sapiens) CpG-island No: 18640
aaaactcgccgcgcccgaaaaaaaatataaaaaaatacgaaacgccgcgcgatacccgaacctcaaaataaacaaaaacgcccgaaaccctctcccgcgaactccccgcgctcgctcaccttacccgacgcaaaacaaaaaaaccaaaacaacgacgaacgacataacgaacccgaacgccgaacaactaacgatataaaaccgaacacctaaacaccgaacgaaaaacgactaaactaacgaccgaaatcgaactacgataacaccgacgcgaaactaaaaacgcaatacctcgacgtacgttcgtctatcgatcgatcctcccgcaaactcccctacacgaaactcgaacactacaataacaaaaacgataacaacaacaacgccctcgcgccccgcttatataccccgaccccgaaaataacgtcaacgataccgcccccttcccctttccccactccccaaatatccaatccccgctcgcccccacctctaacctcacccctcgctacctctaacctccgccgcttaaaac

SEQ ID NO: 18641 - DNA, 1584 bp, Artificial Sequence
  chemically treated genomic DNA (Homo sapiens) CpG-island No: 18641
tcggtcgtcgcgcgcgttttttcgttcggcgtgtgtttggttcggggaatcgggagggttcggcgatcgcgcggcggtcgtcgcgagggtgtgagcgcgcgtgggcgttcgtcgagtcgaggttatggtgtagtaaattaataatgtcgagaatacggaagcgttgttggtcggcgagagttcggattcgggcgtcggtttcgagttgggaatcgtttttttttttacgttcggttttatcgtttttacgggcggtaaggtcgacgattcgagttggtgtaagatttcgagtgggtatattaagcgatttatgaacgtttttatggtgtggtcgtagatcgagcggcgtaagattatggagtagtcgttcgatatgtataacgtcgagatttttaagcggttgggtaaacgttggaagttgtttaaagatagcgataagattttttttattcgagaggcggagcggttgcgttttaagtatatggttgattatttcgattataagtatcggtttaggaagaaggtgaagttcggtaacgttaattttagtttttcggtcgtcgttttttttaagtcgggggagaagggagataaggtcggtggtagtggcgggggcggttatgggggcggcggcggcggcgggagtagtaacgcggggggaggaggcggcggtgcgagtggcggcggcgttaattttaaatcggcgtagaaaaagagttgcggttttaaagtggcgggcggcgcgggcggtggggttagtaaatcgtacgttaagtttattttggtaggcggcggcggtggcggtaaagtagcggttgttttcgtcgttttttttttcgtcgaataggcgggggtcgtcgttttgttgattttgggcgtcgtcgtcgattattattcgttgtataaggcgcggatttttagcgtttcggttttcgttttttcggtagtttcggttttcgtagcgttcgcggtttcgggtaagtatttggcggagaagaaggtgaagcgcgtttatttgttcggcggtttgggtacgtcgtcgtcgttcgtgggcggcgtgggcgcgggagtcgattttagcgattttttgggtttgtacgaggaggagggcgcgggttgttcgttcgacgcgtttagtttgagcggtcgtagtagcgtcgtttcgtttttcgtcgtcggtcgttcgttcgtcgattatcgcggttacgttagtttgcgcgtcgtttcgttcgtttcgtttagcgcgttttcgtacgcgtttttttcggtttcgttttattttttttttttttttttttcgggtttttcgtttttcgacgacgagttcgaagacgatttgttcgatttgaattttagtttaaattttgagagtatgtttttgggtagttttagttcgtcgtcggcgttcgatcgggatttggattttaatttcgagttcggtttcggttcgtatttcgagttttcggattattgtacgttcgaggtgagcgagatgatttcgggagattggttcgagtttagtatttttaatttggtttttatttattgaagggcgcgtaggtagggagaagggtcggggggggt

SEQ ID NO: 18642 - DNA, 1584 bp, Artificial Sequence
  chemically treated genomic DNA (Homo sapiens) CpG-island No: 18642
accccccccgacccttctccctacctacgcgcccttcaataaataaaaaccaaattaaaaatactaaactcgaaccaatctcccgaaatcatctcgctcacctcgaacgtacaataatccgaaaactcgaaatacgaaccgaaaccgaactcgaaattaaaatccaaatcccgatcgaacgccgacgacgaactaaaactacccaaaaacatactctcaaaatttaaactaaaattcaaatcgaacaaatcgtcttcgaactcgtcgtcgaaaaacgaaaaacccgaaaaaaaaaaaaaaaaaaaataaaacgaaaccgaaaaaaacgcgtacgaaaacgcgctaaacgaaacgaacgaaacgacgcgcaaactaacgtaaccgcgataatcgacgaacgaacgaccgacgacgaaaaacgaaacgacgctactacgaccgctcaaactaaacgcgtcgaacgaacaacccgcgccctcctcctcgtacaaacccaaaaaatcgctaaaatcgactcccgcgcccacgccgcccacgaacgacgacgacgtacccaaaccgccgaacaaataaacgcgcttcaccttcttctccgccaaatacttacccgaaaccgcgaacgctacgaaaaccgaaactaccgaaaaaacgaaaaccgaaacgctaaaaatccgcgccttatacaacgaataataatcgacgacgacgcccaaaatcaacaaaacgacgacccccgcctattcgacgaaaaaaaaaacgacgaaaacaaccgctactttaccgccaccgccgccgcctaccaaaataaacttaacgtacgatttactaaccccaccgcccgcgccgcccgccactttaaaaccgcaactctttttctacgccgatttaaaattaacgccgccgccactcgcaccgccgcctcctccccccgcgttactactcccgccgccgccgccgcccccataaccgcccccgccactaccaccgaccttatctcccttctcccccgacttaaaaaaaacgacgaccgaaaaactaaaattaacgttaccgaacttcaccttcttcctaaaccgatacttataatcgaaataatcaaccatatacttaaaacgcaaccgctccgcctctcgaataaaaaaaatcttatcgctatctttaaacaacttccaacgtttacccaaccgcttaaaaatctcgacgttatacatatcgaacgactactccataatcttacgccgctcgatctacgaccacaccataaaaacgttcataaatcgcttaatatacccactcgaaatcttacaccaactcgaatcgtcgaccttaccgcccgtaaaaacgataaaaccgaacgtaaaaaaaaaaacgattcccaactcgaaaccgacgcccgaatccgaactctcgccgaccaacaacgcttccgtattctcgacattattaatttactacaccataacctcgactcgacgaacgcccacgcgcgctcacaccctcgcgacgaccgccgcgcgatcgccgaaccctcccgattccccgaaccaaacacacgccgaacgaaaaaacgcgcgcgacgaccga

SEQ ID NO: 18643 - DNA, 1584 bp, Artificial Sequence
  chemically treated genomic DNA (Homo sapiens) CpG-island No: 18643
atttttttcggtttttttttttgtttgcgcgttttttagtaggtgaaaattaggttggagatgttggattcgagttagtttttcgagattatttcgtttatttcgggcgtgtagtagttcgggaattcgaagtgcgagtcggagtcgggttcgaagttaaaatttaggtttcggtcgagcgtcgacgacgaattgaagttgtttagggatatgtttttaaagtttgagttggggtttaggtcgagtaggtcgttttcgaattcgtcgtcggaggacgaggagttcgaggaggaggaagaggaggagtgggacgaggtcgaggaggacgcgtgcgagggcgcgttggacggggcgggcgaggcggcgcgtaggttggcgtagtcgcggtggtcggcgggcgagcggtcggcggcgggggacgaggcggcgttgttgcggtcgtttaggttgggcgcgtcgggcgagtagttcgcgttttttttttcgtataggtttagggggtcgttggggtcggttttcgcgtttacgtcgtttacgggcgacgacgacgtgtttaggtcgtcgaataggtagacgcgttttattttttttttcgttaggtgtttgttcggggtcgcgagcgttgcggaggtcgaggttgtcgaggaggcggaggtcgaggcgttgggagttcgcgttttgtatagcgagtggtggtcgacgacggcgtttagggttaataggacggcggttttcgtttgttcggcgaagaaggagacgacggaggtagtcgttgttttatcgttatcgtcgtcgtttgttaggatgagtttggcgtgcggtttgttaattttatcgttcgcgtcgttcgttattttggagtcgtagttttttttttgcgtcggtttggagttggcgtcgtcgttattcgtatcgtcgtttttttttttcgcgttgttgttttcgtcgtcgtcgtcgtttttatggtcgttttcgttattgttatcgattttgttttttttttttttcggtttggaggaggcggcggtcgaggagttggagttggcgttgtcggattttattttttttttgggtcggtatttgtagtcggggtagttagttatgtgtttgaggcgtagtcgtttcgtttttcgaatgaaagggattttgtcgttgtttttgagtagtttttagcgtttgtttagtcgtttggagatttcggcgttgtgtatgtcgggcgattgttttatgattttgcgtcgttcgatttgcgattatattatgaaggcgtttatgggtcgtttgatgtgtttattcggggttttgtattagttcgggtcgtcggttttgtcgttcgtggaggcggtggagtcgggcgtgggggaggaggcgatttttagttcgaggtcggcgttcgagttcgagttttcgtcggttagtagcgttttcgtgttttcggtattgttggtttgttgtattatggtttcggttcggcgggcgtttacgcgcgtttatattttcgcggcggtcgtcgcgcgatcgtcgggttttttcggtttttcgggttaagtatacgtcgaacgggaagacgcgcgcggcggtcga

SEQ ID NO: 18644 - DNA, 1584 bp, Artificial Sequence
  chemically treated genomic DNA (Homo sapiens) CpG-island No: 18644
tcgaccgccgcgcgcgtcttcccgttcgacgtatacttaacccgaaaaaccgaaaaaacccgacgatcgcgcgacgaccgccgcgaaaatataaacgcgcgtaaacgcccgccgaaccgaaaccataatacaacaaaccaacaataccgaaaacacgaaaacgctactaaccgacgaaaactcgaactcgaacgccgacctcgaactaaaaatcgcctcctcccccacgcccgactccaccgcctccacgaacgacaaaaccgacgacccgaactaatacaaaaccccgaataaacacatcaaacgacccataaacgccttcataatataatcgcaaatcgaacgacgcaaaatcataaaacaatcgcccgacatacacaacgccgaaatctccaaacgactaaacaaacgctaaaaactactcaaaaacaacgacaaaatccctttcattcgaaaaacgaaacgactacgcctcaaacacataactaactaccccgactacaaataccgacccaaaaaaaaaataaaatccgacaacgccaactccaactcctcgaccgccgcctcctccaaaccgaaaaaaaaaaaaaacaaaatcgataacaataacgaaaacgaccataaaaacgacgacgacgacgaaaacaacaacgcgaaaaaaaaaaacgacgatacgaataacgacgacgccaactccaaaccgacgcaaaaaaaaaactacgactccaaaataacgaacgacgcgaacgataaaattaacaaaccgcacgccaaactcatcctaacaaacgacgacgataacgataaaacaacgactacctccgtcgtctccttcttcgccgaacaaacgaaaaccgccgtcctattaaccctaaacgccgtcgtcgaccaccactcgctatacaaaacgcgaactcccaacgcctcgacctccgcctcctcgacaacctcgacctccgcaacgctcgcgaccccgaacaaacacctaacgaaaaaaaaaataaaacgcgtctacctattcgacgacctaaacacgtcgtcgtcgcccgtaaacgacgtaaacgcgaaaaccgaccccaacgaccccctaaacctatacgaaaaaaaaaacgcgaactactcgcccgacgcgcccaacctaaacgaccgcaacaacgccgcctcgtcccccgccgccgaccgctcgcccgccgaccaccgcgactacgccaacctacgcgccgcctcgcccgccccgtccaacgcgccctcgcacgcgtcctcctcgacctcgtcccactcctcctcttcctcctcctcgaactcctcgtcctccgacgacgaattcgaaaacgacctactcgacctaaaccccaactcaaactttaaaaacatatccctaaacaacttcaattcgtcgtcgacgctcgaccgaaacctaaattttaacttcgaacccgactccgactcgcacttcgaattcccgaactactacacgcccgaaataaacgaaataatctcgaaaaactaactcgaatccaacatctccaacctaattttcacctactaaaaaacgcgcaaacaaaaaaaaaaaccgaaaaaaat

SEQ ID NO: 18645 - DNA, 673 bp, Artificial Sequence
  chemically treated genomic DNA (Homo sapiens) CpG-island No: 18645
gtgggcgcggagtaggttcggattttcgcgtggcgtcgttttagttcgtgttttttgtagtttttgtcgttggatggggaattcgttttggttttaggagtcggattcggcgttttagacgtgggttcgtatttggattgtggcgcgggtgaggcggtcgggtaggggcggggttttggaaaggtatgtttaggggcggggattggagggaaggcgcgtcgaggggggcgaggatcggagggagggcgttttcgggggcgtggtttagggagtggcggaagtgtttcgaagcggggtttgggaggtcgtgtttagacgcgtggcgtggcgtggcgtggcgtggtgtggcgcggcgtttgtttcgtggagtttagggatgtgtttcggtttaggcgaatttgtcgtttttcgcgattttgatcgttttttttggtatgattcgtatttgtggcgttttggggacgaggtatttggtttttttttcgtggacgtcgagcgcgtgttttgtcgttacgacgacgtttttttttcgtttagtgttttttttcgcgtggggttcggttttggcgttagtttcgtgcgtgttcgtagtatttcggttttgggtcgggtgagtattgaggggagggaggttcgggttttttttttttatttcggttcgatttcgtttttt

SEQ ID NO: 18646 - DNA, 673 bp, Artificial Sequence
  chemically treated genomic DNA (Homo sapiens) CpG-island No: 18646
aaaaaacgaaatcgaaccgaaataaaaaaaaaaaacccgaacctccctcccctcaatactcacccgacccaaaaccgaaatactacgaacacgcacgaaactaacgccaaaaccgaaccccacgcgaaaaaaaacactaaacgaaaaaaaaacgtcgtcgtaacgacaaaacacgcgctcgacgtccacgaaaaaaaaaccaaatacctcgtccccaaaacgccacaaatacgaatcataccaaaaaaaacgatcaaaatcgcgaaaaacgacaaattcgcctaaaccgaaacacatccctaaactccacgaaacaaacgccgcgccacaccacgccacgccacgccacgccacgcgtctaaacacgacctcccaaaccccgcttcgaaacacttccgccactccctaaaccacgcccccgaaaacgccctccctccgatcctcgcccccctcgacgcgccttccctccaatccccgcccctaaacatacctttccaaaaccccgcccctacccgaccgcctcacccgcgccacaatccaaatacgaacccacgtctaaaacgccgaatccgactcctaaaaccaaaacgaattccccatccaacgacaaaaactacaaaaaacacgaactaaaacgacgccacgcgaaaatccgaacctactccgcgcccac

SEQ ID NO: 18647 - DNA, 673 bp, Artificial Sequence
  chemically treated genomic DNA (Homo sapiens) CpG-island No: 18647
gaggggcggggtcgggtcgaggtggggagaggggattcgagtttttttttttttagtgtttattcggtttagagtcgagatgttgcggatacgtacggggttagcgttagggtcgagttttacgcggaaggaggtattaggcggaaagaagacgtcgtcgtggcggtagggtacgcgttcggcgtttacgaagaagaggttaggtgtttcgtttttagagcgttataggtgcgggttatgttaggagaagcggttagagtcgcggaagacggtaggttcgtttgagtcggagtatatttttgagttttacggaataagcgtcgcgttatattacgttacgttacgttacgttacgcgtttgagtacgattttttaagtttcgtttcgggatattttcgttattttttaaattacgttttcggaggcgtttttttttcggttttcgtttttttcgacgcgttttttttttagttttcgtttttgaatatgtttttttagagtttcgtttttgttcgatcgttttattcgcgttatagtttaggtgcgagtttacgtttgagacgtcgaattcggtttttgaagttaggacgagttttttatttagcggtaggagttgtaagagatacgggttgaggcggcgttacgcgggggttcgggtttgtttcgcgtttat

SEQ ID NO: 18648 - DNA, 673 bp, Artificial Sequence
  chemically treated genomic DNA (Homo sapiens) CpG-island No: 18648
ataaacgcgaaacaaacccgaacccccgcgtaacgccgcctcaacccgtatctcttacaactcctaccgctaaataaaaaactcgtcctaacttcaaaaaccgaattcgacgtctcaaacgtaaactcgcacctaaactataacgcgaataaaacgatcgaacaaaaacgaaactctaaaaaaacatattcaaaaacgaaaactaaaaaaaaaacgcgtcgaaaaaaacgaaaaccgaaaaaaaaacgcctccgaaaacgtaatttaaaaaataacgaaaatatcccgaaacgaaacttaaaaaatcgtactcaaacgcgtaacgtaacgtaacgtaacgtaatataacgcgacgcttattccgtaaaactcaaaaatatactccgactcaaacgaacctaccgtcttccgcgactctaaccgcttctcctaacataacccgcacctataacgctctaaaaacgaaacacctaacctcttcttcgtaaacgccgaacgcgtaccctaccgccacgacgacgtcttctttccgcctaatacctccttccgcgtaaaactcgaccctaacgctaaccccgtacgtatccgcaacatctcgactctaaaccgaataaacactaaaaaaaaaaaaactcgaatcccctctccccacctcgacccgaccccgcccctc

SEQ ID NO: 18649 - DNA, 798 bp, Artificial Sequence
  chemically treated genomic DNA (Homo sapiens) CpG-island No: 18649
tcgtgaggtcgatacggagatttaggtggtgttggtggagaatgggttcgagataggcggagcggggcggttggttcgggtttttttggcggacgtcgtcgagaacggtaatcgcgttcgttttatttcgtttcgtcgcgtttcgtttcgtcgcggggaagattgagtcggttttttcgtcgtaggcgaggttttcggcgttttggaggcgattatgcgggagtcgggcgtatacgtttggggtagtttcgcggttgggttggcgggcggcgtggcggttgtcgtgttgttggcgttgttggttttgttggtggcgtcgtcgttgttgcgtcgcgcggggaggtttaggtacgcggggcgggggcgcggaggtggggttgggggttgtttcgaggggtttacgttgcgttttcgttacgtttttaggtggaggaggtacgaggcggcggtttcggttggagcgtttttcggttttcgtaattcggtgttcgacgtgacggttttcgaggagttggtgagggggttggaggggggatcggggttttttcggggtcgggattcggcgtcgatcgtcgtttgattttgttatttcgtagtttttgtcgcggcggtttagtttggtttcgaaggcggtcgtagatagtattagttatagttatttcgttaattttttgttcgtcggggtcgaggtcgaggtttgagcggtcgtttgatcgtcgattttggggttttttattcgttttggttttagtcgaattgggggttagttattttttcgtttagtttttaaattttttt

SEQ ID NO: 18650 - DNA, 798 bp, Artificial Sequence
  chemically treated genomic DNA (Homo sapiens) CpG-island No: 18650
aaaaaaatttaaaaactaaacgaaaaaataactaacccccaattcgactaaaaccaaaacgaataaaaaaccccaaaatcgacgatcaaacgaccgctcaaacctcgacctcgaccccgacgaacaaaaaattaacgaaataactataactaatactatctacgaccgccttcgaaaccaaactaaaccgccgcgacaaaaactacgaaataacaaaatcaaacgacgatcgacgccgaatcccgaccccgaaaaaaccccgatcccccctccaaccccctcaccaactcctcgaaaaccgtcacgtcgaacaccgaattacgaaaaccgaaaaacgctccaaccgaaaccgccgcctcgtacctcctccacctaaaaacgtaacgaaaacgcaacgtaaacccctcgaaacaacccccaaccccacctccgcgcccccgccccgcgtacctaaacctccccgcgcgacgcaacaacgacgacgccaccaacaaaaccaacaacgccaacaacacgacaaccgccacgccgcccgccaacccaaccgcgaaactaccccaaacgtatacgcccgactcccgcataatcgcctccaaaacgccgaaaacctcgcctacgacgaaaaaaccgactcaatcttccccgcgacgaaacgaaacgcgacgaaacgaaataaaacgaacgcgattaccgttctcgacgacgtccgccaaaaaaacccgaaccaaccgccccgctccgcctatctcgaacccattctccaccaacaccacctaaatctccgtatcgacctcacga

SEQ ID NO: 18651 - DNA, 798 bp, Artificial Sequence
  chemically treated genomic DNA (Homo sapiens) CpG-island No: 18651
ggggaggtttgggggttggacgaggaggtggttagtttttagttcgattggggttagagcgggtggagagttttaaggtcgacggttaggcggtcgtttaggtttcggtttcggtttcggcgaatagagggttgacgaagtaattgtggttggtgttgtttgcggtcgttttcggaattaggttgagtcgtcgcggtaggggttgcggggtgatagggttaggcggcggtcggcgtcgagtttcggtttcgaggaggtttcggttttttttttagtttttttattagtttttcggaggtcgttacgtcgaatatcgggttgcggaagtcgaggggcgttttagtcggggtcgtcgtttcgtgttttttttatttgagggcgtagcggggacgtagcgtgagtttttcggagtaatttttagttttattttcgcgttttcgtttcgcgtatttgagttttttcgcgcggcgtagtagcggcggcgttattagtaggattagtagcgttagtagtacggtagtcgttacgtcgttcgttagtttagtcgcggagttgttttagacgtgtgcgttcgattttcgtatggtcgtttttaggacgtcgagggtttcgtttgcgacggaggggtcggtttagtttttttcgcggcggggcgaggcgcggcggggcgggatggggcgggcgcggttatcgttttcggcgacgttcgttaggagggttcgggttagtcgtttcgtttcgtttgtttcgggtttattttttattagtattatttggattttcgtatcggttttacgg

SEQ ID NO: 18652 - DNA, 798 bp, Artificial Sequence
  chemically treated genomic DNA (Homo sapiens) CpG-island No: 18652
ccgtaaaaccgatacgaaaatccaaataatactaataaaaaataaacccgaaacaaacgaaacgaaacgactaacccgaaccctcctaacgaacgtcgccgaaaacgataaccgcgcccgccccatcccgccccgccgcgcctcgccccgccgcgaaaaaaactaaaccgacccctccgtcgcaaacgaaaccctcgacgtcctaaaaacgaccatacgaaaatcgaacgcacacgtctaaaacaactccgcgactaaactaacgaacgacgtaacgactaccgtactactaacgctactaatcctactaataacgccgccgctactacgccgcgcgaaaaaactcaaatacgcgaaacgaaaacgcgaaaataaaactaaaaattactccgaaaaactcacgctacgtccccgctacgccctcaaataaaaaaaacacgaaacgacgaccccgactaaaacgcccctcgacttccgcaacccgatattcgacgtaacgacctccgaaaaactaataaaaaaactaaaaaaaaaaccgaaacctcctcgaaaccgaaactcgacgccgaccgccgcctaaccctatcaccccgcaacccctaccgcgacgactcaacctaattccgaaaacgaccgcaaacaacaccaaccacaattacttcgtcaaccctctattcgccgaaaccgaaaccgaaacctaaacgaccgcctaaccgtcgaccttaaaactctccacccgctctaaccccaatcgaactaaaaactaaccacctcctcgtccaacccccaaacctcccc

SEQ ID NO: 18653 - DNA, 1106 bp, Artificial Sequence
  chemically treated genomic DNA (Homo sapiens) CpG-island No: 18653
tttcgtgtaggagcggttacggcgtttagaggaattcgcgggtgtaaatttcgggagcggtttgtagggtgacggcggcggttttcgtttttcggtatttgatgatgtcgtcgttgtggtttcggtagaatttttgtttgtgttttcgcgggttgtatattacgtcgattttcgttacgaagtatacgatttttttggtcgtagtgtagtagaggttgttgcggtattggtggtttcggtagtcgtatatttattcgagtcgtaggtggtagttcggggcgtttcgggtcgttatgtcggggcgtttattcgtcgttttcgttcgggttcgcggcggcgacgggaggcggcggcggttcggtaacgaaagttttttcgttggttgtcgggatttttcgttagtcgcgttttttaagtcgcgttcgttaggtgtatttcgtttcgggggtcgtcgtcgttttagtttataggcgggaggaaaattttcgtttcgcggaatatgttgagggtcgcgagcgtcgtcggttgttaagtggatgtttagagtttttcgttcgtttcggttcgtttagtttttttagttcgtagcgtttgggtcgagagcgagggttcgtttttagttttttagtcgtcgttcgcgtacgtagtttttagtttcggttatttgcggcgttcgcgtttcgtcgcggttttgtagttatagtttggcggattcgcgtcgcgtatttcgaaatcgagcgagtcgagtcgagtcgagtcgagcggcgggcgcgcggttttgcgtggtttcgttttttttcgcgtttatttcgtttttttcggagtcgagaagaggttggagttcgcggggttacggtttagttgcggagtcgttgggatcgcgtttttgtaagtgcgcgggtcggtgagttttttttcgttgagttgtttaagtttaggcggattttcggcgatttcgggttttcgttgttttgcgtttttaatcgggaagtatttgtcggtttcgtacggtttttgtatttagcgtaggttacgtttttgtttgggaaaatttatatcgggatgttaaatttttttttttacgtttgatattttgtgtgttttgt

SEQ ID NO: 18654 - DNA, 1106 bp, Artificial Sequence
  chemically treated genomic DNA (Homo sapiens) CpG-island No: 18654
acaaaacacacaaaatatcaaacgtaaaaaaaaaaatttaacatcccgatataaattttcccaaacaaaaacgtaacctacgctaaatacaaaaaccgtacgaaaccgacaaatacttcccgattaaaaacgcaaaacaacgaaaacccgaaatcgccgaaaatccgcctaaacttaaacaactcaacgaaaaaaaactcaccgacccgcgcacttacaaaaacgcgatcccaacgactccgcaactaaaccgtaaccccgcgaactccaacctcttctcgactccgaaaaaaacgaaataaacgcgaaaaaaaacgaaaccacgcaaaaccgcgcgcccgccgctcgactcgactcgactcgactcgctcgatttcgaaatacgcgacgcgaatccgccaaactataactacaaaaccgcgacgaaacgcgaacgccgcaaataaccgaaactaaaaactacgtacgcgaacgacgactaaaaaactaaaaacgaaccctcgctctcgacccaaacgctacgaactaaaaaaactaaacgaaccgaaacgaacgaaaaactctaaacatccacttaacaaccgacgacgctcgcgaccctcaacatattccgcgaaacgaaaattttcctcccgcctataaactaaaacgacgacgacccccgaaacgaaatacacctaacgaacgcgacttaaaaaacgcgactaacgaaaaatcccgacaaccaacgaaaaaactttcgttaccgaaccgccgccgcctcccgtcgccgccgcgaacccgaacgaaaacgacgaataaacgccccgacataacgacccgaaacgccccgaactaccacctacgactcgaataaatatacgactaccgaaaccaccaataccgcaacaacctctactacactacgaccaaaaaaatcgtatacttcgtaacgaaaatcgacgtaatatacaacccgcgaaaacacaaacaaaaattctaccgaaaccacaacgacgacatcatcaaataccgaaaaacgaaaaccgccgccgtcaccctacaaaccgctcccgaaatttacacccgcgaattcctctaaacgccgtaaccgctcctacacgaaa

SEQ ID NO: 18655 - DNA, 1106 bp, Artificial Sequence
  chemically treated genomic DNA (Homo sapiens) CpG-island No: 18655
gtaagatatataaggtattaagcgtaaaaaagagaatttagtatttcggtgtggatttttttaggtaaaaacgtggtttacgttgggtgtagggatcgtgcggaatcggtaggtgtttttcggttgaggacgtaaagtagcgggagttcggggtcgtcgagggttcgtttgggtttaagtagtttaacgagggagggtttatcggttcgcgtatttgtagagacgcggttttagcgatttcgtaattagatcgtggtttcgcgaattttagttttttttcggtttcgggaggggcggagtgagcgcgggagggggcggggttacgtaaggtcgcgcgttcgtcgttcggttcggttcggttcggttcgttcggtttcggggtgcgcggcgcgggttcgttaggttgtggttataaagtcgcggcggggcgcgagcgtcgtaggtgatcggggttgggagttgcgtgcgcgggcggcggttgaggagttggaggcgggttttcgttttcggtttaggcgttacgggttgaggagattaggcgagtcgaggcgggcgaagggttttgggtatttatttgatagtcggcggcgttcgcggtttttagtatgtttcgcgaggcgagggtttttttttcgtttgtgggttgaggcggcggcggttttcgaaacgagatgtatttgacgggcgcggtttagaggacgcggttggcgggaagtttcggtagttagcgggagggttttcgttgtcgggtcgtcgtcgtttttcgtcgtcgtcgcgggttcgagcgggagcggcgggtgggcgtttcgatatggcggttcggagcgtttcgagttgttatttgcggttcgagtgggtgtacggttatcggggttattagtgtcgtaataatttttattatattgcggttaaggagatcgtatatttcgtggcgggggtcggcgtggtgtatagttcgcgggagtataggtagaagttttatcggggttatagcgacgatattattaggtatcggggagcgggggtcgtcgtcgttattttgtaagtcgttttcggagtttgtattcgcgggtttttttggacgtcgtgatcgtttttgtacggag

SEQ ID NO: 18656 - DNA, 1106 bp, Artificial Sequence
  chemically treated genomic DNA (Homo sapiens) CpG-island No: 18656
ctccgtacaaaaacgatcacgacgtccaaaaaaacccgcgaatacaaactccgaaaacgacttacaaaataacgacgacgacccccgctccccgatacctaataatatcgtcgctataaccccgataaaacttctacctatactcccgcgaactatacaccacgccgacccccgccacgaaatatacgatctccttaaccgcaatataataaaaattattacgacactaataaccccgataaccgtacacccactcgaaccgcaaataacaactcgaaacgctccgaaccgccatatcgaaacgcccacccgccgctcccgctcgaacccgcgacgacgacgaaaaacgacgacgacccgacaacgaaaaccctcccgctaactaccgaaacttcccgccaaccgcgtcctctaaaccgcgcccgtcaaatacatctcgtttcgaaaaccgccgccgcctcaacccacaaacgaaaaaaaaaccctcgcctcgcgaaacatactaaaaaccgcgaacgccgccgactatcaaataaatacccaaaacccttcgcccgcctcgactcgcctaatctcctcaacccgtaacgcctaaaccgaaaacgaaaacccgcctccaactcctcaaccgccgcccgcgcacgcaactcccaaccccgatcacctacgacgctcgcgccccgccgcgactttataaccacaacctaacgaacccgcgccgcgcaccccgaaaccgaacgaaccgaaccgaaccgaaccgaacgacgaacgcgcgaccttacgtaaccccgccccctcccgcgctcactccgcccctcccgaaaccgaaaaaaaactaaaattcgcgaaaccacgatctaattacgaaatcgctaaaaccgcgtctctacaaatacgcgaaccgataaaccctccctcgttaaactacttaaacccaaacgaaccctcgacgaccccgaactcccgctactttacgtcctcaaccgaaaaacacctaccgattccgcacgatccctacacccaacgtaaaccacgtttttacctaaaaaaatccacaccgaaatactaaattctcttttttacgcttaataccttatatatcttac

SEQ ID NO: 18657 - DNA, 711 bp, Artificial Sequence
  chemically treated genomic DNA (Homo sapiens) CpG-island No: 18657
gttatttttatgtcgttcgaatcgatgtttttcgtgttgtttcgtgtttggacggtcggttttattaggcgtagaggggaagaattttagtttcggggtttggttggggtttcgggagtcgcgggaaagcgagtttgcggcgcgggaagtttggttagtagatttcggcggcgttcggttagttttttcgtttcggtttttcggttgtttaattatggcgcggttcgggagcgcgtcgcggttaattaggagcggcgggagcggcgtcgggagtcggcgggcgtagagcgagttcgagtttggagtcggcgtcggcgttgcggtcgggagggatcgtggcgagagtagtgcggtcgggtgggtatttcgcggttagagaagtcggttttgtcgcggcgatttttcggcggacgtcggggattttgcggatcgcggcgtaggtaattgtatttacgtttcgtagtaggaggcgagcgcgttttttaagaggggtttcgtaggtggagcgggcggggggcgggggcgggggcgggggcgggtcggtcgcgaggttttagcgtcgttgtgttttttggcgttttcgagtttgtttggtcgagttacgcggaggcgcggcgtttttattagtcgcgggcgtttcggggtgggggaggacgaggggattttgtttaaggtaggtaggggtggaggaggatttttgcgatatttggt

SEQ ID NO: 18658 - DNA, 711 bp, Artificial Sequence
  chemically treated genomic DNA (Homo sapiens) CpG-island No: 18658
accaaatatcgcaaaaatcctcctccacccctacctaccttaaacaaaatcccctcgtcctcccccaccccgaaacgcccgcgactaataaaaacgccgcgcctccgcgtaactcgaccaaacaaactcgaaaacgccaaaaaacacaacgacgctaaaacctcgcgaccgacccgcccccgcccccgcccccgccccccgcccgctccacctacgaaacccctcttaaaaaacgcgctcgcctcctactacgaaacgtaaatacaattacctacgccgcgatccgcaaaatccccgacgtccgccgaaaaatcgccgcgacaaaaccgacttctctaaccgcgaaatacccacccgaccgcactactctcgccacgatccctcccgaccgcaacgccgacgccgactccaaactcgaactcgctctacgcccgccgactcccgacgccgctcccgccgctcctaattaaccgcgacgcgctcccgaaccgcgccataattaaacaaccgaaaaaccgaaacgaaaaaactaaccgaacgccgccgaaatctactaaccaaacttcccgcgccgcaaactcgctttcccgcgactcccgaaaccccaaccaaaccccgaaactaaaattcttcccctctacgcctaataaaaccgaccgtccaaacacgaaacaacacgaaaaacatcgattcgaacgacataaaaataac

SEQ ID NO: 18659 - DNA, 711 bp, Artificial Sequence
  chemically treated genomic DNA (Homo sapiens) CpG-island No: 18659
gttaggtgtcgtaggagtttttttttatttttatttgttttaagtagagttttttcgtttttttttatttcgggacgttcgcggttggtggaaacgtcgcgttttcgcgtggttcgattaggtaggttcgggggcgttagggggtatagcggcgttaggatttcgcggtcggttcgttttcgttttcgttttcgtttttcgttcgttttatttgcggggttttttttggggggcgcgttcgttttttgttgcggggcgtgggtgtagttatttgcgtcgcggttcgtagggttttcggcgttcgtcgaaaggtcgtcgcggtaaagtcggtttttttggtcgcgggatatttattcggtcgtattgttttcgttacgatttttttcggtcgtagcgtcgacgtcggttttagattcgagttcgttttgcgttcgtcggttttcggcgtcgttttcgtcgtttttgattggtcgcggcgcgttttcgagtcgcgttatgattgggtagtcggggagtcggggcggggggattggtcgggcgtcgtcgggatttgttggttaagtttttcgcgtcgtagattcgttttttcgcggttttcggggttttaattagatttcgaagttgggattttttttttttgcgtttagtggggtcggtcgtttaggtacgaggtaatacggaaagtatcgattcgagcgatatggaaatggt

SEQ ID NO: 18660 - DNA, 711 bp, Artificial Sequence
  chemically treated genomic DNA (Homo sapiens) CpG-island No: 18660
accatttccatatcgctcgaatcgatactttccgtattacctcgtacctaaacgaccgaccccactaaacgcaaaaaaaaaaaatcccaacttcgaaatctaattaaaaccccgaaaaccgcgaaaaaacgaatctacgacgcgaaaaacttaaccaacaaatcccgacgacgcccgaccaatccccccgccccgactccccgactacccaatcataacgcgactcgaaaacgcgccgcgaccaatcaaaaacgacgaaaacgacgccgaaaaccgacgaacgcaaaacgaactcgaatctaaaaccgacgtcgacgctacgaccgaaaaaaatcgtaacgaaaacaatacgaccgaataaatatcccgcgaccaaaaaaaccgactttaccgcgacgacctttcgacgaacgccgaaaaccctacgaaccgcgacgcaaataactacacccacgccccgcaacaaaaaacgaacgcgccccccaaaaaaaaccccgcaaataaaacgaacgaaaaacgaaaacgaaaacgaaaacgaaccgaccgcgaaatcctaacgccgctataccccctaacgcccccgaacctacctaatcgaaccacgcgaaaacgcgacgtttccaccaaccgcgaacgtcccgaaataaaaaaaaacgaaaaaactctacttaaaacaaataaaaataaaaaaaaactcctacgacacctaac

SEQ ID NO: 18661 - DNA, 1199 bp, Artificial Sequence
  chemically treated genomic DNA (Homo sapiens) CpG-island No: 18661
aagagttcgtgtgagtggcgtgtacgttaagagttcgtgtgagtggcgtgtacgttacgagttcgtgtgagtggcgtgtacgttacgagtttgtgagcggcgtgtacgttacgagtttgtgagcggcgtgtacgttacgagtttgtgagtggcgtgtacgttaagagttcgtgtgagtggcgtgtacgttacgagttcgtgtgagtggcgtgtacgttacgagtttgtgagtggcgtgtacgttacgagtttgtgagtggcgtgtacgttacgagtttgtgagtggcgtgtacgttacgaatttgtgggtggcgtgtacgttacgagttcgtgtgagtggcgtgtacgttacgagtttgtgagtggcgtgtacgttacgagttcgtgtgagtggtgtgtacgttataagtttgtgaatggcgtgtacgttacgagtttgtgagtggcgtgtatattacgagtttgtgagtggcgtgtacgttacgagtttgtgagtggcgtgtacgttacgagttcgtgtgagtggtgtgtacgttataagtttgtgaatggcgtgtacgttacgagtttgtgagtggcgtgtatattacgagtttgtgagtggcgtgtacgttattagttcgtgtgagtggtgtgtacgttacgagttcgtgtgagtggtgtgtacgttataagtttgtgagtggcgtgtacgttacgagtttgtgagtggcgtgtacgttgagttcgtgtgagtggtgtgtacgttacgagtttgtgagtggcgtgtacgttacgagtttgtgagtggcgtgtacgttgagttcgtgtgagtggtgtgtacgttacgagttcgtgtgagtggcgtgtacgttacgagtttgtgagtggcgtgtacgttacgagtttgtgggtggtgtgtacgttacgagttcgtgtgagtggcgtgtacgttataagtttgtgagtggtgtgtacgttacgagtttgtgattggtgtgtacgttacgagtgcgtgtgagtggcgtgtacgttacgagttcgtgtgagtggcgtgtacgttacgagttcgtgtgagtggtgtgtatgttacgagtttgtgattggtgtgtacgttacgagtgcgtgtgagtggcgtgtacgttaagagttcgtgtgagttgttgttgaggtaggaatgtgggtgggatgatagcgagatatttatgtttagttacgtt

SEQ ID NO: 18662 - DNA, 1199 bp, Artificial Sequence
  chemically treated genomic DNA (Homo sapiens) CpG-island No: 18662
aacgtaactaaacataaatatctcgctatcatcccacccacattcctacctcaacaacaactcacacgaactcttaacgtacacgccactcacacgcactcgtaacgtacacaccaatcacaaactcgtaacatacacaccactcacacgaactcgtaacgtacacgccactcacacgaactcgtaacgtacacgccactcacacgcactcgtaacgtacacaccaatcacaaactcgtaacgtacacaccactcacaaacttataacgtacacgccactcacacgaactcgtaacgtacacaccacccacaaactcgtaacgtacacgccactcacaaactcgtaacgtacacgccactcacacgaactcgtaacgtacacaccactcacacgaactcaacgtacacgccactcacaaactcgtaacgtacacgccactcacaaactcgtaacgtacacaccactcacacgaactcaacgtacacgccactcacaaactcgtaacgtacacgccactcacaaacttataacgtacacaccactcacacgaactcgtaacgtacacaccactcacacgaactaataacgtacacgccactcacaaactcgtaatatacacgccactcacaaactcgtaacgtacacgccattcacaaacttataacgtacacaccactcacacgaactcgtaacgtacacgccactcacaaactcgtaacgtacacgccactcacaaactcgtaatatacacgccactcacaaactcgtaacgtacacgccattcacaaacttataacgtacacaccactcacacgaactcgtaacgtacacgccactcacaaactcgtaacgtacacgccactcacacgaactcgtaacgtacacgccacccacaaattcgtaacgtacacgccactcacaaactcgtaacgtacacgccactcacaaactcgtaacgtacacgccactcacaaactcgtaacgtacacgccactcacacgaactcgtaacgtacacgccactcacacgaactcttaacgtacacgccactcacaaactcgtaacgtacacgccgctcacaaactcgtaacgtacacgccgctcacaaactcgtaacgtacacgccactcacacgaactcgtaacgtacacgccactcacacgaactcttaacgtacacgccactcacacgaactctt

SEQ ID NO: 18663 - DNA, 1199 bp, Artificial Sequence
  chemically treated genomic DNA (Homo sapiens) CpG-island No: 18663
aacgtaattagatatagatatttcgttgttattttatttatatttttgttttagtagtaatttatacggatttttaacgtatacgttatttatacgtattcgtaacgtgtatattagttatagattcgtaatatgtatattatttatacggattcgtaacgtgtacgttatttatacggattcgtaacgtgtacgttatttatacgtattcgtaacgtgtatattagttatagattcgtaacgtgtatattatttatagatttgtaacgtgtacgttatttatacggattcgtaacgtgtatattatttatagattcgtaacgtgtacgttatttatagattcgtaacgtgtacgttatttatacggattcgtaacgtgtatattatttatacggatttaacgtgtacgttatttatagattcgtaacgtgtacgttatttatagattcgtaacgtgtatattatttatacggatttaacgtgtacgttatttatagattcgtaacgtgtacgttatttatagatttgtaacgtatatattatttatacggattcgtaacgtgtatattatttatacggattggtaacgtgtacgttatttatagattcgtaatgtgtacgttatttatagattcgtaacgtgtacgttatttatagatttgtaacgtatatattatttatacggattcgtaacgtgtacgttatttatagattcgtaacgtgtacgttatttatagattcgtaatgtgtacgttatttatagattcgtaacgtgtacgttatttatagatttgtaacgtatatattatttatacggattcgtaacgtgtacgttatttatagattcgtaacgtgtacgttatttatacggattcgtaacgtgtacgttatttatagattcgtaacgtgtacgttatttatagattcgtaacgtgtacgttatttatagattcgtaacgtgtacgttatttatagattcgtaacgtgtacgttatttatacggattcgtaacgtgtacgttatttatacggatttttaacgtgtacgttatttatagattcgtaacgtgtacgtcgtttatagattcgtaacgtgtacgtcgtttatagattcgtaacgtgtacgttatttatacggattcgtaacgtgtacgttatttatacggatttttaacgtgtacgttatttatacggattttt

SEQ ID NO: 18664 - DNA, 1199 bp, Artificial Sequence
  chemically treated genomic DNA (Homo sapiens) CpG-island No: 18664
aaaaatccgtataaataacgtacacgttaaaaatccgtataaataacgtacacgttacgaatccgtataaataacgtacacgttacgaatctataaacgacgtacacgttacgaatctataaacgacgtacacgttacgaatctataaataacgtacacgttaaaaatccgtataaataacgtacacgttacgaatccgtataaataacgtacacgttacgaatctataaataacgtacacgttacgaatctataaataacgtacacgttacgaatctataaataacgtacacgttacgaatctataaataacgtacacgttacgaatccgtataaataacgtacacgttacgaatctataaataacgtacacgttacgaatccgtataaataatatatacgttacaaatctataaataacgtacacgttacgaatctataaataacgtacacattacgaatctataaataacgtacacgttacgaatctataaataacgtacacgttacgaatccgtataaataatatatacgttacaaatctataaataacgtacacgttacgaatctataaataacgtacacattacgaatctataaataacgtacacgttaccaatccgtataaataatatacacgttacgaatccgtataaataatatatacgttacaaatctataaataacgtacacgttacgaatctataaataacgtacacgttaaatccgtataaataatatacacgttacgaatctataaataacgtacacgttacgaatctataaataacgtacacgttaaatccgtataaataatatacacgttacgaatccgtataaataacgtacacgttacgaatctataaataacgtacacgttacgaatctataaataatatacacgttacgaatccgtataaataacgtacacgttacaaatctataaataatatacacgttacgaatctataactaatatacacgttacgaatacgtataaataacgtacacgttacgaatccgtataaataacgtacacgttacgaatccgtataaataatatacatattacgaatctataactaatatacacgttacgaatacgtataaataacgtatacgttaaaaatccgtataaattactactaaaacaaaaatataaataaaataacaacgaaatatctatatctaattacgtt

SEQ ID NO: 18665 - DNA, 568 bp, Artificial Sequence
  chemically treated genomic DNA (Homo sapiens) CpG-island No: 18665
gacgagttcgtgtgagcggcgggtattttacgagttagtgcgagcggtagatattttacgagttagtgtgagcggcgggtattttacgagttattgtgagcggcgggtattttacgagttcgtgtgagcggcgggtattttacgagttcgtgtgagcggcgggtacgttacgagttagtgtgagtggcgtgtacgttacgagtttgtgagtggcgtgtacgttaagagttcgtgtgagtggcgtgtacgttacgagttcgtgtgagtggcgtgtacgttacgagtttgtgagtggcgtgtacgttacgagtttgtgagtggcgtgtacgttacgagttcgtatgagcggcgggtattttacgagttcgtgtgagcggcgggtacgttacgagttagtgtgagtggcgtgtacgttacgagtttgtgagcggcgtgtacgttacgagtttgtgagtggcgtgtacgttaagagttcgtgtgagtggcgtgtacgttacgagtttttgtgagtggcgtgtacgttacgagtttgtgagtggcgtgtacgttacgagtttgtgagtggcgt

SEQ ID NO: 18666 - DNA, 568 bp, Artificial Sequence
  chemically treated genomic DNA (Homo sapiens) CpG-island No: 18666
acgccactcacaaactcgtaacgtacacgccactcacaaactcgtaacgtacacgccactcacaaaaactcgtaacgtacacgccactcacacgaactcttaacgtacacgccactcacaaactcgtaacgtacacgccgctcacaaactcgtaacgtacacgccactcacactaactcgtaacgtacccgccgctcacacgaactcgtaaaatacccgccgctcatacgaactcgtaacgtacacgccactcacaaactcgtaacgtacacgccactcacaaactcgtaacgtacacgccactcacacgaactcgtaacgtacacgccactcacacgaactcttaacgtacacgccactcacaaactcgtaacgtacacgccactcacactaactcgtaacgtacccgccgctcacacgaactcgtaaaatacccgccgctcacacgaactcgtaaaatacccgccgctcacaataactcgtaaaatacccgccgctcacactaactcgtaaaatatctaccgctcgcactaactcgtaaaatacccgccgctcacacgaactcgtc

SEQ ID NO: 18667 - DNA, 568 bp, Artificial Sequence
  chemically treated genomic DNA (Homo sapiens) CpG-island No: 18667
acgttatttatagattcgtaacgtgtacgttatttatagattcgtaacgtgtacgttatttatagggattcgtaacgtgtacgttatttatacggatttttaacgtgtacgttatttatagattcgtaacgtgtacgtcgtttatagattcgtaacgtatacgttatttatattggttcgtaacgtgttcgtcgtttatacggattcgtaaggtgttcgtcgtttatacggattcgtaacgtgtacgttatttatagattcgtaacgtgtacgttatttatagattcgtaacgtgtacgttatttatacggattcgtaacgtgtacgttatttatacggatttttaacgtgtacgttatttatagattcgtaacgtatacgttatttatattggttcgtaacgtgttcgtcgtttatacggattcgtaaggtgttcgtcgtttatacggattcgtaaggtgttcgtcgtttatagtggttcgtaaggtgttcgtcgtttatattggttcgtaaggtgtttgtcgttcgtattggttcgtaaggtgttcgtcgtttatacggattcgtt

SEQ ID NO: 18668 - DNA, 568 bp, Artificial Sequence
  chemically treated genomic DNA (Homo sapiens) CpG-island No: 18668
aacgaatccgtataaacgacgaacaccttacgaaccaatacgaacgacaaacaccttacgaaccaatataaacgacgaacaccttacgaaccactataaacgacgaacaccttacgaatccgtataaacgacgaacaccttacgaatccgtataaacgacgaacacgttacgaaccaatataaataacgtatacgttacgaatctataaataacgtacacgttaaaaatccgtataaataacgtacacgttacgaatccgtataaataacgtacacgttacgaatctataaataacgtacacgttacgaatctataaataacgtacacgttacgaatccgtataaacgacgaacaccttacgaatccgtataaacgacgaacacgttacgaaccaatataaataacgtatacgttacgaatctataaacgacgtacacgttacgaatctataaataacgtacacgttaaaaatccgtataaataacgtacacgttacgaatccctataaataacgtacacgttacgaatctataaataacgtacacgttacgaatctataaataacgt

SEQ ID NO: 18669 - DNA, 650 bp, Artificial Sequence
  chemically treated genomic DNA (Homo sapiens) CpG-island No: 18669
gtttcgatgttgttgacgttggtcgggggcgcgttttttttttcggggtttttcgcgttttgtatttgggcgttgcgtcgtttttagttcggatggagtcgtatcgattgcgtgatgattagtattaggtatcggcgtcgtcgagacgtttttcgaggttcggggcgttgtttatcgtattttattcggtcgcggggtttagggcggaaaaggggggcggtaggaagttcgggggttgtttttttcgcgtttcggcggttcgagttttcgaagttttttcgcgtttttttttggcgggagcggggtcggggcgggcgggaatggtcgatgagttttcggagttcgttttttatatttgtttgcggttggggagagttaggtcgaagggtcgggtcgggttttttgcggttttcggatcggattgagcgcgcgcgttgtttttttcgttcgcgttaggttggttttttcggtgtacgtcgtgttggttatcggttcggggatcgttattattcgtttttgcgacgacgtgattatcggtaggtaagagttcgggtcggggttttgttgtaaatgttatattttagtagttcgtaggttttggttttcgtagtatacgcgtttagaaagttgattaatgggaaaagttggta

SEQ ID NO: 18670 - DNA, 650 bp, Artificial Sequence
  chemically treated genomic DNA (Homo sapiens) CpG-island No: 18670
taccaacttttcccattaatcaactttctaaacgcgtatactacgaaaaccaaaacctacgaactactaaaatataacatttacaacaaaaccccgacccgaactcttacctaccgataatcacgtcgtcgcaaaaacgaataataacgatccccgaaccgataaccaacacgacgtacaccgaaaaaaccaacctaacgcgaacgaaaaaaacaacgcgcgcgctcaatccgatccgaaaaccgcaaaaaacccgacccgacccttcgacctaactctccccaaccgcaaacaaatataaaaaacgaactccgaaaactcatcgaccattcccgcccgccccgaccccgctcccgccaaaaaaaaacgcgaaaaaacttcgaaaactcgaaccgccgaaacgcgaaaaaaacaacccccgaacttcctaccgccccccttttccgccctaaaccccgcgaccgaataaaatacgataaacaacgccccgaacctcgaaaaacgtctcgacgacgccgatacctaatactaatcatcacgcaatcgatacgactccatccgaactaaaaacgacgcaacgcccaaatacaaaacgcgaaaaaccccgaaaaaaaaaacgcgcccccgaccaacgtcaacaacatcgaaac

SEQ ID NO: 18671 - DNA, 650 bp, Artificial Sequence
  chemically treated genomic DNA (Homo sapiens) CpG-island No: 18671
tgttagttttttttattagttagttttttgagcgcgtgtgttgcgagagttagagtttgcgagttattgaaatgtgatatttgtaataaggtttcggttcgggtttttatttgtcggtgattacgtcgtcgtaggagcgaatgatgacgattttcgagtcggtggttagtacggcgtgtatcgaggaaattagtttagcgcgggcggagagaatagcgcgcgcgtttagttcggttcgaggatcgtagggagttcggttcggtttttcggtttgattttttttagtcgtaggtagatgtggggagcgggtttcggaggtttatcggttattttcgttcgtttcggtttcgttttcgttaggggaggacgcggaggggtttcgaaaattcgggtcgtcgggacgcggagggagtagttttcgggttttttgtcgtttttttttttcgttttgggtttcgcggtcgggtggggtgcggtgggtagcgtttcgggtttcggggggcgtttcggcggcgtcggtatttggtgttgattattacgtagtcggtgcggttttattcgggttgggagcggcgtagcgtttaggtgtagagcgcgaagagtttcgggaagaagagcgcgttttcggttagcgttagtagtatcggggt

SEQ ID NO: 18672 - DNA, 650 bp, Artificial Sequence
  chemically treated genomic DNA (Homo sapiens) CpG-island No: 18672
accccgatactactaacgctaaccgaaaacgcgctcttcttcccgaaactcttcgcgctctacacctaaacgctacgccgctcccaacccgaataaaaccgcaccgactacgtaataatcaacaccaaataccgacgccgccgaaacgccccccgaaacccgaaacgctacccaccgcaccccacccgaccgcgaaacccaaaacgaaaaaaaaaaacgacaaaaaacccgaaaactactccctccgcgtcccgacgacccgaattttcgaaacccctccgcgtcctcccctaacgaaaacgaaaccgaaacgaacgaaaataaccgataaacctccgaaacccgctccccacatctacctacgactaaaaaaaatcaaaccgaaaaaccgaaccgaactccctacgatcctcgaaccgaactaaacgcgcgcgctattctctccgcccgcgctaaactaatttcctcgatacacgccgtactaaccaccgactcgaaaatcgtcatcattcgctcctacgacgacgtaatcaccgacaaataaaaacccgaaccgaaaccttattacaaatatcacatttcaataactcgcaaactctaactctcgcaacacacgcgctcaaaaaactaactaataaaaaaaactaaca

SEQ ID NO: 18673 - DNA, 994 bp, Artificial Sequence
  chemically treated genomic DNA (Homo sapiens) CpG-island No: 18673
  unsure (430)
tgcgcgagtttcgggcgtttttaagggttttaattttacgtttgtttcgtgtttttaagcgtagggggtcggaggcggtaagacgcggtttaacgcgcggcgggattcggattatttttcgttaaggttatttcgggatttttagattcgtttcgacgcgggggacgtttcggttcgggttcgcgcgagcgtgcgcgataggaggagacgcgacggggtagtatcgttttggtggcgtattgttggacgtagttcggggtcggggagtcgcggtatttatttaggtttatggcggcgacgtcggcggttgcgcggggttaacgttttttttttttcgagaattcgaacgcggcgcgggacgtacggtacgatgggagacgtatgagttacggcggtcgcgtttaagtttgtttataattttcgttcggtntcgtttatagttttcgtcgcgtacgcgtagtttttacgaacgagcgcgttaagcgtatagcgtcgtttttcggtagagtttttttattagtttttaggtattcggacgtcgtttattagattttttcgtatcgttttttgttcggtttttttttcggggttttagcgggtcgggtttatgatttttcggtttcgtatttatttttattcggtaatttcgggcgtgtttcgtatatagtttatttttatcgagcgtttttttcgggacgtttattatttagcgcggtcgtattacgcgaggtttttatttttattcgtttagttcgcgttatatatagttttttaacgcgtttttgtcgcgtcgttttttttagatagtagcgtttcggattttagacgttttttgacggttggttttttttagaaaatgcgtcgtgtgagtttaaatatggtggggtttacgttggatttcgagtttgtaatttgtgtttgataaaatataaatatcgcgtgtttgttttttttttttgagatcgagtagtaatagttattttaattttttatt

SEQ ID NO: 18674 - DNA, 994 bp, Artificial Sequence
  chemically treated genomic DNA (Homo sapiens) CpG-island No: 18674
  unsure (565)
aataaaaaattaaaataactattactactcgatctcaaaaaaaaaaaacaaacacgcgatatttatattttatcaaacacaaattacaaactcgaaatccaacgtaaaccccaccatatttaaactcacacgacgcattttctaaaaaaaaccaaccgtcaaaaaacgtctaaaatccgaaacgctactatctaaaaaaaacgacgcgacaaaaacgcgttaaaaaactatatataacgcgaactaaacgaataaaaataaaaacctcgcgtaatacgaccgcgctaaataataaacgtcccgaaaaaaacgctcgataaaaataaactatatacgaaacacgcccgaaattaccgaataaaaataaatacgaaaccgaaaaatcataaacccgacccgctaaaaccccgaaaaaaaaaccgaacaaaaaacgatacgaaaaaatctaataaacgacgtccgaatacctaaaaactaataaaaaaactctaccgaaaaacgacgctatacgcttaacgcgctcgttcgtaaaaactacgcgtacgcgacgaaaactataaacganaccgaacgaaaattataaacaaacttaaacgcgaccgccgtaactcatacgtctcccatcgtaccgtacgtcccgcgccgcgttcgaattctcgaaaaaaaaaaaacgttaaccccgcgcaaccgccgacgtcgccgccataaacctaaataaataccgcgactccccgaccccgaactacgtccaacaatacgccaccaaaacgatactaccccgtcgcgtctcctcctatcgcgcacgctcgcgcgaacccgaaccgaaacgtcccccgcgtcgaaacgaatctaaaaatcccgaaataaccttaacgaaaaataatccgaatcccgccgcgcgttaaaccgcgtcttaccgcctccgaccccctacgcttaaaaacacgaaacaaacgtaaaattaaaacccttaaaaacgcccgaaactcgcgca

SEQ ID NO: 18675 - DNA, 994 bp, Artificial Sequence
  chemically treated genomic DNA (Homo sapiens) CpG-island No: 18675
  unsure (565)
ggtggagagttggagtggttgttattattcgattttagggggaggagataggtacgcgatgtttgtgttttgttaagtatagattgtaagttcggggtttagcgtaaattttattatgtttgggtttatacggcgtattttttggggaggattagtcgttaaaaagcgtttaggattcggaacgttgttgtttggagggggcggcgcggtaggagcgcgttgagggattgtatgtggcgcgagttgggcgggtgggagtggaagtttcgcgtggtgcggtcgcgttgggtggtgggcgtttcgggggaggcgttcggtgggggtgaattgtgtgcggggtacgttcggggttatcgggtgagggtgaatgcggggtcggggaattatgagttcgattcgttgggatttcggaagaggggtcgggtaggggacggtgcggaggggtttagtgagcgacgttcgggtatttgagggttggtgggagggttttgtcggaaggcggcgttgtgcgtttggcgcgttcgttcgtgaggattgcgcgtgcgcggcggaggttgtgggcggngtcgggcggaggttgtgagtaggtttaagcgcggtcgtcgtggtttatgcgttttttatcgtgtcgtgcgtttcgcgtcgcgttcgagttttcggaggggagggggcgttagtttcgcgtagtcgtcggcgtcgtcgttatggatttaggtgggtgtcgcggtttttcggtttcgggttgcgtttagtaatgcgttattagagcggtgttgtttcgtcgcgtttttttttgtcgcgtacgttcgcgcgggttcggatcgaaacgtttttcgcgtcggggcgggtttaggggtttcggggtggttttggcggggggtggttcgggtttcgtcgcgcgttgggtcgcgttttgtcgttttcggttttttgcgtttgaaaatacggagtagacgtgaagttagagtttttggaagcgttcggggttcgcgta

SEQ ID NO: 18676 - DNA, 994 bp, Artificial Sequence
  chemically treated genomic DNA (Homo sapiens) CpG-island No: 18676
  unsure (430)
tacgcgaaccccgaacgcttccaaaaactctaacttcacgtctactccgtattttcaaacgcaaaaaaccgaaaacgacaaaacgcgacccaacgcgcgacgaaacccgaaccaccccccgccaaaaccaccccgaaacccctaaacccgccccgacgcgaaaaacgtttcgatccgaacccgcgcgaacgtacgcgacaaaaaaaaacgcgacgaaacaacaccgctctaataacgcattactaaacgcaacccgaaaccgaaaaaccgcgacacccacctaaatccataacgacgacgccgacgactacgcgaaactaacgccccctcccctccgaaaactcgaacgcgacgcgaaacgcacgacacgataaaaaacgcataaaccacgacgaccgcgcttaaacctactcacaacctccgcccgacnccgcccacaacctccgccgcgcacgcgcaatcctcacgaacgaacgcgccaaacgcacaacgccgccttccgacaaaaccctcccaccaaccctcaaatacccgaacgtcgctcactaaacccctccgcaccgtcccctacccgacccctcttccgaaatcccaacgaatcgaactcataattccccgaccccgcattcaccctcacccgataaccccgaacgtaccccgcacacaattcacccccaccgaacgcctcccccgaaacgcccaccacccaacgcgaccgcaccacgcgaaacttccactcccacccgcccaactcgcgccacatacaatccctcaacgcgctcctaccgcgccgccccctccaaacaacaacgttccgaatcctaaacgctttttaacgactaatcctccccaaaaaatacgccgtataaacccaaacataataaaatttacgctaaaccccgaacttacaatctatacttaacaaaacacaaacatcgcgtacctatctcctccccctaaaatcgaataataacaaccactccaactctccacc

SEQ ID NO: 18677 - DNA, 588 bp, Artificial Sequence
  chemically treated genomic DNA (Homo sapiens) CpG-island No: 18677
aaggtttatgatttttaacggtaattcgttacgtttttgaagttgaatatcgcgtagggtttaaggtcggatatttttcggtttaggtttacgatatatttattttttttttttttcgttagggtcggttcgggcgtcggttttagtttcgcgcgttagtttttgtcggtttcggtttgtatttttatttttaggacgtttcgatagaaacgcgtcgtttggaagcggttttttattttgaatacgaagtgtagagttttgcgagtagttatgattttcgtcgtacgtagtcgttacgcgtatcgtatagtttagtttacgaagggcgttacgggtcgtgacgttattagtcgtcgacggcgcgttttcgtgacgtagttcgggttttagggaatatggcggcgttggtgagattcgcgaggtttgtcgtgcgatcgttgttgtaggtggtttaggtttgggattttgacgcgaggcgttgggttcgggcgttgcggcggagtttagtgaaagtggtgttttttttcggagaggtggtggaatagaagcgcgtttttgggaagtagtttcgtaaggtattatttgagg

SEQ ID NO: 18678 - DNA, 588 bp, Artificial Sequence
  chemically treated genomic DNA (Homo sapiens) CpG-island No: 18678
cctcaaataataccttacgaaactacttcccaaaaacgcgcttctattccaccacctctccgaaaaaaaacaccactttcactaaactccgccgcaacgcccgaacccaacgcctcgcgtcaaaatcccaaacctaaaccacctacaacaacgatcgcacgacaaacctcgcgaatctcaccaacgccgccatattccctaaaacccgaactacgtcacgaaaacgcgccgtcgacgactaataacgtcacgacccgtaacgcccttcgtaaactaaactatacgatacgcgtaacgactacgtacgacgaaaatcataactactcgcaaaactctacacttcgtattcaaaataaaaaaccgcttccaaacgacgcgtttctatcgaaacgtcctaaaaataaaaatacaaaccgaaaccgacaaaaactaacgcgcgaaactaaaaccgacgcccgaaccgaccctaacgaaaaaaaaaaaaaataaatatatcgtaaacctaaaccgaaaaatatccgaccttaaaccctacgcgatattcaacttcaaaaacgtaacgaattaccgttaaaaatcataaacctt

SEQ ID NO: 18679 - DNA, 588 bp, Artificial Sequence
  chemically treated genomic DNA (Homo sapiens) CpG-island No: 18679
ttttagatggtgttttgcggggttgttttttaggagcgcgtttttgttttattattttttcggaaggaaatattatttttattgggtttcgtcgtagcgttcggatttagcgtttcgcgttaaggttttaagtttggattatttgtagtaacggtcgtacgataaatttcgcgggttttattagcgtcgttatgttttttgagattcgggttgcgttacgaaagcgcgtcgtcggcggttagtgacgttacggttcgtggcgtttttcgtggattgggttgtacggtgcgcgtgacggttgcgtgcggcgggaattatggttgttcgtagagttttgtatttcgtatttaaagtgggaaatcgtttttagacggcgcgtttttatcgggacgttttggggatgaaggtgtaggtcggggtcgataggggttggcgcgcgaggttggaatcggcgttcgagtcggttttggcggagggaggggaaaatgggtgtgtcgtgaatttaagtcggagggtgttcgattttaggttttgcgcggtgtttagttttaggagcgtggcgagttgtcgttggggattataggtttt

SEQ ID NO: 18680 - DNA, 588 bp, Artificial Sequence
  chemically treated genomic DNA (Homo sapiens) CpG-island No: 18680
aaaacctataatccccaacgacaactcgccacgctcctaaaactaaacaccgcgcaaaacctaaaatcgaacaccctccgacttaaattcacgacacacccattttcccctccctccgccaaaaccgactcgaacgccgattccaacctcgcgcgccaacccctatcgaccccgacctacaccttcatccccaaaacgtcccgataaaaacgcgccgtctaaaaacgatttcccactttaaatacgaaatacaaaactctacgaacaaccataattcccgccgcacgcaaccgtcacgcgcaccgtacaacccaatccacgaaaaacgccacgaaccgtaacgtcactaaccgccgacgacgcgctttcgtaacgcaacccgaatctcaaaaaacataacgacgctaataaaacccgcgaaatttatcgtacgaccgttactacaaataatccaaacttaaaaccttaacgcgaaacgctaaatccgaacgctacgacgaaacccaataaaaataatatttccttccgaaaaaataataaaacaaaaacgcgctcctaaaaaacaaccccgcaaaacaccatctaaaa

SEQ ID NO: 18681 - DNA, 739 bp, Artificial Sequence
  chemically treated genomic DNA (Homo sapiens) CpG-island No: 18681
aatttattttatttcgtttttttcgttttttttgggtttttttagggatacggattttatttttacgtcgcgagtaaattgcgtttggggtttggagttaatcgtagttaaaggcgagtttttagaacggtttcgtttacgttttttttcgttttagttgggtttttaggggcggggagcgtgattagggatttttgtatttgtaatttcgtttttcgtttcggggttttcggtatatttcgattttcgttattcgcgtatttagagatatcgtgtgcgtaagtcgagcgcgtatcgatttacgttcgttatttatttgtcgtagaaatatttgtgaacgtagtatatattcgcgaatacgtattttcgcggatacgtagggatatacgcgggtacgtttggttcggttttgggtcgtcggttcggggttttttgttgtttgtcgtcgtttttttattttttttgagtgtttcggtgtttcggcgaattcgcgtttagtttcggttttataaggaattgatttcggtagttgtttatattttagttggcgtagtttagcgcggttttgatatataatcgtttcgttcgggttcgttttaaggaggcgggattcgcgttcggtttatcgcgtcgttcgggatcgtttttttcggggtttaggtttttggttgtttagcgtcgagttagttgagtttggtcgagttttagtaggttagtcggtttcggaatttcgcgtatt

SEQ ID NO: 18682 - DNA, 739 bp, Artificial Sequence
  chemically treated genomic DNA (Homo sapiens) CpG-island No: 18682
aatacgcgaaattccgaaaccgactaacctactaaaactcgaccaaactcaactaactcgacgctaaacaaccaaaaacctaaaccccgaaaaaaacgatcccgaacgacgcgataaaccgaacgcgaatcccgcctccttaaaacgaacccgaacgaaacgattatatatcaaaaccgcgctaaactacgccaactaaaatataaacaactaccgaaatcaattccttataaaaccgaaactaaacgcgaattcgccgaaacaccgaaacactcaaaaaaaataaaaaaacgacgacaaacaacaaaaaaccccgaaccgacgacccaaaaccgaaccaaacgtacccgcgtatatccctacgtatccgcgaaaatacgtattcgcgaatatatactacgttcacaaatatttctacgacaaataaataacgaacgtaaatcgatacgcgctcgacttacgcacacgatatctctaaatacgcgaataacgaaaatcgaaatataccgaaaaccccgaaacgaaaaacgaaattacaaatacaaaaatccctaatcacgctccccgcccctaaaaacccaactaaaacgaaaaaaaacgtaaacgaaaccgttctaaaaactcgcctttaactacgattaactccaaaccccaaacgcaatttactcgcgacgtaaaaataaaatccgtatccctaaaaaaacccaaaaaaaacgaaaaaaacgaaataaaataaatt

SEQ ID NO: 18683 - DNA, 739 bp, Artificial Sequence
  chemically treated genomic DNA (Homo sapiens) CpG-island No: 18683
agtacgcgaggtttcgggatcggttggtttgttggaattcggttaggtttagttggttcggcgttgggtagttaggagtttgggtttcggggagggcggtttcgggcggcgcggtgggtcgagcgcgggtttcgtttttttgaggcgggttcgggcggggcggttgtatattagggtcgcgttgagttgcgttagttgaggtgtgagtagttgtcgaagttagttttttgtggagtcggagttgggcgcggattcgtcgaggtatcgaggtatttagaggaggtgagagagcggcggtagataataggggatttcgggtcggcggtttagagtcgagttaagcgtgttcgcgtgtgtttttgcgtgttcgcgaggatgcgtgttcgcgggtgtgtgttgcgtttataggtgtttttgcggtaggtgaatgacgggcgtgggtcggtgcgcgttcggtttgcgtatacggtgtttttaagtgcgcgggtgacgagagtcgggatgtgtcggagatttcggggcggagagcgggattataagtataggaatttttggttacgtttttcgtttttggaaatttagttggggcgagggagggcgtggacgggatcgttttgggagttcgtttttggttgcggttggttttaggttttaggcgtagtttgttcgcggcgtggggatgaagttcgtgtttttggaggggtttaggaagggcgaggaaagcggagtggagtaagtt

SEQ ID NO: 18684 - DNA, 739 bp, Artificial Sequence
  chemically treated genomic DNA (Homo sapiens) CpG-island No: 18684
aacttactccactccgctttcctcgcccttcctaaacccctccaaaaacacgaacttcatccccacgccgcgaacaaactacgcctaaaacctaaaaccaaccgcaaccaaaaacgaactcccaaaacgatcccgtccacgccctccctcgccccaactaaatttccaaaaacgaaaaacgtaaccaaaaattcctatacttataatcccgctctccgccccgaaatctccgacacatcccgactctcgtcacccgcgcacttaaaaacaccgtatacgcaaaccgaacgcgcaccgacccacgcccgtcattcacctaccgcaaaaacacctataaacgcaacacacacccgcgaacacgcatcctcgcgaacacgcaaaaacacacgcgaacacgcttaactcgactctaaaccgccgacccgaaatcccctattatctaccgccgctctctcacctcctctaaatacctcgatacctcgacgaatccgcgcccaactccgactccacaaaaaactaacttcgacaactactcacacctcaactaacgcaactcaacgcgaccctaatatacaaccgccccgcccgaacccgcctcaaaaaaacgaaacccgcgctcgacccaccgcgccgcccgaaaccgccctccccgaaacccaaactcctaactacccaacgccgaaccaactaaacctaaccgaattccaacaaaccaaccgatcccgaaacctcgcgtact

SEQ ID NO: 18685 - DNA, 567 bp, Artificial Sequence
  chemically treated genomic DNA (Homo sapiens) CpG-island No: 18685
cgtgtttcgagacgttttcggtttcgtttatattttttttcggtttttagggcgggggtcgcgggggaagtaggggcgtaggtgatgttttttttttcgagtcgaggaggcgggaggttgcggcgtcgtttttcgtcgggcgagatcggtatgggggcgattcgggttttatttagtttttcgagaggcggtgatgtcgcgttttacgttcgttatcgcgcggtagatagttttttatcgaacgcggatatttattttttcgtggaagatggattttatgtttatttgtttggagttaacggtttttacgtcgaattattttttttagtttcgttttttgtttttttttttcgtttatttcgttttttttcggttcgtttcggtatttcgtttacgtgtcgtacgtagattaattattcgtgaggatgcgagtgtcgtgaagcgaagagcgagtgaacgtcggggatacgtgattttggtagcgcgtttttttagtttttgttagcgggttttttgggggatgttatatcgttatttgttgtttggaggatttttttcgttttttat

SEQ ID NO: 18686 - DNA, 567 bp, Artificial Sequence
  chemically treated genomic DNA (Homo sapiens) CpG-island No: 18686
ataaaaaacgaaaaaaatcctccaaacaacaaataacgatataacatcccccaaaaaacccgctaacaaaaactaaaaaaacgcgctaccaaaatcacgtatccccgacgttcactcgctcttcgcttcacgacactcgcatcctcacgaataattaatctacgtacgacacgtaaacgaaataccgaaacgaaccgaaaaaaaacgaaataaacgaaaaaaaaaaacaaaaaacgaaactaaaaaaaataattcgacgtaaaaaccgttaactccaaacaaataaacataaaatccatcttccacgaaaaaataaatatccgcgttcgataaaaaactatctaccgcgcgataacgaacgtaaaacgcgacatcaccgcctctcgaaaaactaaataaaacccgaatcgcccccataccgatctcgcccgacgaaaaacgacgccgcaacctcccgcctcctcgactcgaaaaaaaaaacatcacctacgcccctacttcccccgcgacccccgccctaaaaaccgaaaaaaaatataaacgaaaccgaaaacgtctcgaaacacg

SEQ ID NO: 18687 - DNA, 567 bp, Artificial Sequence
  chemically treated genomic DNA (Homo sapiens) CpG-island No: 18687
gtgggaagcggagaagattttttagatagtaggtggcgatgtagtattttttagaaggttcgttaatagaagttaggaggacgcgttattaaggttacgtgttttcggcgtttattcgtttttcgttttacgatattcgtatttttacgggtgattggtttgcgtgcggtacgtgggcggggtatcggggcgggtcggggaggggcggggtgggcggaggagaggggtagggggcggagttggagggggtggttcggcgtgggggtcgttggttttagataaataaatatggagtttattttttacgagaaagtgagtgttcgcgttcggtggggagttgtttgtcgcgcggtggcgggcgtggagcgcggtattatcgtttttcggagggttgggtggggttcgagtcgtttttatgtcgatttcgttcggcgaggggcgacgtcgtagtttttcgttttttcggttcgaggaggggagtattatttacgtttttatttttttcgcggttttcgttttgggagtcgggagggagtatgggcggggtcgggggcgtttcgggatacg

SEQ ID NO: 18688 - DNA, 567 bp, Artificial Sequence
  chemically treated genomic DNA (Homo sapiens) CpG-island No: 18688
cgtatcccgaaacgcccccgaccccgcccatactccctcccgactcccaaaacgaaaaccgcgaaaaaaataaaaacgtaaataatactcccctcctcgaaccgaaaaaacgaaaaactacgacgtcgcccctcgccgaacgaaatcgacataaaaacgactcgaaccccacccaaccctccgaaaaacgataataccgcgctccacgcccgccaccgcgcgacaaacaactccccaccgaacgcgaacactcactttctcgtaaaaaataaactccatatttatttatctaaaaccaacgacccccacgccgaaccaccccctccaactccgccccctacccctctcctccgcccaccccgcccctccccgacccgccccgataccccgcccacgtaccgcacgcaaaccaatcacccgtaaaaatacgaatatcgtaaaacgaaaaacgaataaacgccgaaaacacgtaaccttaataacgcgtcctcctaacttctattaacgaaccttctaaaaaatactacatcgccacctactatctaaaaaatcttctccgcttcccac

SEQ ID NO: 18689 - DNA, 547 bp, Artificial Sequence
  chemically treated genomic DNA (Homo sapiens) CpG-island No: 18689
tttggacgaatgtaagttgttcgcggaggggaggtagcgttttttttgttttaggttaggcgtgggattcgggtcggttttttttttagttcggttagcgggcggttattgggttatatttttacggacgtttttttgttatgatagttttagaaaattttttttaaaagtttcggttcggaaattttattttttattcgaagaaaattttatttttttttttcgttattttcgttcggaagtttcggggaagtttagattatttttttatatatgtatagtatcgagggtttgtttagaatttttttcgttatcgtcgtcgtgattttcgtcgcggcggtttttcgggttttttaaatttatttgtagttttagcgtttatagcgatttcgagattaagggtaatagggaatttaattcgcgttagtggaagttgcgatttcgggatttgttattcgtcgcgttcgtacggagtagaggggtgacgttagtaaattatattatttttttttttttagggttgattttttttatttttttttttttt

SEQ ID NO: 18690 - DNA, 547 bp, Artificial Sequence
  chemically treated genomic DNA (Homo sapiens) CpG-island No: 18690
aaaaaaaaaaaaaataaaaaaaatcaaccctaaaaaaaaaaaaataatataatttactaacgtcacccctctactccgtacgaacgcgacgaataacaaatcccgaaatcgcaacttccactaacgcgaattaaattccctattacccttaatctcgaaatcgctataaacgctaaaactacaaataaatttaaaaaacccgaaaaaccgccgcgacgaaaatcacgacgacgataacgaaaaaaattctaaacaaaccctcgatactatacatatataaaaaaataatctaaacttccccgaaacttccgaacgaaaataacgaaaaaaaaaaataaaattttcttcgaataaaaaataaaatttccgaaccgaaacttttaaaaaaaattttctaaaactatcataacaaaaaaacgtccgtaaaaatataacccaataaccgcccgctaaccgaactaaaaaaaaaaccgacccgaatcccacgcctaacctaaaacaaaaaaaacgctacctcccctccgcgaacaacttacattcgtccaaa

SEQ ID NO: 18691 - DNA, 547 bp, Artificial Sequence
  chemically treated genomic DNA (Homo sapiens) CpG-island No: 18691
aaaaaaaaaaaaaatgagaggagttaattttgaggaggaaaaagtagtatgatttgttggcgttatttttttgtttcgtgcgggcgcggcgaatggtaggtttcgaggtcgtagtttttattggcgcgggttgagttttttgttgtttttggtttcggggtcgttgtaggcgttgaggttgtaggtgggtttggggagttcggggggtcgtcgcgacgaggattacggcgacggtggcggggagggttttaggtaagttttcggtgttgtgtatgtgtggaggggtggtttgggttttttcggggttttcgaacgaaggtgacgggaaaggaaaatggggtttttttcgggtggaggatgggattttcgggtcggagtttttggaaagggttttttgaggttgttataataggaaaacgttcgtagagatgtgatttagtgatcgttcgttaatcggattggagagaagatcggttcggattttacgtttggtttgaagtagggaagacgttgtttttttttcgcgagtagtttatattcgtttaag

SEQ ID NO: 18692 - DNA, 547 bp, Artificial Sequence
  chemically treated genomic DNA (Homo sapiens) CpG-island No: 18692
cttaaacgaatataaactactcgcgaaaaaaaaacaacgtcttccctacttcaaaccaaacgtaaaatccgaaccgatcttctctccaatccgattaacgaacgatcactaaatcacatctctacgaacgttttcctattataacaacctcaaaaaaccctttccaaaaactccgacccgaaaatcccatcctccacccgaaaaaaaccccattttcctttcccgtcaccttcgttcgaaaaccccgaaaaaacccaaaccacccctccacacatacacaacaccgaaaacttacctaaaaccctccccgccaccgtcgccgtaatcctcgtcgcgacgaccccccgaactccccaaacccacctacaacctcaacgcctacaacgaccccgaaaccaaaaacaacaaaaaactcaacccgcgccaataaaaactacgacctcgaaacctaccattcgccgcgcccgcacgaaacaaaaaaataacgccaacaaatcatactactttttcctcctcaaaattaactcctctcatttttttttttttt

SEQ ID NO: 18693 - DNA, 693 bp, Artificial Sequence
  chemically treated genomic DNA (Homo sapiens) CpG-island No: 18693
  unsure (427)
aagagcggaggagagaggggagaagaggggggaggagagggtggaagggaggaggagtagagggaaaagggaggaggaggggggaagagaggaggagacgggggagagatggggggaagagaggaggagagggaggagaagaggaggagacgggggagggggagaaaaggagggaagagaggagtcggggaggagaggagaaggggggaagagaggaggggagcgggaagatgggggagggagaggtgggggaagagaggaggatagggaggagaagaggaggagacgggggagggggagaaaaggagggaagagacgggggaggagaggagaaggggggaagataggggagggggaagatcggggacggagaggtgggggaagataggaggagagggaggaaaatacgagacgggggagggggtangagacgacgagagtcgggaggagacgaggagacggagggagatacgaggaggataggggatatacgaggaggaggagatacgagaggaaaatacgagaggaggaggagatggcggacgcggagaagggggaggagataagtaggcgatacggaagacgagggggaaatttcggggatacgagggatagataagaagtagttttcggtcgcggtatacgtagacgaaaattcgaggtatacgagggtcggaggcgaagatttcggat

SEQ ID NO: 18694 - DNA, 693 bp, Artificial Sequence
  chemically treated genomic DNA (Homo sapiens) CpG-island No: 18694
  unsure (267)
atccgaaatcttcgcctccgaccctcgtatacctcgaattttcgtctacgtataccgcgaccgaaaactacttcttatctatccctcgtatccccgaaatttccccctcgtcttccgtatcgcctacttatctcctcccccttctccgcgtccgccatctcctcctcctctcgtattttcctctcgtatctcctcctcctcgtatatcccctatcctcctcgtatctccctccgtctcctcgtctcctcccgactctcgtcgtctcntaccccctcccccgtctcgtattttcctccctctcctcctatcttcccccacctctccgtccccgatcttccccctcccctatcttccccccttctcctctcctcccccgtctcttccctccttttctccccctcccccgtctcctcctcttctcctccctatcctcctctcttcccccacctctccctcccccatcttcccgctcccctcctctcttccccccttctcctctcctccccgactcctctcttccctccttttctccccctcccccgtctcctcctcttctcctccctctcctcctctcttccccccatctctcccccgtctcctcctctcttcccccctcctcctcccttttccctctactcctcctcccttccaccctctcctcccccctcttctcccctctctcctccgctctt

SEQ ID NO: 18695 - DNA, 693 bp, Artificial Sequence
  chemically treated genomic DNA (Homo sapiens) CpG-island No: 18695
  unsure (267)
gttcggggttttcgttttcgattttcgtgtgtttcgggttttcgtttgcgtgtgtcgcggtcggggattgttttttgtttatttttcgtgttttcggagtttttttttcgtttttcgtgtcgtttgtttgttttttttttttttttcgcgttcgttattttttttttttttcgtgtttttttttcgtgttttttttttttcgtgtattttttgtttttttcgtgttttttttcgttttttcgttttttttcggttttcgtcgttttntgttttttttttcgtttcgtgtttttttttttttttttttgtttttttttattttttcgttttcgatttttttttttttttgttttttttttttttttttttttttttcgttttttttttttttttttttttttttttcgtttttttttttttttttttttgtttttttttttttttttattttttttttttttattttttcgttttttttttttttttttttttttttttttttttttcgattttttttttttttttttttttttttttttttcgttttttttttttttttttttttttttttttttttttttttatttttttttcgttttttttttttttttttttttttttttttttttttttttgtttttttttttttttattttttttttttttttttttttttttttttttttcgttttt

SEQ ID NO: 18696 - DNA, 693 bp, Artificial Sequence
  chemically treated genomic DNA (Homo sapiens) CpG-island No: 18696
  unsure (427)
aaaaacgaaaaaaaaaaaaaaaaaaaaaaaaaaaaaaaaaataaaaaaaaaaaaaaacaaaaaaaaaaaaaaaaaaaaaaaaaaaaaaaaaaaaaaaacgaaaaaaaaataaaaaaaaaaaaaaaaaaaaaaaaaaaaaaaaaaaaaaaacgaaaaaaaaaaaaaaaaaaaaaaaaaaaaaaaatcgaaaaaaaaaaaaaaaaaaaaaaaaaaaaaaaaaaaacgaaaaaataaaaaaaaaaaaaataaaaaaaaaaaaaaaaacaaaaaaaaaaaaaaaaaaaaacgaaaaaaaaaaaaaaaaaaaaaaaaaaaacgaaaaaaaaaaaaaaaaaaaaaaaaaacaaaaaaaaaaaaaaatcgaaaacgaaaaaataaaaaaaaacaaaaaaaaaaaaaaaaaaacacgaaacgaaaaaaaaaacanaaaacgacgaaaaccgaaaaaaaacgaaaaaacgaaaaaaaacacgaaaaaaacaaaaaatacacgaaaaaaaaaaaacacgaaaaaaaaacacgaaaaaaaaaaaaaataacgaacgcgaaaaaaaaaaaaaaaacaaacaaacgacacgaaaaacgaaaaaaaaactccgaaaacacgaaaaataaacaaaaaacaatccccgaccgcgacacacgcaaacgaaaacccgaaacacacgaaaatcgaaaacgaaaaccccgaac

SEQ ID NO: 18697 - DNA, 668 bp, Artificial Sequence
  chemically treated genomic DNA (Homo sapiens) CpG-island No: 18697
ttcgacggttcgggtttcggcgtttttcgtttaaggttgggagggaggtttggtgttttattcggttttcgcggtaattaaaataaaaggtgtatcgggatgtgcgtgcgtttttcgtagatatgcggagaggtttagagaaggcgttttggttacgtcgagttatttgttttgcgtttattagaggtcgcggatttcgcgttcggaaattaacggaattcgtaggtcggggtagagggtggtaagggggtatcgcgagtaggttagttgtttcgtcgttttcgttcgcgagtcgggtacgttttttgggatttttttacgttttattgttggttttttcgtttttttcgttttaatttataagttttatatttatttcgtcgtcggtttagttgtttggtttaggttttttttcggatttattttttattcgtattttcggtgagttattttcgtagacggcgacggcggtttagttttagtttgtaaattaaagcgttttttgcgtttttggtttcgtagtttaaagttcgggtaatttttttttttcggtatgaaagcgaatcgatcgcggggtattgcggggatgtcggattttttgttgggttaagttttgttgcgtttttaaaacgtttttgttttgttttcgtttgtttttttttttagtt

SEQ ID NO: 18698 - DNA, 668 bp, Artificial Sequence
  chemically treated genomic DNA (Homo sapiens) CpG-island No: 18698
aactaaaaaaaaaaacaaacgaaaacaaaacaaaaacgttttaaaaacgcaacaaaacttaacccaacaaaaaatccgacatccccgcaataccccgcgatcgattcgctttcataccgaaaaaaaaaaattacccgaactttaaactacgaaaccaaaaacgcaaaaaacgctttaatttacaaactaaaactaaaccgccgtcgccgtctacgaaaataactcaccgaaaatacgaataaaaaataaatccgaaaaaaaacctaaaccaaacaactaaaccgacgacgaaataaatataaaacttataaattaaaacgaaaaaaacgaaaaaaccaacaataaaacgtaaaaaaatcccaaaaaacgtacccgactcgcgaacgaaaacgacgaaacaactaacctactcgcgatacccccttaccaccctctaccccgacctacgaattccgttaatttccgaacgcgaaatccgcgacctctaataaacgcaaaacaaataactcgacgtaaccaaaacgccttctctaaacctctccgcatatctacgaaaaacgcacgcacatcccgatacaccttttattttaattaccgcgaaaaccgaataaaacaccaaacctccctcccaaccttaaacgaaaaacgccgaaacccgaaccgtcgaa

SEQ ID NO: 18699 - DNA, 668 bp, Artificial Sequence
  chemically treated genomic DNA (Homo sapiens) CpG-island No: 18699
ggttgggagggagagtaaacgagagtagaatagaggcgttttggaagcgtagtaggatttggtttagtagaggattcgatattttcgtagtgtttcgcggtcggttcgtttttatgtcgaggggaggggattattcgggttttgggttgcggggttaggagcgtagaaagcgttttgatttataagttgaggttgagtcgtcgtcgtcgtttgcgagggtgatttatcgggggtgcgggtgggaggtagattcggagaggggtttaaattaggtaattgggtcggcggcggggtgggtgtggggtttatgggttggggcgggggggacgaagaagttagtagtggagcgtgggggagttttagggagcgtgttcggttcgcgagcggaggcggcggagtagttggtttgttcgcggtgtttttttgttattttttgtttcggtttgcggatttcgttggttttcgagcgcgggattcgcggtttttagtgggcgtagggtaggtggttcggcgtaattaaagcgttttttttggattttttcgtatatttgcggaaggcgtacgtatatttcggtgtattttttgttttggttatcgcgagggtcggatagggtattaagttttttttttagttttgggcgaggaacgtcggagttcgagtcgtcgga

SEQ ID NO: 18700 - DNA, 668 bp, Artificial Sequence
  chemically treated genomic DNA (Homo sapiens) CpG-island No: 18700
tccgacgactcgaactccgacgttcctcgcccaaaactaaaaaaaaaacttaataccctatccgaccctcgcgataaccaaaacaaaaaatacaccgaaatatacgtacgccttccgcaaatatacgaaaaaatccaaaaaaaacgctttaattacgccgaaccacctaccctacgcccactaaaaaccgcgaatcccgcgctcgaaaaccaacgaaatccgcaaaccgaaacaaaaaataacaaaaaaacaccgcgaacaaaccaactactccgccgcctccgctcgcgaaccgaacacgctccctaaaactcccccacgctccactactaacttcttcgtcccccccgccccaacccataaaccccacacccaccccgccgccgacccaattacctaatttaaacccctctccgaatctacctcccacccgcacccccgataaatcaccctcgcaaacgacgacgacgactcaacctcaacttataaatcaaaacgctttctacgctcctaaccccgcaacccaaaacccgaataatcccctcccctcgacataaaaacgaaccgaccgcgaaacactacgaaaatatcgaatcctctactaaaccaaatcctactacgcttccaaaacgcctctattctactctcgtttactctccctcccaacc

SEQ ID NO: 18701 - DNA, 518 bp, Artificial Sequence
  chemically treated genomic DNA (Homo sapiens) CpG-island No: 18701
agtcgtttagcggtttcgcggggtcgggggcgtcgtcggtttcgttgtcggagtttagggagttgagggagtcgtaagaggagtcgcggttttcgtagtcgtatatttgtatcgagtcgtacgggggtacgtcggggttttcgttcgtttcgcggagtcgtagcgttaggagttgcgttacgtcggcggggtcggggggtttgggttggcgcgatattcgggttcggggtaatacgtttcggcgcgcgggagggtcgggcgtcgggggggtcgtttcgttcgggttttgtaaggtcgtgatgtcgaaggtttcggtgtttttttcgtcgtcgttttcgtcgtcgtaggtgatgatgttttttcggacgttttttttttttagtattattagtgttttttgtttttgtcgtcgtagggttacgaagagtattattagggttgcgcgagaggcgcgtatataggttttgagttagtagggtcgggagcgggcggtttgtttttatgtgaaaggttgattt

SEQ ID NO: 18702 - DNA, 518 bp, Artificial Sequence
  chemically treated genomic DNA (Homo sapiens) CpG-island No: 18702
aaatcaacctttcacataaaaacaaaccgcccgctcccgaccctactaactcaaaacctatatacgcgcctctcgcgcaaccctaataatactcttcgtaaccctacgacgacaaaaacaaaaaacactaataatactaaaaaaaaaaaacgtccgaaaaaacatcatcacctacgacgacgaaaacgacgacgaaaaaaacaccgaaaccttcgacatcacgaccttacaaaacccgaacgaaacgacccccccgacgcccgaccctcccgcgcgccgaaacgtattaccccgaacccgaatatcgcgccaacccaaaccccccgaccccgccgacgtaacgcaactcctaacgctacgactccgcgaaacgaacgaaaaccccgacgtacccccgtacgactcgatacaaatatacgactacgaaaaccgcgactcctcttacgactccctcaactccctaaactccgacaacgaaaccgacgacgcccccgaccccgcgaaaccgctaaacgact

SEQ ID NO: 18703 - DNA, 518 bp, Artificial Sequence
  chemically treated genomic DNA (Homo sapiens) CpG-island No: 18703
gggttagttttttatatggagataggtcgttcgttttcggttttgttggtttagggtttgtgtgcgcgtttttcgcgtagttttggtggtgtttttcgtggttttgcggcggtagaagtaagaagtattgatggtattggaggaggaggacgttcgagagaatattattatttacgacgacgagggcggcggcgaggaggatatcgaggttttcgatattacggttttgtagaattcggacggggcggttttttcggcgttcggttttttcgcgcgtcgagacgtgttgtttcgggttcgggtgtcgcgttagtttagatttttcggtttcgtcgacgtggcgtagtttttggcgttgcggtttcgcgaggcggacgaggatttcggcgtattttcgtacgattcggtgtaggtgtacggttacgagggtcgcggttttttttgcggtttttttagttttttgggtttcggtagcgaagtcggcggcgttttcggtttcgcggagtcgttggacgatt

SEQ ID NO: 18704 - DNA, 518 bp, Artificial Sequence
  chemically treated genomic DNA (Homo sapiens) CpG-island No: 18704
aatcgtccaacgactccgcgaaaccgaaaacgccgccgacttcgctaccgaaacccaaaaaactaaaaaaaccgcaaaaaaaaccgcgaccctcgtaaccgtacacctacaccgaatcgtacgaaaatacgccgaaatcctcgtccgcctcgcgaaaccgcaacgccaaaaactacgccacgtcgacgaaaccgaaaaatctaaactaacgcgacacccgaacccgaaacaacacgtctcgacgcgcgaaaaaaccgaacgccgaaaaaaccgccccgtccgaattctacaaaaccgtaatatcgaaaacctcgatatcctcctcgccgccgccctcgtcgtcgtaaataataatattctctcgaacgtcctcctcctccaataccatcaatacttcttacttctaccgccgcaaaaccacgaaaaacaccaccaaaactacgcgaaaaacgcgcacacaaaccctaaaccaacaaaaccgaaaacgaacgacctatctccatataaaaaactaaccc

SEQ ID NO: 18705 - DNA, 601 bp, Artificial Sequence
  chemically treated genomic DNA (Homo sapiens) CpG-island No: 18705
gtcgagtttgtcgtcgggtttcggggtatagtttcgagtcgattggagcgggcgtcgcgtttcgttgtaggtttgagcggtttcggcgagaataagggagcgagacggagggggcgggggaagaagatttcgtttgcggaggagcgaggcggtttcgcgtcgcgcgggagaggagagtttagttttcgatttttttcggttagtcgggttcgcgcggcgggggcgggggcggaggcggcgtcgcgcgttcgttttttcggcgtttttgggttgcggggcgtatatagatgcggcgtttttttcggatcgggttcgtagcgttcggtagggtattcgggcgggaggacgtttaggttacggcgttaggttattttcgaagagttggcggggcgggtgtattcgggagcgcgaagttgttagttttcgttcgtagcggaaaacgggcgagcgcgcggtgaggtggggaattcggagtttattgcggagagattcggtttcgggttttcggttttcggttggtttttgggattggtgtggatggaattttagttgtaaggcggcggcgttttgagagtttatgtaaagtacggtagtaggttag

SEQ ID NO: 18706 - DNA, 601 bp, Artificial Sequence
  chemically treated genomic DNA (Homo sapiens) CpG-island No: 18706
ctaacctactaccgtactttacataaactctcaaaacgccgccgccttacaactaaaattccatccacaccaatcccaaaaaccaaccgaaaaccgaaaacccgaaaccgaatctctccgcaataaactccgaattccccacctcaccgcgcgctcgcccgttttccgctacgaacgaaaactaacaacttcgcgctcccgaatacacccgccccgccaactcttcgaaaataacctaacgccgtaacctaaacgtcctcccgcccgaataccctaccgaacgctacgaacccgatccgaaaaaaacgccgcatctatatacgccccgcaacccaaaaacgccgaaaaaacgaacgcgcgacgccgcctccgcccccgcccccgccgcgcgaacccgactaaccgaaaaaaatcgaaaactaaactctcctctcccgcgcgacgcgaaaccgcctcgctcctccgcaaacgaaatcttcttcccccgccccctccgtctcgctcccttattctcgccgaaaccgctcaaacctacaacgaaacgcgacgcccgctccaatcgactcgaaactataccccgaaacccgacgacaaactcgac

SEQ ID NO: 18707 - DNA, 601 bp, Artificial Sequence
  chemically treated genomic DNA (Homo sapiens) CpG-island No: 18707
ttgatttgttatcgtgttttgtatgggtttttaaaacgtcgtcgttttgtagttgggattttatttatattagttttaaaagttagtcgggaatcgggagttcggagtcgggttttttcgtagtgggtttcgaattttttattttatcgcgcgttcgttcgtttttcgttgcgggcggggattggtagtttcgcgttttcgggtgtattcgtttcgttagtttttcggaaatggtttggcgtcgtggtttggacgttttttcgttcgagtgttttgtcgggcgttgcgggttcggttcgggaggggcgtcgtatttgtatgcgtttcgtagtttaggagcgtcgagggggcggacgcgcggcgtcgttttcgttttcgttttcgtcgcgcgggttcggttggtcggggagggtcggaggttgggtttttttttttcgcgcggcgcggagtcgtttcgttttttcgtaggcggagtttttttttttcgtttttttcgtttcgtttttttgttttcgtcggggtcgtttagatttgtagcggagcgcggcgttcgttttaatcggttcggggttgtgtttcgggattcggcgataagttcgat

SEQ ID NO: 18708 - DNA, 601 bp, Artificial Sequence
  chemically treated genomic DNA (Homo sapiens) CpG-island No: 18708
atcgaacttatcgccgaatcccgaaacacaaccccgaaccgattaaaacgaacgccgcgctccgctacaaatctaaacgaccccgacgaaaacaaaaaaacgaaacgaaaaaaacgaaaaaaaaaaactccgcctacgaaaaaacgaaacgactccgcgccgcgcgaaaaaaaaaaacccaacctccgaccctccccgaccaaccgaacccgcgcgacgaaaacgaaaacgaaaacgacgccgcgcgtccgccccctcgacgctcctaaactacgaaacgcatacaaatacgacgcccctcccgaaccgaacccgcaacgcccgacaaaacactcgaacgaaaaaacgtccaaaccacgacgccaaaccatttccgaaaaactaacgaaacgaatacacccgaaaacgcgaaactaccaatccccgcccgcaacgaaaaacgaacgaacgcgcgataaaataaaaaattcgaaacccactacgaaaaaacccgactccgaactcccgattcccgactaacttttaaaactaatataaataaaatcccaactacaaaacgacgacgttttaaaaacccatacaaaacacgataacaaatcaa

SEQ ID NO: 18709 - DNA, 665 bp, Artificial Sequence
  chemically treated genomic DNA (Homo sapiens) CpG-island No: 18709
tgggtcgtcggggtagtggagaatcgaatatcgtgacgggttttttttcgtttttaattattttttttatttatcgaagtagttttttttggtttttggttttcgtattcgggttcgggcggttttcggaacgaaaggatttggtggtttttttagattcgacggtttaattttcgagggtttttcgcgggtttcggtttttcgtttatcggtgtttatcgttaggcgaagtaaagttgttagttcgttttggtatcgggcgtttacggcgtagttttcgtagtcggttatagagtgtcgttcgggttgcgtttttcgtttttttaagggtttcgtcgtttttatttcggtttcggttagagttttagggttgtttagggtcgggggatacgagtggcggtttttttggtagtcgaatttcgcgggtcgttgagcgtataatcggtttagggcggcgtggagtttcgggtaggcggacgggattttttcgggagaatagtttgtcggtgtttcggttaggggtgggttaaataggtacggtttcgttggtaaggggttttcgtggcgttggtcgtagtttatgttgatgtcgttggtgcgattgttgtagggtcggttatttttagtttcgttagttttcgtttcgtttagtagtaggttgtttt

SEQ ID NO: 18710 - DNA, 665 bp, Artificial Sequence
  chemically treated genomic DNA (Homo sapiens) CpG-island No: 18710
aaaacaacctactactaaacgaaacgaaaactaacgaaactaaaaataaccgaccctacaacaatcgcaccaacgacatcaacataaactacgaccaacgccacgaaaaccccttaccaacgaaaccgtacctatttaacccacccctaaccgaaacaccgacaaactattctcccgaaaaaatcccgtccgcctacccgaaactccacgccgccctaaaccgattatacgctcaacgacccgcgaaattcgactaccaaaaaaaccgccactcgtatcccccgaccctaaacaaccctaaaactctaaccgaaaccgaaataaaaacgacgaaacccttaaaaaaacgaaaaacgcaacccgaacgacactctataaccgactacgaaaactacgccgtaaacgcccgataccaaaacgaactaacaactttacttcgcctaacgataaacaccgataaacgaaaaaccgaaacccgcgaaaaaccctcgaaaattaaaccgtcgaatctaaaaaaaccaccaaatcctttcgttccgaaaaccgcccgaacccgaatacgaaaaccaaaaaccaaaaaaaactacttcgataaataaaaaaaataattaaaaacgaaaaaaaacccgtcacgatattcgattctccactaccccgacgaccca

SEQ ID NO: 18711 - DNA, 665 bp, Artificial Sequence
  chemically treated genomic DNA (Homo sapiens) CpG-island No: 18711
ggggtagtttgttgttggacggggcgggggttggcggagttggaggtagtcggttttgtagtaatcgtattagcggtattagtatgggttacgattagcgttacgggagttttttgttagcggggtcgtgtttgtttggtttatttttggtcggagtatcggtaggttattttttcggaggggtttcgttcgtttattcggagttttacgtcgttttggatcgattgtacgtttagcggttcgcggggttcggttgttaggaaagtcgttattcgtatttttcggttttgggtagttttggagttttagtcggggtcggagtgggagcggcggggtttttggagagacggggggcgtaattcggacgatattttgtgatcggttacggggattgcgtcgtgggcgttcggtattaggacgagttaatagttttgtttcgtttgacggtgggtatcggtgggcgagaagtcggagttcgcggagaattttcggggattgagtcgtcgggtttggaggagttattaggttttttcgtttcggaggtcgttcgggttcggatgcgggagttagaggttagggaggattatttcggtgagtgagagaagtggttagggacgggaagggattcgttacggtattcggttttttattgtttcgacggttta

SEQ ID NO: 18712 - DNA, 665 bp, Artificial Sequence
  chemically treated genomic DNA (Homo sapiens) CpG-island No: 18712
taaaccgtcgaaacaataaaaaaccgaataccgtaacgaatcccttcccgtccctaaccacttctctcactcaccgaaataatcctccctaacctctaactcccgcatccgaacccgaacgacctccgaaacgaaaaaacctaataactcctccaaacccgacgactcaatccccgaaaattctccgcgaactccgacttctcgcccaccgatacccaccgtcaaacgaaacaaaactattaactcgtcctaataccgaacgcccacgacgcaatccccgtaaccgatcacaaaatatcgtccgaattacgccccccgtctctccaaaaaccccgccgctcccactccgaccccgactaaaactccaaaactacccaaaaccgaaaaatacgaataacgactttcctaacaaccgaaccccgcgaaccgctaaacgtacaatcgatccaaaacgacgtaaaactccgaataaacgaacgaaacccctccgaaaaaataacctaccgatactccgaccaaaaataaaccaaacaaacacgaccccgctaacaaaaaactcccgtaacgctaatcgtaacccatactaataccgctaatacgattactacaaaaccgactacctccaactccgccaacccccgccccgtccaacaacaaactacccc

SEQ ID NO: 18713 - DNA, 646 bp, Artificial Sequence
  chemically treated genomic DNA (Homo sapiens) CpG-island No: 18713
gtcggtttcgcgtttttcgtttcgcgttttcgttttttcgcgtcgcgtataaaacggtttcgtagcgagtagcgggcgcggggttgcggcggttcgcgttcgggagataaaagcggggcgcgcgatttacgtttcgcggtttcggcggtttcgcgtttcgttcgggtttgggggaaggggagggttagtcgttcggggaggaataatacgggcggtttcgtttttcggcggttttgggcgatcggcgcgtcgtttcgcggtgttagttcgggagttcgggagttcgggcgcgggattaggttacgcggggcgttgggaggggattggtggttcgaggcgggtgggtcgcggggttcggtttttcgttcgtgggatcgcgcgttttcgtcgagcgtagttttttcgcgtgtggggttttagtacgtggcgtatttttgcgcgcgtgcgcgtgtagtcggggttcgagcgttacgtgcgagttggggtgcgcgggtattggtgcgtgtcgggagcggggacgttttgtttttcgaggttgttttgtttttcgaggtcgttcgtagttgtcgttcgttttgggtttggggatttcggttttgcgttttttcgtatttttggtaggtgtagttttaggtatagttaagag

SEQ ID NO: 18714 - DNA, 646 bp, Artificial Sequence
  chemically treated genomic DNA (Homo sapiens) CpG-island No: 18714
ctcttaactatacctaaaactacacctaccaaaaatacgaaaaaacgcaaaaccgaaatccccaaacccaaaacgaacgacaactacgaacgacctcgaaaaacaaaacaacctcgaaaaacaaaacgtccccgctcccgacacgcaccaatacccgcgcaccccaactcgcacgtaacgctcgaaccccgactacacgcgcacgcgcgcaaaaatacgccacgtactaaaaccccacacgcgaaaaaactacgctcgacgaaaacgcgcgatcccacgaacgaaaaaccgaaccccgcgacccacccgcctcgaaccaccaatcccctcccaacgccccgcgtaacctaatcccgcgcccgaactcccgaactcccgaactaacaccgcgaaacgacgcgccgatcgcccaaaaccgccgaaaaacgaaaccgcccgtattattcctccccgaacgactaaccctccccttcccccaaacccgaacgaaacgcgaaaccgccgaaaccgcgaaacgtaaatcgcgcgccccgcttttatctcccgaacgcgaaccgccgcaaccccgcgcccgctactcgctacgaaaccgttttatacgcgacgcgaaaaaacgaaaacgcgaaacgaaaaacgcgaaaccgac

SEQ ID NO: 18715 - DNA, 646 bp, Artificial Sequence
  chemically treated genomic DNA (Homo sapiens) CpG-island No: 18715
tttttgattgtatttggggttgtatttgttaggagtgcggaaaggcgtagggtcgaggtttttaagtttagagcgggcggtagttgcgggcgatttcggagggtagagtaatttcggagggtagggcgttttcgttttcggtacgtattagtgttcgcgtattttagttcgtacgtggcgttcgggtttcggttgtacgcgtacgcgcgtagggatgcgttacgtgttggggttttatacgcggggaggttgcgttcggcgagggcgcgcggttttacgggcggggagtcgggtttcgcgatttattcgtttcgggttattagtttttttttagcgtttcgcgtagtttggtttcgcgttcgggttttcgggttttcgggttggtatcgcgaggcggcgcgtcggtcgtttagggtcgtcgaggggcggggtcgttcgtattgttttttttcgagcggttggtttttttttttttttagattcgggcggggcgcggggtcgtcgaagtcgcggaacgtgggtcgcgcgtttcgtttttgtttttcgggcgcgagtcgtcgtagtttcgcgttcgttgttcgttgcggagtcgttttgtgcgcggcgcgggggaacggggacgcggggcggggggcgcggagtcggt

SEQ ID NO: 18716 - DNA, 646 bp, Artificial Sequence
  chemically treated genomic DNA (Homo sapiens) CpG-island No: 18716
accgactccgcgccccccgccccgcgtccccgttcccccgcgccgcgcacaaaacgactccgcaacgaacaacgaacgcgaaactacgacgactcgcgcccgaaaaacaaaaacgaaacgcgcgacccacgttccgcgacttcgacgaccccgcgccccgcccgaatctaaaaaaaaaaaaaaaccaaccgctcgaaaaaaaacaatacgaacgaccccgcccctcgacgaccctaaacgaccgacgcgccgcctcgcgataccaacccgaaaacccgaaaacccgaacgcgaaaccaaactacgcgaaacgctaaaaaaaaactaataacccgaaacgaataaatcgcgaaacccgactccccgcccgtaaaaccgcgcgccctcgccgaacgcaacctccccgcgtataaaaccccaacacgtaacgcatccctacgcgcgtacgcgtacaaccgaaacccgaacgccacgtacgaactaaaatacgcgaacactaatacgtaccgaaaacgaaaacgccctaccctccgaaattactctaccctccgaaatcgcccgcaactaccgcccgctctaaacttaaaaacctcgaccctacgcctttccgcactcctaacaaatacaaccccaaatacaatcaaaaa

SEQ ID NO: 18717 - DNA, 787 bp, Artificial Sequence
  chemically treated genomic DNA (Homo sapiens) CpG-island No: 18717
tcgtttttttgttttcgtggagcgagcgttatgtttcgtaagaattagggaggcggtttagggtcgtgggggttgcgagggtttcgtcgcgcggggttttatttatcgtcgtttttagttttgataagtagggatatgttttttagtcgttttacgtagttagacgatatatgttcggtgtttcggtcgttttattgtcggttttcgttgagcgtgtatatttttattcgtcgtcgggtgtcggttatcgtgtcgttcgggaatcggggcgggggtttcgttagtagacgtttaggaaaggggttttggagaggcgaggggcgaggcgtgagggcgttcgcgagcggagggtttttcggttttattgtcgtcgttgggcgtcgcggggtcgcgtcgtcgtttgtatggttcgttttagggatcgagttttgggtcgtcgttttttttcgttttcggtttttcggcgttattgtttaggtttggcgagttcggcgttcggtagtttcgagggggtcgcgtagcgtttcgtagtttttcgtttcgtagcgttaggaattcggggttttcgttattgttttgttttcgttttcgttatgattttcgcgaagtagtttttcgcgtcgtcgtcgtttttttaggtcgtcgtcgtcgtcgttatattttttttttttatatttggttttgttatcgcggttagtggttttttttcgttttttttgttttaaacgttagaagtcgataggcgtttgattttgttgtaattgttattattgttcgggagattttg

SEQ ID NO: 18718 - DNA, 787 bp, Artificial Sequence
  chemically treated genomic DNA (Homo sapiens) CpG-island No: 18718
caaaatctcccgaacaataataacaattacaacaaaatcaaacgcctatcgacttctaacgtttaaaacaaaaaaaacgaaaaaaaaccactaaccgcgataacaaaaccaaatataaaaaaaaaaaatataacgacgacgacgacgacctaaaaaaacgacgacgacgcgaaaaactacttcgcgaaaatcataacgaaaacgaaaacaaaacaataacgaaaaccccgaattcctaacgctacgaaacgaaaaactacgaaacgctacgcgaccccctcgaaactaccgaacgccgaactcgccaaacctaaacaataacgccgaaaaaccgaaaacgaaaaaaaacgacgacccaaaactcgatccctaaaacgaaccatacaaacgacgacgcgaccccgcgacgcccaacgacgacaataaaaccgaaaaaccctccgctcgcgaacgccctcacgcctcgcccctcgcctctccaaaacccctttcctaaacgtctactaacgaaacccccgccccgattcccgaacgacacgataaccgacacccgacgacgaataaaaatatacacgctcaacgaaaaccgacaataaaacgaccgaaacaccgaacatatatcgtctaactacgtaaaacgactaaaaaacatatccctacttatcaaaactaaaaacgacgataaataaaaccccgcgcgacgaaaccctcgcaacccccacgaccctaaaccgcctccctaattcttacgaaacataacgctcgctccacgaaaacaaaaaaacga

SEQ ID NO: 18719 - DNA, 787 bp, Artificial Sequence
  chemically treated genomic DNA (Homo sapiens) CpG-island No: 18719
tagagtttttcgggtagtggtagtagttgtagtaggattaggcgtttgtcggtttttgacgtttaaaatagggggagcggaagggagttattggtcgcggtggtagggttaggtataaggaaggaaaatatggcggcggcggcggcggtttgaggaggcggcggcggcgcgggaagttgtttcgcggagattatggcggaggcgggagtagggtagtgacgggagtttcgagtttttagcgttgcggggcgggaggttacgaagcgttgcgcggttttttcggggttgtcgggcgtcgggttcgttaggtttggataatagcgtcggggagtcggaggcgaggaaaggcggcggtttagagttcggtttttggagcgggttatgtaggcggcggcgcggtttcgcggcgtttagcggcggtagtgaggtcggggagtttttcgttcgcgggcgtttttacgtttcgtttttcgtttttttagggttttttttttgggcgtttattggcggggttttcgtttcggttttcgggcggtacgatgatcgatattcggcggcgggtgaaggtgtatacgtttaacgaggatcggtagtgggacgatcggggtatcgggtatgtgtcgtttggttacgtggagcggttgaagggtatgtttttgtttgttagggttgagagcgacggtaagtgaagtttcgcgcggcgggattttcgtagtttttacggttttgggtcgtttttttggtttttgcggggtatggcgttcgttttacgagaatagagggacgg

SEQ ID NO: 18720 - DNA, 787 bp, Artificial Sequence
  chemically treated genomic DNA (Homo sapiens) CpG-island No: 18720
ccgtccctctattctcgtaaaacgaacgccataccccgcaaaaaccaaaaaaacgacccaaaaccgtaaaaactacgaaaatcccgccgcgcgaaacttcacttaccgtcgctctcaaccctaacaaacaaaaacatacccttcaaccgctccacgtaaccaaacgacacatacccgataccccgatcgtcccactaccgatcctcgttaaacgtatacaccttcacccgccgccgaatatcgatcatcgtaccgcccgaaaaccgaaacgaaaaccccgccaataaacgcccaaaaaaaaaaccctaaaaaaacgaaaaacgaaacgtaaaaacgcccgcgaacgaaaaactccccgacctcactaccgccgctaaacgccgcgaaaccgcgccgccgcctacataacccgctccaaaaaccgaactctaaaccgccgcctttcctcgcctccgactccccgacgctattatccaaacctaacgaacccgacgcccgacaaccccgaaaaaaccgcgcaacgcttcgtaacctcccgccccgcaacgctaaaaactcgaaactcccgtcactaccctactcccgcctccgccataatctccgcgaaacaacttcccgcgccgccgccgcctcctcaaaccgccgccgccgccgccatattttccttccttatacctaaccctaccaccgcgaccaataactcccttccgctccccctattttaaacgtcaaaaaccgacaaacgcctaatcctactacaactactaccactacccgaaaaactcta

SEQ ID NO: 18721 - DNA, 831 bp, Artificial Sequence
  chemically treated genomic DNA (Homo sapiens) CpG-island No: 18721
ttcggtcgtttaagcgattcggattagtggaagtcggttttttttcgtcgtcgtttttttcgttttttttatatagttaaaatcgtcgttattttggttcgttttttaaaagcggcgcgcggggttatttagggagtagttgtaggggcggttcgtagttttattatttaaagagatagtagcgagatcgggagttttattgcggcggaggttttcgacggaggcgggaggcgggcgcggagttgtcgaggtggcgggagcgtagggagcggaggaggcgggacgtagattgcgtcggtgatagttcgaggttttttttcgtttttttgtacgtatcgtcgtgcgagcgttgggcggtgtgtgcgttcgtcgcgttttgtgttcgttattagtttcgttttaggatgtacgaggggcgtggatacgtttgcggtttttgttcgcgggtttcggcgtttcggtttcgttttcgttcgtcgttatttttttttgtttttgtttcgtttttgtttttgtttttgtttttggtttgcggacgtcgggtagcgtgggtttgggtttttattcgttttcgagagcgttttttcggggtcgtttttatggttgagtcgggcgttcgggatttattcggcgttttgcggatttgagggaatgaaatggaaacgttttcggggaaggtcgcgggtgtgggcgtttaggtcggcgtagttttgggagtcgtcgtgggtcgcggattggcgtggttagtgtggaaatttgggattgtttgcgatttttgggcgtgggatcgagttttaagtgataattttaaaattttattttatagtttag

SEQ ID NO: 18722 - DNA, 831 bp, Artificial Sequence
  chemically treated genomic DNA (Homo sapiens) CpG-island No: 18722
ctaaactataaaataaaattttaaaattatcacttaaaactcgatcccacgcccaaaaatcgcaaacaatcccaaatttccacactaaccacgccaatccgcgacccacgacgactcccaaaactacgccgacctaaacgcccacacccgcgaccttccccgaaaacgtttccatttcattccctcaaatccgcaaaacgccgaataaatcccgaacgcccgactcaaccataaaaacgaccccgaaaaaacgctctcgaaaacgaataaaaacccaaacccacgctacccgacgtccgcaaaccaaaaacaaaaacaaaaacaaaaacgaaacaaaaacaaaaaaaaataacgacgaacgaaaacgaaaccgaaacgccgaaacccgcgaacaaaaaccgcaaacgtatccacgcccctcgtacatcctaaaacgaaactaataacgaacacaaaacgcgacgaacgcacacaccgcccaacgctcgcacgacgatacgtacaaaaaaacgaaaaaaaacctcgaactatcaccgacgcaatctacgtcccgcctcctccgctccctacgctcccgccacctcgacaactccgcgcccgcctcccgcctccgtcgaaaacctccgccgcaataaaactcccgatctcgctactatctctttaaataataaaactacgaaccgcccctacaactactccctaaataaccccgcgcgccgcttttaaaaaacgaaccaaaataacgacgattttaactatataaaaaaaacgaaaaaaacgacgacgaaaaaaaaccgacttccactaatccgaatcgcttaaacgaccgaa

SEQ ID NO: 18723 - DNA, 831 bp, Artificial Sequence
  chemically treated genomic DNA (Homo sapiens) CpG-island No: 18723
ttaggttgtaaggtgaagttttagaattgttatttggaattcggttttacgtttagaaatcgtaaatagttttaagtttttatattggttacgttagttcgcgatttacggcggtttttaaggttgcgtcgatttaggcgtttatattcgcgatttttttcggaagcgtttttattttatttttttaagttcgtaaggcgtcgggtgggtttcgagcgttcgatttagttataaaggcggtttcgggaaaacgttttcggaagcgggtaggggtttaggtttacgttgttcggcgttcgtaggttaggggtaggggtagaggtagggacggggtaggaataagggaaggtggcggcgggcggaggcgaggtcgaagcgtcggggttcgcgggtagaggtcgtaaacgtatttacgtttttcgtgtattttggagcggggttgatgacgaatatagggcgcgacggacgtatatatcgtttagcgttcgtacgacggtgcgtgtaaggaggcgggagggagtttcgggttgttatcggcgtaatttgcgtttcgtttttttcgttttttgcgttttcgttatttcggtaatttcgcgttcgtttttcgttttcgtcggaagttttcgtcgtagtaaggttttcggtttcgttgttgtttttttaaatggtggggttacgagtcgtttttgtagttgttttttgggtggtttcgcgcgtcgtttttgaggggcgaattaagatggcggcggttttggttgtgtgaggaagacggaagagacggcggcggagggaaatcgatttttattagttcgggtcgtttgggcggtcggg

SEQ ID NO: 18724 - DNA, 831 bp, Artificial Sequence
  chemically treated genomic DNA (Homo sapiens) CpG-island No: 18724
cccgaccgcccaaacgacccgaactaataaaaatcgatttccctccgccgccgtctcttccgtcttcctcacacaaccaaaaccgccgccatcttaattcgcccctcaaaaacgacgcgcgaaaccacccaaaaaacaactacaaaaacgactcgtaaccccaccatttaaaaaaacaacaacgaaaccgaaaaccttactacgacgaaaacttccgacgaaaacgaaaaacgaacgcgaaattaccgaaataacgaaaacgcaaaaaacgaaaaaaacgaaacgcaaattacgccgataacaacccgaaactccctcccgcctccttacacgcaccgtcgtacgaacgctaaacgatatatacgtccgtcgcgccctatattcgtcatcaaccccgctccaaaatacacgaaaaacgtaaatacgtttacgacctctacccgcgaaccccgacgcttcgacctcgcctccgcccgccgccaccttcccttattcctaccccgtccctacctctacccctacccctaacctacgaacgccgaacaacgtaaacctaaacccctacccgcttccgaaaacgttttcccgaaaccgcctttataactaaatcgaacgctcgaaacccacccgacgccttacgaacttaaaaaaataaaataaaaacgcttccgaaaaaaatcgcgaatataaacgcctaaatcgacgcaaccttaaaaaccgccgtaaatcgcgaactaacgtaaccaatataaaaacttaaaactatttacgatttctaaacgtaaaaccgaattccaaataacaattctaaaacttcaccttacaacctaa

SEQ ID NO: 18725 - DNA, 884 bp, Artificial Sequence
  chemically treated genomic DNA (Homo sapiens) CpG-island No: 18725
agcgttttcgagtttacggtagtttcgaaaaggcgtcgtggggagggcggtttttttttttttacggtcgtttagatttcgggtttggttcgggtcgtttttcggcgggtttcggggtttattttttttttgtttcggcggtcgaggcgaggagatcgggagggcggtagtggcggagtcgagtttgcgggcggcgggttgcgtttcggttcgtcggcgtttttttgttttagggcgtttcgcgattttgggtttttttatttttttttttattttttttcgtcgtatcgcgaattttagttcgcgggtttttatatagcgtcgtcggcggcgtttgaaaacgaggaggcggaggaggatgtgaaggaagtggagcgtaagataggtcgtcgcgggttgtgggcgtcgattatggagcgggttgcggaggaggcgtttgcgttcgattgtttttttttttttagcgagtttgttgttttagttttcgttttgttggtcgtcgttgtcgtcgtcgtatttcggtattttagagttttacggagttaagatggtcgtttttcggttttttttgttgttttcggttgtcggaagtgacgataggtcgttattcggagtttcgttaattagtatggtttgagaaagtcggttcggttgttgttgttaggggcgatttggtttagatttcgtcgcgggggcggtgtagagggttggatagtgttggtcgggttttcgttgattttcgcgggttgcgggttttttttgtttcgagcgcgtcggtaatcgcgaaagagtcgagaaacggttttgggcgatagttagagttttttcgttgagttggtatttatatattataggtttgggttggttggattatagatcgagag

SEQ ID NO: 18726 - DNA, 884 bp, Artificial Sequence
  chemically treated genomic DNA (Homo sapiens) CpG-island No: 18726
ctctcgatctataatccaaccaacccaaacctataatatataaataccaactcaacgaaaaaactctaactatcgcccaaaaccgtttctcgactctttcgcgattaccgacgcgctcgaaacaaaaaaaacccgcaacccgcgaaaatcaacgaaaacccgaccaacactatccaaccctctacaccgcccccgcgacgaaatctaaaccaaatcgcccctaacaacaacaaccgaaccgactttctcaaaccatactaattaacgaaactccgaataacgacctatcgtcacttccgacaaccgaaaacaacaaaaaaaaccgaaaaacgaccatcttaactccgtaaaactctaaaataccgaaatacgacgacgacaacgacgaccaacaaaacgaaaactaaaacaacaaactcgctaaaaaaaaaaaaacaatcgaacgcaaacgcctcctccgcaacccgctccataatcgacgcccacaacccgcgacgacctatcttacgctccacttccttcacatcctcctccgcctcctcgttttcaaacgccgccgacgacgctatataaaaacccgcgaactaaaattcgcgatacgacgaaaaaaaataaaaaaaaaaataaaaaaacccaaaatcgcgaaacgccctaaaacaaaaaaacgccgacgaaccgaaacgcaacccgccgcccgcaaactcgactccgccactaccgccctcccgatctcctcgcctcgaccgccgaaacaaaaaaaaaataaaccccgaaacccgccgaaaaacgacccgaaccaaacccgaaatctaaacgaccgtaaaaaaaaaaaaaccgccctccccacgacgccttttcgaaactaccgtaaactcgaaaacgct

SEQ ID NO: 18727 - DNA, 884 bp, Artificial Sequence
  chemically treated genomic DNA (Homo sapiens) CpG-island No: 18727
ttttcgatttgtaatttagttaatttaggtttgtagtgtgtaaatgttaatttagcgggagggttttggttgtcgtttagagtcgtttttcggttttttcgcggttgtcggcgcgttcgggataggaggaattcgtagttcgcgggagttagcggagattcgattagtattatttagttttttgtatcgttttcgcggcgaggtttggattaagtcgtttttagtaataatagtcgggtcggtttttttaggttatgttgattggcgggatttcgggtggcggtttgtcgttattttcggtagtcggaggtagtagaggaagtcgaggggcggttattttggtttcgtgaggttttgaggtgtcggggtgcggcggcggtagcggcggttagtagggcggaggttgaggtagtaagttcgttagagagggagaagtagtcgggcgtaggcgtttttttcgtagttcgttttatggtcggcgtttatagttcgcggcggtttgttttgcgttttattttttttatattttttttcgttttttcgtttttaggcgtcgtcggcggcgttgtgtggaggttcgcgagttgaaattcgcggtgcgacgggagggagtggagaaggaggtgagggggtttaggatcgcggggcgttttgaggtaaggggacgtcggcgggtcgaagcgtagttcgtcgttcgtaggttcggtttcgttattgtcgttttttcggttttttcgtttcggtcgtcgaggtagggagagaatgagtttcgggattcgtcgggggacggttcgggttaggttcgggatttagacggtcgtagggggaagggagtcgttttttttacggcgttttttcggaattgtcgtggattcgaggacgtt

SEQ ID NO: 18728 - DNA, 884 bp, Artificial Sequence
  chemically treated genomic DNA (Homo sapiens) CpG-island No: 18728
aacgtcctcgaatccacgacaattccgaaaaaacgccgtaaaaaaaacgactcccttccccctacgaccgtctaaatcccgaacctaacccgaaccgtcccccgacgaatcccgaaactcattctctccctacctcgacgaccgaaacgaaaaaaccgaaaaaacgacaataacgaaaccgaacctacgaacgacgaactacgcttcgacccgccgacgtccccttacctcaaaacgccccgcgatcctaaaccccctcacctccttctccactccctcccgtcgcaccgcgaatttcaactcgcgaacctccacacaacgccgccgacgacgcctaaaaacgaaaaaacgaaaaaaaatataaaaaaaataaaacgcaaaacaaaccgccgcgaactataaacgccgaccataaaacgaactacgaaaaaaacgcctacgcccgactacttctccctctctaacgaacttactacctcaacctccgccctactaaccgccgctaccgccgccgcaccccgacacctcaaaacctcacgaaaccaaaataaccgcccctcgacttcctctactacctccgactaccgaaaataacgacaaaccgccacccgaaatcccgccaatcaacataacctaaaaaaaccgacccgactattattactaaaaacgacttaatccaaacctcgccgcgaaaacgatacaaaaaactaaataatactaatcgaatctccgctaactcccgcgaactacgaattcctcctatcccgaacgcgccgacaaccgcgaaaaaaccgaaaaacgactctaaacgacaaccaaaaccctcccgctaaattaacatttacacactacaaacctaaattaactaaattacaaatcgaaaa

SEQ ID NO: 18729 - DNA, 2397 bp, Artificial Sequence
  chemically treated genomic DNA (Homo sapiens) CpG-island No: 18729
cgcgggtgttttcgggttgggtcgtagttagattgcgtttttcgcgcgttttcgttttgtattaggatcgtttaggaaacgtttgcgggtattttgaggaaggtcggcggtttcgggttagttcgtattggtcgggggtggggcgggggtcgtatttgttgcggaagtttcgaaagttttcgttcggtttttcgtcgtcgtcgcgggggttggttggattaggcgggtaggttcgaggatgcggatgaatttaagcgttttcgagtgttcggaggtttttcgttttagtttttcgtttagaggtaagggcgtgcgaggggatttagatatttaaggatttgaggtttcggtttcgaggttttgggcgggggattgggtaggttgcgcggggttttagcgaggggatagttcgggtgggcggttagggtgttgggggttgcgggcggcggataaagcggcggtattatttcgcggcgcgggttaatggaatgaatgggttataaatagtcgttaatgggcggttcgcgttgtgttttttaagagtcgcgggagcgcggagcggtcgttgttcgtttgcgtcgtttcgggagttgtcgacggacggagcgttttcgttttcgttcggtcgttcggtgagtgggttcgggggtcgggggcgttcgcgttcgggttaggggcgttgcgtgtaaagggggcgcgtcgtttggagcgcgcgtcggatcggtcgggggttttcggcgatgatggcgtttttcgcgcgcgttgcggatttcgttgattttggtcgcgtttcggggggcgtcggggggttcggcggcgggggtttgagtggtacgcgggagttcgggaatttcggcgtgtcggttttttttgatttcgcgttttttcgtagttcgtcgtcgttatgtttttttttaatagttataacgtattgaagttgcgtttttcggtcgaggacgagtttttcgatttgagcgtttataataattatatggttaaggtgttgattttcgagttgtacgcggattgcgcgttaagagtacgtcgagcggttttacgttggacgacgttatttagataggcgtggataattcgggtacgcgatttttcggggtcggggtttcggtttttttttttttcgcgtagtcgtagggtttttagtagcgcgttcgggttcggtagtgacgttattgttttcgtttcgcgtttttttttttaggttattcgtatattatgatcgtgggttgcgtggcgggcgacgaggagttttacgaagtgtttaaggattttttcgattttattatcgaggatcggtacggcggttataagtttagcgatgagtataagatcgattttaatttcgataatttgtaggtgcggggttgcgggcgggtcgggcgggcggggtcggggttttcgggcgtttattttcgtttcgttttttagggcggcgacgatttggattttaattacgtgttgagttcgcgggtgcgtacgggtcgtagtattcgtggtttttgttttttttcgtattgtagtcgcggggagcgtcgcgttatcgagaagttcgcggtggaaggtaggggtcgggcgggtcgaggggcggcggcggtcgcgtttttttttcggcgcggttttcgttcgtttttgtttacgtcgttcgggagcggtagtcgtcgtcgcgtttttatttgcgcgcgttcgggtttagtttttcggagggatcgagggacggaggtttagtttcgcgtttatagcggtttggggtttagggagggcgggttttggcgcggggttatcgtttgggatcgtcgttcgggtcgtgaggattggacgttcgtagattcgggcgggtggggttttttgacgtttttcgaggtggggtacgggggcgggcgggttcgcgttgcgggttggaggggcgggcgcgggagtcgagcgttttgagcgtatttttcgtagttttgtttagtttggacggcgatttggcgggtcgatattacgcgtttaagagtatgacggaggcggagtagtagtagtttatcgacgattatttttttttcgataagttcgtgtcgtttttgttgttggtttcgggtatggttcgcgattggttcgacgttcgcggtatttggtgcgtgtttttttgcgttttttcgcggcgtttttttttttcgttattttcgttttttttttcgtttttttcgcgggggtggggtttttcgcggcgaggaggaggaggaggaggagggaggggtcggtcgcgtttcgggtttgggtttcgtgtcgcgtttttttttgcgtcggtgattttggtcgagtaggtgcgttaagggattgggtttcggttcgtgggggtttaggatttagtaatatttttttatttcgagacgtgag

SEQ ID NO: 18730 - DNA, 2397 bp, Artificial Sequence
  chemically treated genomic DNA (Homo sapiens) CpG-island No: 18730
ctcacgtctcgaaataaaaaaatattactaaatcctaaacccccacgaaccgaaacccaatcccttaacgcacctactcgaccaaaatcaccgacgcaaaaaaaaacgcgacacgaaacccaaacccgaaacgcgaccgacccctccctcctcctcctcctcctcctcgccgcgaaaaaccccacccccgcgaaaaaaacgaaaaaaaaaacgaaaataacgaaaaaaaaaaacgccgcgaaaaaacgcaaaaaaacacgcaccaaataccgcgaacgtcgaaccaatcgcgaaccatacccgaaaccaacaacaaaaacgacacgaacttatcgaaaaaaaaataatcgtcgataaactactactactccgcctccgtcatactcttaaacgcgtaatatcgacccgccaaatcgccgtccaaactaaacaaaactacgaaaaatacgctcaaaacgctcgactcccgcgcccgcccctccaacccgcaacgcgaacccgcccgcccccgtaccccacctcgaaaaacgtcaaaaaaccccacccgcccgaatctacgaacgtccaatcctcacgacccgaacgacgatcccaaacgataaccccgcgccaaaacccgccctccctaaaccccaaaccgctataaacgcgaaactaaacctccgtccctcgatccctccgaaaaactaaacccgaacgcgcgcaaataaaaacgcgacgacgactaccgctcccgaacgacgtaaacaaaaacgaacgaaaaccgcgccgaaaaaaaaacgcgaccgccgccgcccctcgacccgcccgacccctaccttccaccgcgaacttctcgataacgcgacgctccccgcgactacaatacgaaaaaaaacaaaaaccacgaatactacgacccgtacgcacccgcgaactcaacacgtaattaaaatccaaatcgtcgccgccctaaaaaacgaaacgaaaataaacgcccgaaaaccccgaccccgcccgcccgacccgcccgcaaccccgcacctacaaattatcgaaattaaaatcgatcttatactcatcgctaaacttataaccgccgtaccgatcctcgataataaaatcgaaaaaatccttaaacacttcgtaaaactcctcgtcgcccgccacgcaacccacgatcataatatacgaataacctaaaaaaaaaaacgcgaaacgaaaacaataacgtcactaccgaacccgaacgcgctactaaaaaccctacgactacgcgaaaaaaaaaaaaaccgaaaccccgaccccgaaaaatcgcgtacccgaattatccacgcctatctaaataacgtcgtccaacgtaaaaccgctcgacgtactcttaacgcgcaatccgcgtacaactcgaaaatcaacaccttaaccatataattattataaacgctcaaatcgaaaaactcgtcctcgaccgaaaaacgcaacttcaatacgttataactattaaaaaaaaacataacgacgacgaactacgaaaaaacgcgaaatcaaaaaaaaccgacacgccgaaattcccgaactcccgcgtaccactcaaacccccgccgccgaaccccccgacgccccccgaaacgcgaccaaaatcaacgaaatccgcaacgcgcgcgaaaaacgccatcatcgccgaaaacccccgaccgatccgacgcgcgctccaaacgacgcgccccctttacacgcaacgcccctaacccgaacgcgaacgcccccgacccccgaacccactcaccgaacgaccgaacgaaaacgaaaacgctccgtccgtcgacaactcccgaaacgacgcaaacgaacaacgaccgctccgcgctcccgcgactcttaaaaaacacaacgcgaaccgcccattaacgactatttataacccattcattccattaacccgcgccgcgaaataataccgccgctttatccgccgcccgcaacccccaacaccctaaccgcccacccgaactatcccctcgctaaaaccccgcgcaacctacccaatcccccgcccaaaacctcgaaaccgaaacctcaaatccttaaatatctaaatcccctcgcacgcccttacctctaaacgaaaaactaaaacgaaaaacctccgaacactcgaaaacgcttaaattcatccgcatcctcgaacctacccgcctaatccaaccaacccccgcgacgacgacgaaaaaccgaacgaaaactttcgaaacttccgcaacaaatacgacccccgccccacccccgaccaatacgaactaacccgaaaccgccgaccttcctcaaaatacccgcaaacgtttcctaaacgatcctaatacaaaacgaaaacgcgcgaaaaacgcaatctaactacgacccaacccgaaaacacccgcg

SEQ ID NO: 18731 - DNA, 2397 bp, Artificial Sequence
  chemically treated genomic DNA (Homo sapiens) CpG-island No: 18731
tttacgtttcggggtggggaggtgttgttgagttttgagtttttacgggtcggggtttagttttttaacgtatttgttcggttaaggttatcggcgtaggaggaggcgcggtacggaatttagattcggagcgcggtcggtttttttttttttttttttttttttttcgtcgcgaggggttttattttcgcgaggggggcgagagggaaagcggaggtagcggggagggaggacgtcgcgagagggcgtagagggatacgtattagatatcgcgggcgtcgggttagtcgcgggttatgttcgaggttagtagtaggggcgatacgggtttgtcgaagaggaagtggtcgtcgatgagttgttgttgtttcgttttcgttatgtttttgagcgcgtagtatcggttcgttaggtcgtcgtttaggttggatagggttgcgaggggtgcgtttaggacgttcggttttcgcgttcgtttttttagttcgtagcgcggattcgttcgttttcgtgttttatttcgggggacgttagagggttttattcgttcggatttgcgggcgtttagtttttacggttcgggcgacggttttaggcggtgatttcgcgttaggattcgttttttttgggttttaggtcgttgtgggcgcggggttgggttttcgtttttcggttttttcgggaaattgaattcgggcgcgcgtagataagagcgcgacggcggttgtcgttttcgggcgacgtaaataaaagcgggcggggatcgcgtcgggagggggacgcggtcgtcgtcgtttttcggttcgttcggtttttattttttatcgcgagtttttcgatggcgcggcgtttttcgcggttgtagtgcggggggaggtagaagttacggatgttgcggttcgtgcgtattcgcgagtttagtacgtagttggggtttaggtcgtcgtcgttttgggaggcgagacgggagtgagcgttcgaagatttcggtttcgttcgttcggttcgttcgtagtttcgtatttgtaggttgtcggggttgaggtcggttttgtgtttatcgttgggtttgtagtcgtcgtgtcggttttcgatgatggggtcgaagagatttttgaatatttcgtaggatttttcgtcgttcgttacgtagtttacggttatgatgtacgggtggtttgggggagggggcgcgggacggggatagtgacgttattgtcgggttcgagcgcgttgttgaggattttgcggttgcgcggggggagggggggtcgggatttcggtttcgaggggtcgcgtattcgggttgtttacgtttgtttggatgacgtcgtttagcgtgaagtcgttcggcgtgtttttggcgcgtagttcgcgtatagttcgggggttagtattttggttatgtggttgttgtgggcgtttaggtcggggaattcgttttcggtcgggaagcgtagttttagtgcgttgtggttgttggagaagggtatggcggcggcgggttgcggggagacgcggggttagaggggatcggtacgtcggggttttcgggttttcgcgtattatttaggttttcgtcgtcgggtttttcggcgtttttcgggacgcggttaaggttagcggggttcgtagcgcgcgcggggagcgttattatcgtcggggattttcggtcggttcggcgcgcgttttaggcgacgcgttttttttgtacgtagcgtttttagttcgggcgcggacgttttcggttttcgggtttatttatcgggcggtcgggcgggggcgggggcgtttcgttcgtcggtagttttcggagcgacgtaggcgaatagcggtcgtttcgcgttttcgcggtttttaaggggtataacgcgggtcgtttattggcggttatttatagtttatttattttattggttcgcgtcgcggggtggtgtcgtcgttttgttcgtcgttcgtagtttttaatattttggtcgtttattcgagttgttttttcgttgggatttcgcgtagtttgtttagtttttcgtttaagatttcgaggtcgaaattttaggtttttggatatttggattttttcgtacgtttttgtttttgggcgggaaattgaggcggagagttttcgggtattcgaggacgtttgggtttattcgtattttcgagtttgttcgtttagtttagttagttttcgcggcggcggcgaggggtcgggcgaaagttttcggggttttcgtagtaggtacggttttcgttttattttcggttagtgcgagttggttcggagtcgtcgattttttttaaggtgttcgtaggcgttttttgggcgattttggtgtaaagcgaaggcgcgcgggaagcgtagtttggttgcggtttagttcgggggtattcgcg

SEQ ID NO: 18732 - DNA, 2397 bp, Artificial Sequence
  chemically treated genomic DNA (Homo sapiens) CpG-island No: 18732
cgcgaatacccccgaactaaaccgcaaccaaactacgcttcccgcgcgccttcgctttacaccaaaatcgcccaaaaaacgcctacgaacaccttaaaaaaaatcgacgactccgaaccaactcgcactaaccgaaaataaaacgaaaaccgtacctactacgaaaaccccgaaaactttcgcccgacccctcgccgccgccgcgaaaactaactaaactaaacgaacaaactcgaaaatacgaataaacccaaacgtcctcgaatacccgaaaactctccgcctcaatttcccgcccaaaaacaaaaacgtacgaaaaaatccaaatatccaaaaacctaaaatttcgacctcgaaatcttaaacgaaaaactaaacaaactacgcgaaatcccaacgaaaaaacaactcgaataaacgaccaaaatattaaaaactacgaacgacgaacaaaacgacgacaccaccccgcgacgcgaaccaataaaataaataaactataaataaccgccaataaacgacccgcgttataccccttaaaaaccgcgaaaacgcgaaacgaccgctattcgcctacgtcgctccgaaaactaccgacgaacgaaacgcccccgcccccgcccgaccgcccgataaataaacccgaaaaccgaaaacgtccgcgcccgaactaaaaacgctacgtacaaaaaaaacgcgtcgcctaaaacgcgcgccgaaccgaccgaaaatccccgacgataataacgctccccgcgcgcgctacgaaccccgctaaccttaaccgcgtcccgaaaaacgccgaaaaacccgacgacgaaaacctaaataatacgcgaaaacccgaaaaccccgacgtaccgatcccctctaaccccgcgtctccccgcaacccgccgccgccatacccttctccaacaaccacaacgcactaaaactacgcttcccgaccgaaaacgaattccccgacctaaacgcccacaacaaccacataaccaaaatactaacccccgaactatacgcgaactacgcgccaaaaacacgccgaacgacttcacgctaaacgacgtcatccaaacaaacgtaaacaacccgaatacgcgacccctcgaaaccgaaatcccgaccccccctccccccgcgcaaccgcaaaatcctcaacaacgcgctcgaacccgacaataacgtcactatccccgtcccgcgccccctcccccaaaccacccgtacatcataaccgtaaactacgtaacgaacgacgaaaaatcctacgaaatattcaaaaatctcttcgaccccatcatcgaaaaccgacacgacgactacaaacccaacgataaacacaaaaccgacctcaaccccgacaacctacaaatacgaaactacgaacgaaccgaacgaacgaaaccgaaatcttcgaacgctcactcccgtctcgcctcccaaaacgacgacgacctaaaccccaactacgtactaaactcgcgaatacgcacgaaccgcaacatccgtaacttctacctccccccgcactacaaccgcgaaaaacgccgcgccatcgaaaaactcgcgataaaaaataaaaaccgaacgaaccgaaaaacgacgacgaccgcgtccccctcccgacgcgatccccgcccgcttttatttacgtcgcccgaaaacgacaaccgccgtcgcgctcttatctacgcgcgcccgaattcaatttcccgaaaaaaccgaaaaacgaaaacccaaccccgcgcccacaacgacctaaaacccaaaaaaaacgaatcctaacgcgaaatcaccgcctaaaaccgtcgcccgaaccgtaaaaactaaacgcccgcaaatccgaacgaataaaaccctctaacgtcccccgaaataaaacacgaaaacgaacgaatccgcgctacgaactaaaaaaacgaacgcgaaaaccgaacgtcctaaacgcacccctcgcaaccctatccaacctaaacgacgacctaacgaaccgatactacgcgctcaaaaacataacgaaaacgaaacaacaacaactcatcgacgaccacttcctcttcgacaaacccgtatcgcccctactactaacctcgaacataacccgcgactaacccgacgcccgcgatatctaatacgtatccctctacgccctctcgcgacgtcctccctccccgctacctccgctttccctctcgcccccctcgcgaaaataaaacccctcgcgacgaaaaaaaaaaaaaaaaaaaaaaaaaaaccgaccgcgctccgaatctaaattccgtaccgcgcctcctcctacgccgataaccttaaccgaacaaatacgttaaaaaactaaaccccgacccgtaaaaactcaaaactcaacaacacctccccaccccgaaacgtaaa

SEQ ID NO: 18733 - DNA, 547 bp, Artificial Sequence
  chemically treated genomic DNA (Homo sapiens) CpG-island No: 18733
atggtaggtttcgaggtcgtagtttttattggcgcgggttgagttttttgttgtttttggtttcggggtcgttgtaggcgttgaggttgtaggtgggtttggggagttcggggggtcgtcgcgacgaggattacggcgacggtggcggggagggttttaggtaagttttcggtgttgtgtatgtgtggaggggtggtttgggttttttcggggttttcgaacgaaggtgacgggaaaggaaaatggggtttttttcgggtggaggatgggattttcgggtcggagtttttggaaagggttttttgaggttgttataataggaaaacgttcgtagagatgtgatttagtgatcgttcgttaatcggattggagagaagatcggttcggattttacgtttggtttgaagtagggaagacgttgtttttttttcgcgagtagtttatattcgtttaagttttagttttttgttttttcgttaatttcgtttttttttaaatcgtaaatttttttgagtcgatatcgttgcgtttaaatgatgtgtttatt

SEQ ID NO: 18734 - DNA, 547 bp, Artificial Sequence
  chemically treated genomic DNA (Homo sapiens) CpG-island No: 18734
aataaacacatcatttaaacgcaacgatatcgactcaaaaaaatttacgatttaaaaaaaaacgaaattaacgaaaaaacaaaaaactaaaacttaaacgaatataaactactcgcgaaaaaaaaacaacgtcttccctacttcaaaccaaacgtaaaatccgaaccgatcttctctccaatccgattaacgaacgatcactaaatcacatctctacgaacgttttcctattataacaacctcaaaaaaccctttccaaaaactccgacccgaaaatcccatcctccacccgaaaaaaaccccattttcctttcccgtcaccttcgttcgaaaaccccgaaaaaacccaaaccacccctccacacatacacaacaccgaaaacttacctaaaaccctccccgccaccgtcgccgtaatcctcgtcgcgacgaccccccgaactccccaaacccacctacaacctcaacgcctacaacgaccccgaaaccaaaaacaacaaaaaactcaacccgcgccaataaaaactacgacctcgaaacctaccat

SEQ ID NO: 18735 - DNA, 547 bp, Artificial Sequence
  chemically treated genomic DNA (Homo sapiens) CpG-island No: 18735
ggtaagtatattatttaggcgtaacggtgtcggtttaagaggatttgcgatttggaagagagcgaggttagcgagaagatagaaggttggaatttggacgaatgtaagttgttcgcggaggggaggtagcgttttttttgttttaggttaggcgtgggattcgggtcggttttttttttagttcggttagcgggcggttattgggttatatttttacggacgtttttttgttatgatagttttagaaaattttttttaaaagtttcggttcggaaattttattttttattcgaagaaaattttatttttttttttcgttattttcgttcggaagtttcggggaagtttagattatttttttatatatgtatagtatcgagggtttgtttagaatttttttcgttatcgtcgtcgtgattttcgtcgcggcggtttttcgggttttttaaatttatttgtagttttagcgtttatagcgatttcgagattaagggtaatagggaatttaattcgcgttagtggaagttgcgatttcgggatttgttat

SEQ ID NO: 18736 - DNA, 547 bp, Artificial Sequence
  chemically treated genomic DNA (Homo sapiens) CpG-island No: 18736
ataacaaatcccgaaatcgcaacttccactaacgcgaattaaattccctattacccttaatctcgaaatcgctataaacgctaaaactacaaataaatttaaaaaacccgaaaaaccgccgcgacgaaaatcacgacgacgataacgaaaaaaattctaaacaaaccctcgatactatacatatataaaaaaataatctaaacttccccgaaacttccgaacgaaaataacgaaaaaaaaaaataaaattttcttcgaataaaaaataaaatttccgaaccgaaacttttaaaaaaaattttctaaaactatcataacaaaaaaacgtccgtaaaaatataacccaataaccgcccgctaaccgaactaaaaaaaaaaccgacccgaatcccacgcctaacctaaaacaaaaaaaacgctacctcccctccgcgaacaacttacattcgtccaaattccaaccttctatcttctcgctaacctcgctctcttccaaatcgcaaatcctcttaaaccgacaccgttacgcctaaataatatacttacc

SEQ ID NO: 18737 - DNA, 502 bp, Artificial Sequence
  chemically treated genomic DNA (Homo sapiens) CpG-island No: 18737
ttcgcgaagttattttcgcgttttgaatgttttcgaatttttgtagagttttcgcggttttttggaagttttcgcgttcgtggagtttttttttcgttttcgggggtatcgcgggtttttagtttagttttttcgacgttggtcgttgttattttttacgaggcgtcggtttcgatttattttattgtcgttgtcggggacgggcgcgtcgggttaggggcgattcggcggcggcggcggcggcggcggggcgcgggacgcggcgttagcgggggagtcggtttcgggcgcggcggtttcgcgtttgattgggttgcggggggtagcgggggtttatttttttcgggtgggcgtcggggtcgttagttgcggggaagggtcgttgcggcgtcgattgatagttgggtttcggtttttgttattttggcgggcgcgtgttcgggtcggcgtgtgcgcgggtcgtttttgttggtcgtcgtcggggattgatgggtcggggtta

SEQ ID NO: 18738 - DNA, 502 bp, Artificial Sequence
  chemically treated genomic DNA (Homo sapiens) CpG-island No: 18738
taaccccgacccatcaatccccgacgacgaccaacaaaaacgacccgcgcacacgccgacccgaacacgcgcccgccaaaataacaaaaaccgaaacccaactatcaatcgacgccgcaacgacccttccccgcaactaacgaccccgacgcccacccgaaaaaaataaacccccgctaccccccgcaacccaatcaaacgcgaaaccgccgcgcccgaaaccgactcccccgctaacgccgcgtcccgcgccccgccgccgccgccgccgccgccgaatcgcccctaacccgacgcgcccgtccccgacaacgacaataaaataaatcgaaaccgacgcctcgtaaaaaataacaacgaccaacgtcgaaaaaactaaactaaaaacccgcgatacccccgaaaacgaaaaaaaaactccacgaacgcgaaaacttccaaaaaaccgcgaaaactctacaaaaattcgaaaacattcaaaacgcgaaaataacttcgcgaa

SEQ ID NO: 18739 - DNA, 502 bp, Artificial Sequence
  chemically treated genomic DNA (Homo sapiens) CpG-island No: 18739
tggtttcggtttattaattttcggcggcggttaataggaacggttcgcgtatacgtcggttcgggtacgcgttcgttaagatggtaggggtcggggtttagttgttagtcggcgtcgtagcggttttttttcgtagttagcggtttcgacgtttattcggagaagatgagttttcgttgtttttcgtagtttagttagacgcggagtcgtcgcgttcggggtcggttttttcgttagcgtcgcgtttcgcgtttcgtcgtcgtcgtcgtcgtcgtcgggtcgtttttggttcggcgcgttcgttttcggtagcgataatgaggtgagtcggggtcggcgtttcgtgggaggtggtagcggttagcgtcggaggggttgggttgggggttcgcggtgttttcgagggcgggaggggggttttacgggcgcgggggtttttagagaatcgcgggggttttgtagagattcgggggtatttagagcgcgggaatggtttcgcgag

SEQ ID NO: 18740 - DNA, 502 bp, Artificial Sequence
  chemically treated genomic DNA (Homo sapiens) CpG-island No: 18740
ctcgcgaaaccattcccgcgctctaaatacccccgaatctctacaaaacccccgcgattctctaaaaacccccgcgcccgtaaaacccccctcccgccctcgaaaacaccgcgaacccccaacccaacccctccgacgctaaccgctaccacctcccacgaaacgccgaccccgactcacctcattatcgctaccgaaaacgaacgcgccgaaccaaaaacgacccgacgacgacgacgacgacgacgaaacgcgaaacgcgacgctaacgaaaaaaccgaccccgaacgcgacgactccgcgtctaactaaactacgaaaaacaacgaaaactcatcttctccgaataaacgtcgaaaccgctaactacgaaaaaaaaccgctacgacgccgactaacaactaaaccccgacccctaccatcttaacgaacgcgtacccgaaccgacgtatacgcgaaccgttcctattaaccgccgccgaaaattaataaaccgaaacca

SEQ ID NO: 18741 - DNA, 500 bp, Artificial Sequence
  chemically treated genomic DNA (Homo sapiens) CpG-island No: 18741
  unsure (14)
ttcgtttgagattncggggcggcggtttttggcgagtgcgcgggcggtttcgagttttcgagggagaggcgcgcgggcgcgcgggttagttttagtatagtagttaagagttagggtacgcgcgttgttgttcgttttatcgtttttcgaggggattgcgcgcgcgtgcgttttttcgttcgcggtcgttgaggtgaatgagcgcgcgcggcggttaaagttcgatataaaaggcgcggggttttatcgttcgcgttttcgggagcgttgagtttgaggttgcgaggggcggggcggacgagagttgcggggttgaggggcggggttttgagggaagcgcgaggggcgtggtcggggtgggggcggggcgtcgggcgggtacgtggcgcggtgcgttttttttcggcgcggacgtttttttagttttcgtttgattttagagtttatagaggttatcgggggagttagggttcgtgttcgatggttttatgatttttatt

SEQ ID NO: 18742 - DNA, 500 bp, Artificial Sequence
  chemically treated genomic DNA (Homo sapiens) CpG-island No: 18742
  unsure (487)
aataaaaatcataaaaccatcgaacacgaaccctaactcccccgataacctctataaactctaaaatcaaacgaaaactaaaaaaacgtccgcgccgaaaaaaaacgcaccgcgccacgtacccgcccgacgccccgcccccaccccgaccacgcccctcgcgcttccctcaaaaccccgcccctcaaccccgcaactctcgtccgccccgcccctcgcaacctcaaactcaacgctcccgaaaacgcgaacgataaaaccccgcgccttttatatcgaactttaaccgccgcgcgcgctcattcacctcaacgaccgcgaacgaaaaaacgcacgcgcgcgcaatcccctcgaaaaacgataaaacgaacaacaacgcgcgtaccctaactcttaactactatactaaaactaacccgcgcgcccgcgcgcctctccctcgaaaactcgaaaccgcccgcgcactcgccaaaaaccgccgccccgnaatctcaaacgaa

SEQ ID NO: 18743 - DNA, 500 bp, Artificial Sequence
  chemically treated genomic DNA (Homo sapiens) CpG-island No: 18743
  unsure (487)
gatgggaattatggggttatcgagtacggattttggttttttcggtggtttttgtgagttttggggttaggcggggattggaggagcgttcgcgtcgggagggagcgtatcgcgttacgtgttcgttcggcgtttcgtttttatttcggttacgtttttcgcgttttttttaaagtttcgttttttagtttcgtaattttcgttcgtttcgtttttcgtagttttaagtttagcgttttcggaggcgcggacggtggggtttcgcgttttttgtgtcgggttttgatcgtcgcgcgcgtttatttattttagcggtcgcgggcggaggggcgtacgcgcgcgtagttttttcggagggcggtggggcgaatagtaacgcgcgtattttagtttttggttgttgtgttgagattagttcgcgcgttcgcgcgtttttttttcgaggattcggagtcgttcgcgtattcgttaggggtcgtcgtttcgnagttttaggcgga

SEQ ID NO: 18744 - DNA, 500 bp, Artificial Sequence
  chemically treated genomic DNA (Homo sapiens) CpG-island No: 18744
  unsure (14)
tccgcctaaaactncgaaacgacgacccctaacgaatacgcgaacgactccgaatcctcgaaaaaaaaacgcgcgaacgcgcgaactaatctcaacacaacaaccaaaaactaaaatacgcgcgttactattcgccccaccgccctccgaaaaaactacgcgcgcgtacgcccctccgcccgcgaccgctaaaataaataaacgcgcgcgacgatcaaaacccgacacaaaaaacgcgaaaccccaccgtccgcgcctccgaaaacgctaaacttaaaactacgaaaaacgaaacgaacgaaaattacgaaactaaaaaacgaaactttaaaaaaaacgcgaaaaacgtaaccgaaataaaaacgaaacgccgaacgaacacgtaacgcgatacgctccctcccgacgcgaacgctcctccaatccccgcctaaccccaaaactcacaaaaaccaccgaaaaaaccaaaatccgtactcgataaccccataattcccatc

SEQ ID NO: 18745 - DNA, 1066 bp, Artificial Sequence
  chemically treated genomic DNA (Homo sapiens) CpG-island No: 18745
cgggatacgggatcggggcgtggggattttcgtttcggcgatttacgggggtaattttagtggatgtggagggtggcggcgcgttttcgggtttttcgtacgttttttttaattaggatttgtcgtttgacgttacgtttgtcggagattggttgtttaggtttgatattcggggttacgggagagaaatttttaaaagatttcgtcgtcggggttgtttcggagtgtttcgcgcgttttcgttcgttttcggttattttcgtcgggtttcgttgcggcgcgcgttgtaattttcggtcggacgcgcggatttttattttgcgcggttcgtttttttcgttttttttcgtttttcgggtttcgcgttttttatttttacgttttttttttgtttttagttataatcggtcggggtttggggtcgtttagttgttcgtagagttttttttttcgttatcgatttggttttttttcgtttttttcgggttttcggtagttttcgggggagttcgaacgcgcggggaaaggcgagtcgtacggtcgggggagggggtcggatcgcgcgcgatcggtcgcgttcgttggggttcgcgatggcgggggtttggtttaggtgggggtttttgttttgggtagggtttttcgcgttttcggcgtacggtcggttgcggaggattatttacgtggtgtattcgggtttcggtttggtagtcggcgttttgtttttgagcgggttttcgcgttcgcggatatttaacgtcgcgtttaacgttaggtatagtcgtagttcggcggttgtcggcgtttttagtcgtgtttttttcggggttttttcggagaggattcggcgtacgagtaagtcgggcggcgcggttttgtaggggtttagatcgtcgtcgtcgtcgtcgtcggagtttgcgcgtttcgcggttttcggcgggtagttttattttaatttcggcggttattcggtagtcgtttcgtttattaaataaggtaggtaagttgtgcgttttaaggtgtcgtaggagatttagagcggcggaggttttaggttgtaggttta

SEQ ID NO: 18746 - DNA, 1066 bp, Artificial Sequence
  chemically treated genomic DNA (Homo sapiens) CpG-island No: 18746
taaacctacaacctaaaacctccgccgctctaaatctcctacgacaccttaaaacgcacaacttacctaccttatttaataaacgaaacgactaccgaataaccgccgaaattaaaataaaactacccgccgaaaaccgcgaaacgcgcaaactccgacgacgacgacgacgacgatctaaacccctacaaaaccgcgccgcccgacttactcgtacgccgaatcctctccgaaaaaaccccgaaaaaaacacgactaaaaacgccgacaaccgccgaactacgactatacctaacgttaaacgcgacgttaaatatccgcgaacgcgaaaacccgctcaaaaacaaaacgccgactaccaaaccgaaacccgaatacaccacgtaaataatcctccgcaaccgaccgtacgccgaaaacgcgaaaaaccctacccaaaacaaaaacccccacctaaaccaaacccccgccatcgcgaaccccaacgaacgcgaccgatcgcgcgcgatccgaccccctcccccgaccgtacgactcgcctttccccgcgcgttcgaactcccccgaaaactaccgaaaacccgaaaaaaacgaaaaaaaaccaaatcgataacgaaaaaaaaaactctacgaacaactaaacgaccccaaaccccgaccgattataactaaaaacaaaaaaaaaacgtaaaaataaaaaacgcgaaacccgaaaaacgaaaaaaaacgaaaaaaacgaaccgcgcaaaataaaaatccgcgcgtccgaccgaaaattacaacgcgcgccgcaacgaaacccgacgaaaataaccgaaaacgaacgaaaacgcgcgaaacactccgaaacaaccccgacgacgaaatcttttaaaaatttctctcccgtaaccccgaatatcaaacctaaacaaccaatctccgacaaacgtaacgtcaaacgacaaatcctaattaaaaaaaacgtacgaaaaacccgaaaacgcgccgccaccctccacatccactaaaattacccccgtaaatcgccgaaacgaaaatccccacgccccgatcccgtatcccg

SEQ ID NO: 18747 - DNA, 1066 bp, Artificial Sequence
  chemically treated genomic DNA (Homo sapiens) CpG-island No: 18747
tgaatttgtagtttagagttttcgtcgttttgggttttttgcggtattttggagcgtataatttgtttgttttgtttggtgaacggggcggttgtcgggtggtcgtcgggattggggtggagttgttcgtcggggatcgcgggacgcgtaggtttcggcggcggcggcggcggcggtttgagtttttgtagggtcgcgtcgttcggtttgttcgtgcgtcgggtttttttcgaggggatttcgggggaggtacggttgggggcgtcggtagtcgtcgagttgcggttgtatttggcgttgagcgcgacgttgaatgttcgcgaacgcgggggttcgtttaggggtaaggcgtcggttgttaggtcggggttcgggtgtattacgtaggtgatttttcgtagtcggtcgtgcgtcgaggacgcgaggagttttgtttagagtaggagtttttatttgagttaggttttcgttatcgcgggttttagcgggcgcgatcggtcgcgcgcggttcggttttttttttcggtcgtgcggttcgttttttttcgcgcgttcgggttttttcgagagttgtcgagagttcgggaaaggcgggaggagattaagtcggtggcgagggaggaggttttgcgggtagttgagcggttttagatttcggtcgattgtggttgggagtaggaggagggcgtgggggtggggagcgcggagttcggggagcggggaggggcgaggggagcgggtcgcgtaaggtgagggttcgcgcgttcggtcgggggttgtagcgcgcgtcgtagcggggttcggcgagggtggtcgagagcgagcgagagcgcgcgggatatttcgaggtagtttcggcggcgaagttttttaaaagtttttttttcgtggtttcgagtgttagatttgagtagttaattttcggtagacgtgacgttaggcggtagattttaattggggaaggcgtgcgaggagttcgaaggcgcgtcgttattttttatatttattggggttgttttcgtgggtcgtcgaggcggaggtttttacgtttcggtttcgtgtttcg

SEQ ID NO: 18748 - DNA, 1066 bp, Artificial Sequence
  chemically treated genomic DNA (Homo sapiens) CpG-island No: 18748
cgaaacacgaaaccgaaacgtaaaaacctccgcctcgacgacccacgaaaacaaccccaataaatataaaaaataacgacgcgccttcgaactcctcgcacgccttccccaattaaaatctaccgcctaacgtcacgtctaccgaaaattaactactcaaatctaacactcgaaaccacgaaaaaaaaacttttaaaaaacttcgccgccgaaactacctcgaaatatcccgcgcgctctcgctcgctctcgaccaccctcgccgaaccccgctacgacgcgcgctacaacccccgaccgaacgcgcgaaccctcaccttacgcgacccgctcccctcgcccctccccgctccccgaactccgcgctccccacccccacgccctcctcctactcccaaccacaatcgaccgaaatctaaaaccgctcaactacccgcaaaacctcctccctcgccaccgacttaatctcctcccgcctttcccgaactctcgacaactctcgaaaaaacccgaacgcgcgaaaaaaaacgaaccgcacgaccgaaaaaaaaaaccgaaccgcgcgcgaccgatcgcgcccgctaaaacccgcgataacgaaaacctaactcaaataaaaactcctactctaaacaaaactcctcgcgtcctcgacgcacgaccgactacgaaaaatcacctacgtaatacacccgaaccccgacctaacaaccgacgccttacccctaaacgaacccccgcgttcgcgaacattcaacgtcgcgctcaacgccaaatacaaccgcaactcgacgactaccgacgcccccaaccgtacctcccccgaaatcccctcgaaaaaaacccgacgcacgaacaaaccgaacgacgcgaccctacaaaaactcaaaccgccgccgccgccgccgccgaaacctacgcgtcccgcgatccccgacgaacaactccaccccaatcccgacgaccacccgacaaccgccccgttcaccaaacaaaacaaacaaattatacgctccaaaataccgcaaaaaacccaaaacgacgaaaactctaaactacaaattca

SEQ ID NO: 18749 - DNA, 545 bp, Artificial Sequence
  chemically treated genomic DNA (Homo sapiens) CpG-island No: 18749
ttgtcgggcgaggattttcgcgggtatcgcgaaggaaggtagtttttgtaggaattaggcggcgcgggttggtaggcgggtagtcgtcggttttaggtttttcgtgtgtttttcgtagtcggaggtttcgcgacgtataaggttagtgttttaagggcgattaaagtggcgttgtttgttagtattgggttttgttggtattgaatttgtatcgcgtcgtgtttttcgtcggtggtcgttgtttttttagaagagagcgcggttttcgtaatttttttatggagcgttagacgttattcgtgttcgttttttcggttttggttttcgtttttttattttgttttttatttcgtcgcgtttagttttggcgcggttcgtagtaatattttttttttaaggatgtagtcgcggtggtcggaggagaacgaaggtttttttagttcgttcgttttttttacggttttatatttatttttcgtttaggttgtttttttatgatttgttttttaattattagcgtttgatgcgtatatttttggaattaa

SEQ ID NO: 18750 - DNA, 545 bp, Artificial Sequence
  chemically treated genomic DNA (Homo sapiens) CpG-island No: 18750
ttaattccaaaaatatacgcatcaaacgctaataattaaaaaacaaatcataaaaaaacaacctaaacgaaaaataaatataaaaccgtaaaaaaaacgaacgaactaaaaaaaccttcgttctcctccgaccaccgcgactacatccttaaaaaaaaaatattactacgaaccgcgccaaaactaaacgcgacgaaataaaaaacaaaataaaaaaacgaaaaccaaaaccgaaaaaacgaacacgaataacgtctaacgctccataaaaaaattacgaaaaccgcgctctcttctaaaaaaacaacgaccaccgacgaaaaacacgacgcgatacaaattcaataccaacaaaacccaatactaacaaacaacgccactttaatcgcccttaaaacactaaccttatacgtcgcgaaacctccgactacgaaaaacacacgaaaaacctaaaaccgacgactacccgcctaccaacccgcgccgcctaattcctacaaaaactaccttccttcgcgatacccgcgaaaatcctcgcccgacaa

SEQ ID NO: 18751 - DNA, 545 bp, Artificial Sequence
  chemically treated genomic DNA (Homo sapiens) CpG-island No: 18751
ttagttttagaagtatgcgtattagacgttaatagttgaggaataagttatggaaggatagtttaagcgggaggtgaatgtaaagtcgtggagagggcgggcgaattaagaaggttttcgttttttttcggttatcgcggttgtatttttgagaaaggggtattgttgcgaatcgcgttagggttggacgcggcgaggtgggaggtaggatggaggggcgggagttaaggtcgagggggcggatacgggtggcgtttggcgttttataaaggggttgcgggggtcgcgtttttttttgggagggtagcggttatcggcgaggaatacggcgcgatgtaggtttagtgttagtagagtttagtgttggtaggtagcgttattttggtcgtttttggggtattggttttgtacgtcgcgaagttttcggttacgggaagtatacggagagtttgaagtcggcggttattcgtttgttagttcgcgtcgtttggtttttgtaggagttgttttttttcgcggtgttcgcggggattttcgttcggtag

SEQ ID NO: 18752 - DNA, 545 bp, Artificial Sequence
  chemically treated genomic DNA (Homo sapiens) CpG-island No: 18752
ctaccgaacgaaaatccccgcgaacaccgcgaaaaaaaacaactcctacaaaaaccaaacgacgcgaactaacaaacgaataaccgccgacttcaaactctccgtatacttcccgtaaccgaaaacttcgcgacgtacaaaaccaataccccaaaaacgaccaaaataacgctacctaccaacactaaactctactaacactaaacctacatcgcgccgtattcctcgccgataaccgctaccctcccaaaaaaaaacgcgacccccgcaacccctttataaaacgccaaacgccacccgtatccgccccctcgaccttaactcccgcccctccatcctacctcccacctcgccgcgtccaaccctaacgcgattcgcaacaatacccctttctcaaaaatacaaccgcgataaccgaaaaaaaacgaaaaccttcttaattcgcccgccctctccacgactttacattcacctcccgcttaaactatccttccataacttattcctcaactattaacgtctaatacgcatacttctaaaactaa

SEQ ID NO: 18753 - DNA, 590 bp, Artificial Sequence
  chemically treated genomic DNA (Homo sapiens) CpG-island No: 18753
agcggcggtagtagcgagtggagtaggaggaggagcgtaggtagcggtcgcggcggggtcggaggaagaggaggggggagaaggaggagttgaagcgggaagagcggtaggtagcggttcggcggagttgtagtagaggcggcggcgacgttgagatatcgtagtttttttgagcgtcgagttttttcggggatagtagtagggagcgttcgcgtagttatcgagtttttgtttagttaagtcgtcgtcgtcgcgtcgggggatcgttagttatggtcgcgtcgggggattcgtaggacgagttgttgtcgttggtcggtttcgggttttagtggtttaggtatcggggggagggggagaacgaagcggtgacgtcgaaaggggttacgtcggcgtcgtaggttggggagtttagttcggggttgggcgttagggttcgggaagcggcgtcgcgggaagtcggttcgggtttcgttcggtagtcgttcgttgttatggaaattgtatttataggtaaggcgggcgtcgttgttttttaaatggcgtcggggattagggttttttagttagtttttttttgcgcggttttt

SEQ ID NO: 18754 - DNA, 590 bp, Artificial Sequence
  chemically treated genomic DNA (Homo sapiens) CpG-island No: 18754
aaaaaccgcgcaaaaaaaaactaactaaaaaaccctaatccccgacgccatttaaaaaacaacgacgcccgccttacctataaatacaatttccataacaacgaacgactaccgaacgaaacccgaaccgacttcccgcgacgccgcttcccgaaccctaacgcccaaccccgaactaaactccccaacctacgacgccgacgtaacccctttcgacgtcaccgcttcgttctccccctccccccgatacctaaaccactaaaacccgaaaccgaccaacgacaacaactcgtcctacgaatcccccgacgcgaccataactaacgatcccccgacgcgacgacgacgacttaactaaacaaaaactcgataactacgcgaacgctccctactactatccccgaaaaaactcgacgctcaaaaaaactacgatatctcaacgtcgccgccgcctctactacaactccgccgaaccgctacctaccgctcttcccgcttcaactcctccttctcccccctcctcttcctccgaccccgccgcgaccgctacctacgctcctcctcctactccactcgctactaccgccgct

SEQ ID NO: 18755 - DNA, 590 bp, Artificial Sequence
  chemically treated genomic DNA (Homo sapiens) CpG-island No: 18755
gagagtcgcgtagaaggggattgattggggggttttggttttcgacgttatttgaggggtagcggcgttcgttttatttgtggatgtagtttttatggtaacgggcgattgtcgggcggggttcgagtcggtttttcgcgacgtcgtttttcgggttttggcgtttaatttcgggttgggttttttagtttgcggcgtcggcgtggtttttttcggcgttatcgtttcgtttttttttttttttcggtgtttgagttattgggattcggggtcggttagcggtagtagttcgttttgcggatttttcggcgcggttatggttggcggtttttcggcgcggcgacggcggtttggttgggtagaggttcggtggttgcgcgggcgttttttgttgttgttttcggagggattcggcgtttagggaagttgcggtgttttagcgtcgtcgtcgtttttgttgtaatttcgtcgagtcgttgtttgtcgtttttttcgttttagttttttttttttttttttttttttttttcggtttcgtcgcggtcgttgtttgcgtttttttttttattttattcgttgttgtcgtcgtt

SEQ ID NO: 18756 - DNA, 590 bp, Artificial Sequence
  chemically treated genomic DNA (Homo sapiens) CpG-island No: 18756
aacgacgacaacaacgaataaaataaaaaaaaaaacgcaaacaacgaccgcgacgaaaccgaaaaaaaaaaaaaaaaaaaaaaaaaaaactaaaacgaaaaaaacgacaaacaacgactcgacgaaattacaacaaaaacgacgacgacgctaaaacaccgcaacttccctaaacgccgaatccctccgaaaacaacaacaaaaaacgcccgcgcaaccaccgaacctctacccaaccaaaccgccgtcgccgcgccgaaaaaccgccaaccataaccgcgccgaaaaatccgcaaaacgaactactaccgctaaccgaccccgaatcccaataactcaaacaccgaaaaaaaaaaaaaaacgaaacgataacgccgaaaaaaaccacgccgacgccgcaaactaaaaaacccaacccgaaattaaacgccaaaacccgaaaaacgacgtcgcgaaaaaccgactcgaaccccgcccgacaatcgcccgttaccataaaaactacatccacaaataaaacgaacgccgctacccctcaaataacgtcgaaaaccaaaaccccccaatcaatccccttctacgcgactctc

SEQ ID NO: 18757 - DNA, 528 bp, Artificial Sequence
  chemically treated genomic DNA (Homo sapiens) CpG-island No: 18757
taagtcgtcggttacgcgttttgcgtttttttggtgtcgcgtttagtgtttagcgcgttttgatgttgtagtttcgggtcgggtcgttttgtttttttgttcgttgggacgtttttcgacggtttcgttttcgtttttcgtttcgagtttttgttgatttcggggaggtggggttcgggtcgggtatagtttcgttgaggtaggatgtttacgtttaagtttaattcggtgtcgttttcgtcgtttttggagtaggttgattcggacgttttggatattagtattaaagtgtagttttacggcgtgttgtggaagaggtttttcggtaggtcgtcggttaagtggtttcggcggtgagtgcgttttcgcgttttaaggagatcgtcggggagagagtttgggcgtcgttattttttttattttttttagtcgtcgtcgtgtttttgtttttttgtgtgattttggcgttatttttttttattttatattggttttcgtaggaaaatgtggattatagtttgggtcggg

SEQ ID NO: 18758 - DNA, 528 bp, Artificial Sequence
  chemically treated genomic DNA (Homo sapiens) CpG-island No: 18758
cccgacccaaactataatccacattttcctacgaaaaccaatataaaataaaaaaaaataacgccaaaatcacacaaaaaaacaaaaacacgacgacgactaaaaaaaataaaaaaaataacgacgcccaaactctctccccgacgatctccttaaaacgcgaaaacgcactcaccgccgaaaccacttaaccgacgacctaccgaaaaacctcttccacaacacgccgtaaaactacactttaatactaatatccaaaacgtccgaatcaacctactccaaaaacgacgaaaacgacaccgaattaaacttaaacgtaaacatcctacctcaacgaaactatacccgacccgaaccccacctccccgaaatcaacaaaaactcgaaacgaaaaacgaaaacgaaaccgtcgaaaaacgtcccaacgaacaaaaaaacaaaacgacccgacccgaaactacaacatcaaaacgcgctaaacactaaacgcgacaccaaaaaaacgcaaaacgcgtaaccgacgactta

SEQ ID NO: 18759 - DNA, 528 bp, Artificial Sequence
  chemically treated genomic DNA (Homo sapiens) CpG-island No: 18759
ttcggtttagattatggtttatatttttttgcgggagttagtgtagagtgaaaaggggtgacgttaaggttatataggaaagtagaggtacgacggcgattggagggggtgggaggggtaacgacgtttaggtttttttttcggcggtttttttggggcgcgggggcgtatttatcgtcgggattatttggtcgacggtttgtcgaaaggttttttttatagtacgtcgtagagttgtattttggtgttgatatttagggcgttcgagttagtttgttttagggacggcgagggcgatatcgagttggatttggacgtgaatattttgttttagcggggttgtgttcggttcggattttattttttcggggttagtagggattcggggcgagaggcgagggcggagtcgtcggagagcgttttagcgagtagagaagtagagcggttcggttcggagttgtagtattaaagcgcgttgggtattggacgcggtattaagggggcgtagggcgcgtagtcggcggtttg

SEQ ID NO: 18760 - DNA, 528 bp, Artificial Sequence
  chemically treated genomic DNA (Homo sapiens) CpG-island No: 18760
caaaccgccgactacgcgccctacgcccccttaataccgcgtccaatacccaacgcgctttaatactacaactccgaaccgaaccgctctacttctctactcgctaaaacgctctccgacgactccgccctcgcctctcgccccgaatccctactaaccccgaaaaaataaaatccgaaccgaacacaaccccgctaaaacaaaatattcacgtccaaatccaactcgatatcgccctcgccgtccctaaaacaaactaactcgaacgccctaaatatcaacaccaaaatacaactctacgacgtactataaaaaaaacctttcgacaaaccgtcgaccaaataatcccgacgataaatacgcccccgcgccccaaaaaaaccgccgaaaaaaaaacctaaacgtcgttacccctcccaccccctccaatcgccgtcgtacctctactttcctatataaccttaacgtcaccccttttcactctacactaactcccgcaaaaaaatataaaccataatctaaaccgaa

SEQ ID NO: 18761 - DNA, 2102 bp, Artificial Sequence
  chemically treated genomic DNA (Homo sapiens) CpG-island No: 18761
ggtcgaaggatcgcgtgttggttttttcgcgtatttttttacgtacgtggaaggaagttcgggttgtggagcgggcgttttttagcgtattgcgtcgttttcgcgttagttgttcgttgcgttttagtttgcgttcgatggtttggagtagttttcgtcggcggtagttttcgtttttttttattttttttttgttggcgcgttgggttcgttttttttttagtcggttttggtttacgcgtcgcgttttttgttgtattgttttttcggttatttgcgtcgcgtgttgtagtcgtcgttttttcgttcgggttagcgtttttaggtgcgtttgatgttttcgttttttgcgttttgtcgtttttttggttcgtcgattttgtagtttttttcgtcgggttcgttttcgtagttttcgggtgcgttgttttattaaatgttcgtagtttttttgcgtacggtttaaattggtttttagcgagtttcgtaggttttttcgtttttggcgttgttgtcgggttcgattttgtagtagcgtttcgtggcgcgttcgttcggttcggtttagttttcgtttttttcgttgtagttggtttttttgtcgttgtttggcgcgggtcgtcgttgggcgcgttttttgcggatttgtttagttcgttttcgttttttttgtagattttttttacgttgttttaggttttgtttttgttgaagtttgcgtagtcgattttttcgggtcgcgcgtttcgttcgttttcgtcgtaggaggttttggcgttcggttagttttcgtcgtcgtttttcgttgcgttcgtattgtcgttgtcgtcgtcgcgtcgtttcgcgtttttcgcggttacggcggtttcgtcgtttttttatttgcgcggtttaggttcggcggttttgttttagggcgcgttgtttttttcgtttttcgcgttttcgtcgttgtttggcgtgtacgcgttgtagtttttattggtcgtgggtagtcgcgcgttgttttagtagtaggagttttttttggtgtcgcgttagtatgagcgtcgcgatttttcggttacgtttcggtatttcgcgtaggtcgcgttttgtacgtatttgacgtacgatgcgttttacgtgttgagcggtttgcggcgaatggtttaggtcgtcgaggttgaagttgcggtcggtgatcggaattagggttagggtagacgggcggttcggagcgttggtggtggaggacgtcgatttcgttgggtagttgtttttggtcgaggttcgaggcggttagcgtagtttttttaagttttttttattgtaggatgacgacgatgcgttcgattcggagttgagggcgtttttacgtcggcgggatagtgagtttagcgaatggttttttttgtttgttcgagaattcgttggcggaggttgggttcgggcggaggagggattaggggaagttttgcgggtcgtacgcggcgcgggcgaggtcgggaggttggcgttgttgtagttgttgttgttgttcgcgttcggggtcgaggtcgcggcggcggcggcggcggcggcggtcgcggggtttaaaggcgtgaaaagacgtcgttttttttcgcgtatgatgcgttcgcgttcggttcggtattgttgtagtttggcgcgtcgtttcgtttcgtaggttttatataggtcggtggttattcgtatggagcggttcggagtttttcgtattaggtcggttagggttcgtggtagtagttttatcggtttgatcgtatagcgggcgtaggtttttagcgagcgggggttggttagtacgtagcggttgtttttcgtttttgggtagtcgaagttgaagaggtcgaggtgtagtagcggggattgttttcgtcgttcgttttttgcggttgtatatgggatttttgttttgcggggtatcgtcgcggaggtcgaggtcgaggtcgaggaagttgcgggtttttgtgcgttttgggaattagggggtacggacgttacggtttcgttttttttagagtcgtcgggtttcgtttttgtttttttttttttaggtattgggtttattatggttgagtttcgttttttgttggaat

SEQ ID NO: 18762 - DNA, 2102 bp, Artificial Sequence
  chemically treated genomic DNA (Homo sapiens) CpG-island No: 18762
attccaacaaaaaacgaaactcaaccataataaacccaatacctaaaaaaaaaaaaacaaaaacgaaacccgacgactctaaaaaaaacgaaaccgtaacgtccgtaccccctaattcccaaaacgcacaaaaacccgcaacttcctcgacctcgacctcgacctccgcgacgataccccgcaaaacaaaaatcccatatacaaccgcaaaaaacgaacgacgaaaacaatccccgctactacacctcgacctcttcaacttcgactacccaaaaacgaaaaacaaccgctacgtactaaccaacccccgctcgctaaaaacctacgcccgctatacgatcaaaccgataaaactactaccacgaaccctaaccgacctaatacgaaaaactccgaaccgctccatacgaataaccaccgacctatataaaacctacgaaacgaaacgacgcgccaaactacaacaataccgaaccgaacgcgaacgcatcatacgcgaaaaaaaacgacgtcttttcacgcctttaaaccccgcgaccgccgccgccgccgccgccgccgcgacctcgaccccgaacgcgaacaacaacaacaactacaacaacgccaacctcccgacctcgcccgcgccgcgtacgacccgcaaaacttcccctaatccctcctccgcccgaacccaacctccgccaacgaattctcgaacaaacaaaaaaaaccattcgctaaactcactatcccgccgacgtaaaaacgccctcaactccgaatcgaacgcatcgtcgtcatcctacaataaaaaaaacttaaaaaaactacgctaaccgcctcgaacctcgaccaaaaacaactacccaacgaaatcgacgtcctccaccaccaacgctccgaaccgcccgtctaccctaaccctaattccgatcaccgaccgcaacttcaacctcgacgacctaaaccattcgccgcaaaccgctcaacacgtaaaacgcatcgtacgtcaaatacgtacaaaacgcgacctacgcgaaataccgaaacgtaaccgaaaaatcgcgacgctcatactaacgcgacaccaaaaaaaactcctactactaaaacaacgcgcgactacccacgaccaataaaaactacaacgcgtacacgccaaacaacgacgaaaacgcgaaaaacgaaaaaaacaacgcgccctaaaacaaaaccgccgaacctaaaccgcgcaaataaaaaaacgacgaaaccgccgtaaccgcgaaaaacgcgaaacgacgcgacgacgacaacgacaatacgaacgcaacgaaaaacgacgacgaaaactaaccgaacgccaaaacctcctacgacgaaaacgaacgaaacgcgcgacccgaaaaaatcgactacgcaaacttcaacaaaaacaaaacctaaaacaacgtaaaaaaaatctacaaaaaaaacgaaaacgaactaaacaaatccgcaaaaaacgcgcccaacgacgacccgcgccaaacaacgacaaaaaaaccaactacaacgaaaaaaacgaaaactaaaccgaaccgaacgaacgcgccacgaaacgctactacaaaatcgaacccgacaacaacgccaaaaacgaaaaaacctacgaaactcgctaaaaaccaatttaaaccgtacgcaaaaaaactacgaacatttaataaaacaacgcacccgaaaactacgaaaacgaacccgacgaaaaaaactacaaaatcgacgaaccaaaaaaacgacaaaacgcaaaaaacgaaaacatcaaacgcacctaaaaacgctaacccgaacgaaaaaacgacgactacaacacgcgacgcaaataaccgaaaaaacaatacaacaaaaaacgcgacgcgtaaaccaaaaccgactaaaaaaaaaacgaacccaacgcgccaacaaaaaaaaaataaaaaaaaacgaaaactaccgccgacgaaaactactccaaaccatcgaacgcaaactaaaacgcaacgaacaactaacgcgaaaacgacgcaatacgctaaaaaacgcccgctccacaacccgaacttccttccacgtacgtaaaaaaatacgcgaaaaaaccaacacgcgatccttcgacc

SEQ ID NO: 18763 - DNA, 2102 bp, Artificial Sequence
  chemically treated genomic DNA (Homo sapiens) CpG-island No: 18763
attttaataaaggacggggtttagttatggtggatttagtgtttgaagaagagaaggtaggagcggaattcggcgattttggaggggacgaggtcgtggcgttcgtgttttttgatttttagggcgtataggagttcgtagttttttcggtttcggtttcggttttcgcggcggtgtttcgtaaggtagaagttttatgtgtagtcgtagaaggcgggcggcgggagtagttttcgttgttgtatttcgatttttttaatttcgattgtttagaggcggagggtagtcgttacgtgttgattagttttcgttcgttagaggtttgcgttcgttgtgcggttaagtcggtggagttgttgttacgggttttggtcgatttggtgcgagaggtttcgggtcgttttatgcgggtggttatcggtttgtatgaggtttacgaggcggagcggcgcgttaagttgtagtaatgtcgggtcgagcgcgagcgtattatgcgcgaggagaagcggcgtttttttacgtttttgagtttcgcggtcgtcgtcgtcgtcgtcgtcgtcgcggtttcggtttcgagcgcgggtagtagtagtagttgtagtagcgttagtttttcggtttcgttcgcgtcgcgtgcggttcgtaaggttttttttagtttttttttcgttcggatttaattttcgttagcgggttttcgaataggtaggaagagttattcgttggatttattgtttcgtcggcgtgagggcgtttttagtttcgagtcgggcgtatcgtcgttattttatagtggggaaagtttgagggagttgcgttggtcgtttcgggtttcggttaggaatagttgtttagcggggtcggcgttttttattattaacgtttcgggtcgttcgtttgttttgattttggtttcgattatcggtcgtagttttagtttcggcgatttgagttattcgtcgtagatcgtttagtacgtggagcgtatcgtgcgttaagtgcgtgtagagcgcggtttgcgcggggtgtcggagcgtgatcggaagatcgcggcgtttatgttggcgcggtattaggaggagtttttgttgttggagtaacgcgcggttgtttacggttagtgggagttgtagcgcgtgtacgttaagtagcggcgggagcgcgaggagcgggagaagtagcgcgttttagagtagggtcgtcgagtttgggtcgcgtaggtggaggagcggcgaggtcgtcgtggtcgcgaagagcgcgaggcggcgcggcggcggtagcggtagtacgagcgtagcgaggagcggcggcgggagttggtcgaacgttagggttttttgcggcgggagcgggcggagcgcgcggttcgggaggatcggttgcgtaagttttagtaggagtagaatttgaagtaacgtgaggaaggtttataggaagggcgggagcgggttgagtagattcgtagggagcgcgtttagcggcggttcgcgttaagtagcggtaggagggttagttgtagcgggagaagcgggagttgagtcgggtcgagcgggcgcgttacgaggcgttgttatagggtcggattcggtagtagcgttaggagcgagagggtttgcggagttcgttggaagttagtttgggtcgtgcgtaggagaattacgagtatttggtggagtagcgtattcgggagttgcgggagcgggttcggcgagaggagttgtagggtcggcgggttaaggaggcggtagagcgtaaagagcgggaatattaggcgtatttggaggcgttggttcgggcgggggagcgacggttgtagtacgcgacgtaggtggtcgaggaagtagtgtagtagaaggcgcggcgcgtgggttagagtcggttggagaaggaacgagtttagcgcgttaataaggagaaggtggagagggacgaagattgtcgtcggcgagagttattttaggttatcgggcgtaagttggagcgtagcgagtagttgacgcgggaacggcgtagtgcgttggagagcgttcgttttatagttcgggtttttttttacgtgcgtgagaaggtgcgcgaggagattaatacgcgatttttcgatt

SEQ ID NO: 18764 - DNA, 2102 bp, Artificial Sequence
  chemically treated genomic DNA (Homo sapiens) CpG-island No: 18764
aatcgaaaaatcgcgtattaatctcctcgcgcaccttctcacgcacgtaaaaaaaaacccgaactataaaacgaacgctctccaacgcactacgccgttcccgcgtcaactactcgctacgctccaacttacgcccgataacctaaaataactctcgccgacgacaatcttcgtccctctccaccttctccttattaacgcgctaaactcgttccttctccaaccgactctaacccacgcgccgcgccttctactacactacttcctcgaccacctacgtcgcgtactacaaccgtcgctcccccgcccgaaccaacgcctccaaatacgcctaatattcccgctctttacgctctaccgcctccttaacccgccgaccctacaactcctctcgccgaacccgctcccgcaactcccgaatacgctactccaccaaatactcgtaattctcctacgcacgacccaaactaacttccaacgaactccgcaaaccctctcgctcctaacgctactaccgaatccgaccctataacaacgcctcgtaacgcgcccgctcgacccgactcaactcccgcttctcccgctacaactaaccctcctaccgctacttaacgcgaaccgccgctaaacgcgctccctacgaatctactcaacccgctcccgcccttcctataaaccttcctcacgttacttcaaattctactcctactaaaacttacgcaaccgatcctcccgaaccgcgcgctccgcccgctcccgccgcaaaaaaccctaacgttcgaccaactcccgccgccgctcctcgctacgctcgtactaccgctaccgccgccgcgccgcctcgcgctcttcgcgaccacgacgacctcgccgctcctccacctacgcgacccaaactcgacgaccctactctaaaacgcgctacttctcccgctcctcgcgctcccgccgctacttaacgtacacgcgctacaactcccactaaccgtaaacaaccgcgcgttactccaacaacaaaaactcctcctaataccgcgccaacataaacgccgcgatcttccgatcacgctccgacaccccgcgcaaaccgcgctctacacgcacttaacgcacgatacgctccacgtactaaacgatctacgacgaataactcaaatcgccgaaactaaaactacgaccgataatcgaaaccaaaatcaaaacaaacgaacgacccgaaacgttaataataaaaaacgccgaccccgctaaacaactattcctaaccgaaacccgaaacgaccaacgcaactccctcaaactttccccactataaaataacgacgatacgcccgactcgaaactaaaaacgccctcacgccgacgaaacaataaatccaacgaataactcttcctacctattcgaaaacccgctaacgaaaattaaatccgaacgaaaaaaaaactaaaaaaaaccttacgaaccgcacgcgacgcgaacgaaaccgaaaaactaacgctactacaactactactactacccgcgctcgaaaccgaaaccgcgacgacgacgacgacgacgacgaccgcgaaactcaaaaacgtaaaaaaacgccgcttctcctcgcgcataatacgctcgcgctcgacccgacattactacaacttaacgcgccgctccgcctcgtaaacctcatacaaaccgataaccacccgcataaaacgacccgaaacctctcgcaccaaatcgaccaaaacccgtaacaacaactccaccgacttaaccgcacaacgaacgcaaacctctaacgaacgaaaactaatcaacacgtaacgactaccctccgcctctaaacaatcgaaattaaaaaaatcgaaatacaacaacgaaaactactcccgccgcccgccttctacgactacacataaaacttctaccttacgaaacaccgccgcgaaaaccgaaaccgaaaccgaaaaaactacgaactcctatacgccctaaaaatcaaaaaacacgaacgccacgacctcgtcccctccaaaatcgccgaattccgctcctaccttctcttcttcaaacactaaatccaccataactaaaccccgtcctttattaaaat

SEQ ID NO: 18765 - DNA, 875 bp, Artificial Sequence
  chemically treated genomic DNA (Homo sapiens) CpG-island No: 18765
ttagcgtagagggattgtttttttaaggtttttttatttttttaatcgcgtcgttttttttttgggtatttggttcggtcggcggcgcgtgcgtgtagggtttttcggcggggcggtcgcggcggcgcgacgtcggcgtcgttgcgtgcgcgtttggttttgtttttttttcgtttttttttcgttttttttttttcgcggggtttttttcgttcgcgcggtatagttgggttagtgacgcgggcgttgtagtcgtcgttatcgtcgcgttttatttttcgaagtcggcgatcgttttattttttttttttttttcgttcgttttttttgtttatagcgtcggttagagcgagttagataagggtacgcggggtttcgtttagattcgagaagattgcgggcgcgcgtaagcggcggcgtggaagttgtgagcgtttttatttcggaggttttcgtcggttttcgggtgagttgttatcgcggttcgggggcggcggggtcggtattgtgttatcgacgcgttcggtcggttgttaggggcgcgggattagcgcgtatcgtttaggagtgacgttggtcggagttcgggtcggtttcggcggtttttcgcgtttttttgcgtcggttcgttgttattcggtcgcgagtcgcgtcgttgggagtttcgcgttggcgtggcgcggttagtcggttagtagtgggggtgcgcggtcggggggatcggcggttggtttgcggtcgggaatttggtgattcgcggttcggggcgcgtcgtttcgcgtcgttgttcgggtagtatcggaagagttagacgtcgtgtcgatgggtgtagaggaggtaggtagaggttttttgtgttattgttattattgttt

SEQ ID NO: 18766 - DNA, 875 bp, Artificial Sequence
  chemically treated genomic DNA (Homo sapiens) CpG-island No: 18766
aaacaataataacaataacacaaaaaacctctacctacctcctctacacccatcgacacgacgtctaactcttccgatactacccgaacaacgacgcgaaacgacgcgccccgaaccgcgaatcaccaaattcccgaccgcaaaccaaccgccgatccccccgaccgcgcacccccactactaaccgactaaccgcgccacgccaacgcgaaactcccaacgacgcgactcgcgaccgaataacaacgaaccgacgcaaaaaaacgcgaaaaaccgccgaaaccgacccgaactccgaccaacgtcactcctaaacgatacgcgctaatcccgcgcccctaacaaccgaccgaacgcgtcgataacacaataccgaccccgccgcccccgaaccgcgataacaactcacccgaaaaccgacgaaaacctccgaaataaaaacgctcacaacttccacgccgccgcttacgcgcgcccgcaatcttctcgaatctaaacgaaaccccgcgtacccttatctaactcgctctaaccgacgctataaacaaaaaaaacgaacgaaaaaaaaaaaaaaaataaaacgatcgccgacttcgaaaaataaaacgcgacgataacgacgactacaacgcccgcgtcactaacccaactataccgcgcgaacgaaaaaaaccccgcgaaaaaaaaaaaacgaaaaaaaaacgaaaaaaaaacaaaaccaaacgcgcacgcaacgacgccgacgtcgcgccgccgcgaccgccccgccgaaaaaccctacacgcacgcgccgccgaccgaaccaaatacccaaaaaaaaaacgacgcgattaaaaaaataaaaaaaccttaaaaaaacaatccctctacgctaa

SEQ ID NO: 18767 - DNA, 875 bp, Artificial Sequence
  chemically treated genomic DNA (Homo sapiens) CpG-island No: 18767
gggtagtaatgatagtggtatagagggtttttgtttattttttttgtatttatcggtacggcgtttggttttttcggtgttgttcgggtagcgacgcgggacggcgcgtttcggatcgcgggttattaagttttcggtcgtaaattagtcgtcggttttttcggtcgcgtatttttattgttggtcggttggtcgcgttacgttagcgcggggtttttagcggcgcggttcgcggtcgggtgatagcgggtcggcgtagagaagcgcggggagtcgtcgaagtcggttcgggtttcggttagcgttatttttgggcggtgcgcgttggtttcgcgtttttgatagtcggtcgagcgcgtcgatggtataatgtcggtttcgtcgttttcgggtcgcggtgataatttattcgggagtcggcggagattttcgggatgggggcgtttatagtttttacgtcgtcgtttgcgcgcgttcgtagttttttcgggtttaggcgaggtttcgcgtgtttttgtttagttcgttttggtcggcgttgtgggtagaggaagcgggcgggagggagggaggaggtggggcggtcgtcggtttcggagaatagaacgcggcggtagcgacggttgtagcgttcgcgttattgatttagttgtatcgcgcgggcgggggaggtttcgcggaggggagggggcggggaaggggcgggaaaggggtagggttaggcgcgtacgtaacggcgtcggcgtcgcgtcgtcgcgatcgtttcgtcgggaggttttgtacgtacgcgtcgtcggtcgggttaggtatttaagggagaagcgacgcggttggggaggtgggggggttttaaagagatagtttttttgcgttgg

SEQ ID NO: 18768 - DNA, 875 bp, Artificial Sequence
  chemically treated genomic DNA (Homo sapiens) CpG-island No: 18768
ccaacgcaaaaaaactatctctttaaaacccccccacctccccaaccgcgtcgcttctcccttaaatacctaacccgaccgacgacgcgtacgtacaaaacctcccgacgaaacgatcgcgacgacgcgacgccgacgccgttacgtacgcgcctaaccctacccctttcccgccccttccccgccccctcccctccgcgaaacctcccccgcccgcgcgatacaactaaatcaataacgcgaacgctacaaccgtcgctaccgccgcgttctattctccgaaaccgacgaccgccccacctcctccctccctcccgcccgcttcctctacccacaacgccgaccaaaacgaactaaacaaaaacacgcgaaacctcgcctaaacccgaaaaaactacgaacgcgcgcaaacgacgacgtaaaaactataaacgcccccatcccgaaaatctccgccgactcccgaataaattatcaccgcgacccgaaaacgacgaaaccgacattataccatcgacgcgctcgaccgactatcaaaaacgcgaaaccaacgcgcaccgcccaaaaataacgctaaccgaaacccgaaccgacttcgacgactccccgcgcttctctacgccgacccgctatcacccgaccgcgaaccgcgccgctaaaaaccccgcgctaacgtaacgcgaccaaccgaccaacaataaaaatacgcgaccgaaaaaaccgacgactaatttacgaccgaaaacttaataacccgcgatccgaaacgcgccgtcccgcgtcgctacccgaacaacaccgaaaaaaccaaacgccgtaccgataaatacaaaaaaaataaacaaaaaccctctataccactatcattactaccc

SEQ ID NO: 18769 - DNA, 573 bp, Artificial Sequence
  chemically treated genomic DNA (Homo sapiens) CpG-island No: 18769
ttcgagggttttcgggggagagcggtcgcgggaggacgggaacgaagtcgtagcgagaatttcgttttacgtcgtagttttttgtagtagcgtcggttcgtcggttttttgcgtttcgagtcgtttagggagtttagtcgtcgtagtttcggtttttgtgttttttttcgcgggtcgggtttggtgtgtacgtttggatggtttcgggtttggaaggtttgcgaggtttcgggagtcgtagatcgcgtcggggaggagatttcggtaggtcggtcggggtagagcgttaaggagggcggcggaattttggttgtttttcgggaggttaagggtagttttttcgcgtgattcgcgcgttgtcgagcgcgtcggttattttggcggtttcgttcgggtttcgcgttcggttcggtttggttttcgttcgcggttgagtagacgtcggggtggcgacgggagagttcgatcgcgaagttcggtcgtaggagtgcgtgggcgtcgtagaagtttaggagagttttggattttggtagtttttcgggggtgttgggaaacgttattttagtagtcgtt

SEQ ID NO: 18770 - DNA, 573 bp, Artificial Sequence
  chemically treated genomic DNA (Homo sapiens) CpG-island No: 18770
aacgactactaaaataacgtttcccaacacccccgaaaaactaccaaaatccaaaactctcctaaacttctacgacgcccacgcactcctacgaccgaacttcgcgatcgaactctcccgtcgccaccccgacgtctactcaaccgcgaacgaaaaccaaaccgaaccgaacgcgaaacccgaacgaaaccgccaaaataaccgacgcgctcgacaacgcgcgaatcacgcgaaaaaactacccttaacctcccgaaaaacaaccaaaattccgccgccctccttaacgctctaccccgaccgacctaccgaaatctcctccccgacgcgatctacgactcccgaaacctcgcaaaccttccaaacccgaaaccatccaaacgtacacaccaaacccgacccgcgaaaaaaaacacaaaaaccgaaactacgacgactaaactccctaaacgactcgaaacgcaaaaaaccgacgaaccgacgctactacaaaaaactacgacgtaaaacgaaattctcgctacgacttcgttcccgtcctcccgcgaccgctctcccccgaaaaccctcgaa

SEQ ID NO: 18771 - DNA, 573 bp, Artificial Sequence
  chemically treated genomic DNA (Homo sapiens) CpG-island No: 18771
ggcggttattggggtggcgttttttagtattttcgggaagttattaaggtttagggtttttttgggtttttgcgacgtttacgtatttttgcggtcgagtttcgcggtcgggttttttcgtcgttatttcggcgtttgtttagtcgcgagcgagaattaagtcgggtcgggcgcggggttcgggcgaggtcgttaagatggtcgacgcgttcggtagcgcgcggattacgcgggaaggttgtttttggtttttcgggaaatagttaaggtttcgtcgttttttttggcgttttgtttcggtcggtttgtcgggatttttttttcggcgcggtttgcggttttcggggtttcgtaaattttttaggttcgaggttatttagacgtgtatattaggttcggttcgcgaggggagatataggggtcggggttgcggcggttgagttttttgggcggttcggaacgtaaggggtcggcgagtcgacgttgttgtaggaggttgcggcgtggggcgaggttttcgttacggtttcgttttcgttttttcgcggtcgttttttttcggaagttttcgga

SEQ ID NO: 18772 - DNA, 573 bp, Artificial Sequence
  chemically treated genomic DNA (Homo sapiens) CpG-island No: 18772
tccgaaaacttccgaaaaaaaacgaccgcgaaaaaacgaaaacgaaaccgtaacgaaaacctcgccccacgccgcaacctcctacaacaacgtcgactcgccgaccccttacgttccgaaccgcccaaaaaactcaaccgccgcaaccccgacccctatatctcccctcgcgaaccgaacctaatatacacgtctaaataacctcgaacctaaaaaatttacgaaaccccgaaaaccgcaaaccgcgccgaaaaaaaaatcccgacaaaccgaccgaaacaaaacgccaaaaaaaacgacgaaaccttaactatttcccgaaaaaccaaaaacaaccttcccgcgtaatccgcgcgctaccgaacgcgtcgaccatcttaacgacctcgcccgaaccccgcgcccgacccgacttaattctcgctcgcgactaaacaaacgccgaaataacgacgaaaaaacccgaccgcgaaactcgaccgcaaaaatacgtaaacgtcgcaaaaacccaaaaaaaccctaaaccttaataacttcccgaaaatactaaaaaacgccaccccaataaccgcc

SEQ ID NO: 18773 - DNA, 614 bp, Artificial Sequence
  chemically treated genomic DNA (Homo sapiens) CpG-island No: 18773
gtcgcggtttattgtagtttcggtagtttgtcgttttacgtttgggaggttagttcgtacgttcggtcgcgggtcgtgcgtttttagatgaagttcgtgcgggtcggttttagcggcgttttattttcgggtcgttttttaggttcgtttcggtttttttgttttttagcgatcgttatttcgcgatttagtttgtggacgtgtcgcggcgttcgcgtcggtagttcggggtttcggatcggttttttttcgtcgcgtgaggttgacgtatcgattagtttttcggttcggtttcgttcggtcgcgttgcgttcgcgttcgttttcgttttcggttttttgacgttttcggtttggagacgtaattcgacgcgtataattttagattttgcgcgggagtcgggggtttttttagtttttagagcgagagcgaaagtcggaggggtttgtgtttttttgcggggttggggggcggggggtgttcgtttcgcgtcgtttcgtttagttttagttcgtttattttcggttaattttttcgtattttaatgcgagataattaaatcgtacgaattacgtgtttatcgtgttttcggcggagttttaaagttgaaaggg

SEQ ID NO: 18774 - DNA, 614 bp, Artificial Sequence
  chemically treated genomic DNA (Homo sapiens) CpG-island No: 18774
ccctttcaactttaaaactccgccgaaaacacgataaacacgtaattcgtacgatttaattatctcgcattaaaatacgaaaaaattaaccgaaaataaacgaactaaaactaaacgaaacgacgcgaaacgaacaccccccgccccccaaccccgcaaaaaaacacaaacccctccgactttcgctctcgctctaaaaactaaaaaaacccccgactcccgcgcaaaatctaaaattatacgcgtcgaattacgtctccaaaccgaaaacgtcaaaaaaccgaaaacgaaaacgaacgcgaacgcaacgcgaccgaacgaaaccgaaccgaaaaactaatcgatacgtcaacctcacgcgacgaaaaaaaaccgatccgaaaccccgaactaccgacgcgaacgccgcgacacgtccacaaactaaatcgcgaaataacgatcgctaaaaaacaaaaaaaccgaaacgaacctaaaaaacgacccgaaaataaaacgccgctaaaaccgacccgcacgaacttcatctaaaaacgcacgacccgcgaccgaacgtacgaactaacctcccaaacgtaaaacgacaaactaccgaaactacaataaaccgcgac

SEQ ID NO: 18775 - DNA, 614 bp, Artificial Sequence
  chemically treated genomic DNA (Homo sapiens) CpG-island No: 18775
tttttttagttttaagatttcgtcgggaatacggtggatacgtaattcgtacgatttgattgtttcgtattgagatacggaaggattggtcgggagtgagcgggttggggttgggcggggcggcgcggggcgggtatttttcgttttttaatttcgtaggaaaatataggttttttcggttttcgttttcgttttgggaattggaaggattttcgattttcgcgtagggtttggggttgtgcgcgtcgggttgcgtttttaggtcgggggcgttagggagtcgggggcggggacgggcgcgggcgtagcgcgatcgggcggggtcgagtcgggaagttggtcggtgcgttagttttacgcggcgggaaggaatcggttcgaggtttcgggttgtcggcgcgggcgtcgcggtacgtttataggttgggtcgcgaggtggcgatcgttgagaggtaggagggtcgaggcgggtttgggaggcggttcggaggtggggcgtcgttggggtcggttcgtacgggttttatttgagggcgtacggttcgcgatcgagcgtgcggattggttttttaagcgtggggcgataagttgtcggagttgtaatgggtcgcggt

SEQ ID NO: 18776 - DNA, 614 bp, Artificial Sequence
  chemically treated genomic DNA (Homo sapiens) CpG-island No: 18776
accgcgacccattacaactccgacaacttatcgccccacgcttaaaaaaccaatccgcacgctcgatcgcgaaccgtacgccctcaaataaaacccgtacgaaccgaccccaacgacgccccacctccgaaccgcctcccaaacccgcctcgaccctcctacctctcaacgatcgccacctcgcgacccaacctataaacgtaccgcgacgcccgcgccgacaacccgaaacctcgaaccgattccttcccgccgcgtaaaactaacgcaccgaccaacttcccgactcgaccccgcccgatcgcgctacgcccgcgcccgtccccgcccccgactccctaacgcccccgacctaaaaacgcaacccgacgcgcacaaccccaaaccctacgcgaaaatcgaaaatccttccaattcccaaaacgaaaacgaaaaccgaaaaaacctatattttcctacgaaattaaaaaacgaaaaatacccgccccgcgccgccccgcccaaccccaacccgctcactcccgaccaatccttccgtatctcaatacgaaacaatcaaatcgtacgaattacgtatccaccgtattcccgacgaaatcttaaaactaaaaaaa

SEQ ID NO: 18777 - DNA, 561 bp, Artificial Sequence
  chemically treated genomic DNA (Homo sapiens) CpG-island No: 18777
tcgttttgttttatcgtagtttcgttttttttacgtcgggtgagttgtggtttagtagtattcgaggtttcgttttttttatttttaagcgtttgcgttttagcgaaggggcggagtagggcggtggcgcgttgatatttggcggcggcggagggcgggtagaaggcgagcgtgggttgggattggttgaggcgacgcgggtggagggggcgggaaggaggcggggagacggttgtcgggttggtttttgtgttggattttgggcggtttgaggggtacggagattttgggggagggagacggtagcggtatggcggtcgggtgtaagacgttcgattttttttttttttgttttcgtcgtcgtcgttgttggagttattgggattttgtagtttgcgtgtgttagttgtaatttcgtcgtttttttgttagtttttcgtttcgtcggtttttttttttttcgtcgtcgtagttagttcgagggtcggtcggttgtgtaatatttttttattttatttattagttcgcgggttagtattatggaggacgtgaagttggagt

SEQ ID NO: 18778 - DNA, 561 bp, Artificial Sequence
  chemically treated genomic DNA (Homo sapiens) CpG-island No: 18778
actccaacttcacgtcctccataatactaacccgcgaactaataaataaaataaaaaaatattacacaaccgaccgaccctcgaactaactacgacgacgaaaaaaaaaaaaaccgacgaaacgaaaaactaacaaaaaaacgacgaaattacaactaacacacgcaaactacaaaatcccaataactccaacaacgacgacgacgaaaacaaaaaaaaaaaaaatcgaacgtcttacacccgaccgccataccgctaccgtctccctcccccaaaatctccgtacccctcaaaccgcccaaaatccaacacaaaaaccaacccgacaaccgtctccccgcctccttcccgccccctccacccgcgtcgcctcaaccaatcccaacccacgctcgccttctacccgccctccgccgccgccaaatatcaacgcgccaccgccctactccgccccttcgctaaaacgcaaacgcttaaaaataaaaaaaacgaaacctcgaatactactaaaccacaactcacccgacgtaaaaaaaacgaaactacgataaaacaaaacga

SEQ ID NO: 18779 - DNA, 561 bp, Artificial Sequence
  chemically treated genomic DNA (Homo sapiens) CpG-island No: 18779
attttagttttacgttttttatggtgttggttcgcgggttggtgggtggggtgggagagtgttatatagtcggtcgattttcgggttggttgcggcggcggaaggaaggagggtcggcggagcggagggttgataggagggcggcgggattataattaatatacgtagattatagggttttagtgattttagtagcggcggcggcgaagatagggaagaggagggtcgggcgttttatattcggtcgttatgtcgttgtcgttttttttttttagagttttcgtattttttaggtcgtttaggatttagtataggaattagttcgataatcgttttttcgtttttttttcgttttttttattcgcgtcgttttagttaattttagtttacgttcgttttttgttcgtttttcgtcgtcgttaggtgttagcgcgttatcgttttgtttcgttttttcgttagagcgtagacgtttgggggtggggggggcggagtttcggatgttgttaggttatagtttattcggcgtggaggaggcggggttgcggtgggataggacga

SEQ ID NO: 18780 - DNA, 561 bp, Artificial Sequence
  chemically treated genomic DNA (Homo sapiens) CpG-island No: 18780
tcgtcctatcccaccgcaaccccgcctcctccacgccgaataaactataacctaacaacatccgaaactccgccccccccacccccaaacgtctacgctctaacgaaaaaacgaaacaaaacgataacgcgctaacacctaacgacgacgaaaaacgaacaaaaaacgaacgtaaactaaaattaactaaaacgacgcgaataaaaaaaacgaaaaaaaaacgaaaaaacgattatcgaactaattcctatactaaatcctaaacgacctaaaaaatacgaaaactctaaaaaaaaaaaacgacaacgacataacgaccgaatataaaacgcccgaccctcctcttccctatcttcgccgccgccgctactaaaatcactaaaaccctataatctacgtatattaattataatcccgccgccctcctatcaaccctccgctccgccgaccctccttccttccgccgccgcaaccaacccgaaaatcgaccgactatataacactctcccaccccacccaccaacccgcgaaccaacaccataaaaaacgtaaaactaaaat

SEQ ID NO: 18781 - DNA, 612 bp, Artificial Sequence
  chemically treated genomic DNA (Homo sapiens) CpG-island No: 18781
gttatcgattcggcggagtcggttttttgggaaaaaataatttgcgaagttttttttttttttcgtgttttttacgcgaggtattttttaattaatgggaaacgtggtgggcggagcgagagtgatagacgattatagagttttttcgtcggcgcgaacgggcggtgtagtagtagggttaattagtagcgtgggtgggaagtataggggcgggagaaagtagggaaattacgcgtttaattagatttcggggttttcgagcgacgggttttgcggttcgtggtttttcgagcgcggcgtttagggggcgtgtttgtttgggttaatcggcgcgagtttatagtgcggagcgagcgttttaaatgttcgggttttttagttgattgtttttagtcgagagttgttttttgtagttacggagtcgagtcgtagtaggaggagtcgagattttcggggggtggggggaaagaggaggcggggttcgggggagtcgcggttgttttgcgttggatttcgggtttcgttacggcgttttttggggttagaggttggggtgggtggggggtaagggggtagtttttttttttttcgacggcggtttcgagtttagtt

SEQ ID NO: 18782 - DNA, 612 bp, Artificial Sequence
  chemically treated genomic DNA (Homo sapiens) CpG-island No: 18782
aactaaactcgaaaccgccgtcgaaaaaaaaaaaaactacccccttaccccccacccaccccaacctctaaccccaaaaaacgccgtaacgaaacccgaaatccaacgcaaaacaaccgcgactcccccgaaccccgcctcctctttccccccaccccccgaaaatctcgactcctcctactacgactcgactccgtaactacaaaaaacaactctcgactaaaaacaatcaactaaaaaacccgaacatttaaaacgctcgctccgcactataaactcgcgccgattaacccaaacaaacacgccccctaaacgccgcgctcgaaaaaccacgaaccgcaaaacccgtcgctcgaaaaccccgaaatctaattaaacgcgtaatttccctactttctcccgcccctatacttcccacccacgctactaattaaccctactactacaccgcccgttcgcgccgacgaaaaaactctataatcgtctatcactctcgctccgcccaccacgtttcccattaattaaaaaatacctcgcgtaaaaaacacgaaaaaaaaaaaaaacttcgcaaattattttttcccaaaaaaccgactccgccgaatcgataac

SEQ ID NO: 18783 - DNA, 612 bp, Artificial Sequence
  chemically treated genomic DNA (Homo sapiens) CpG-island No: 18783
ggttggattcggagtcgtcgtcgaaggggagaaggattgtttttttattttttatttattttagtttttaattttaggaagcgtcgtgacgggattcggagtttagcgtaaagtagtcgcggttttttcggatttcgttttttttttttttttatttttcgggggtttcggttttttttgttgcggttcggtttcgtagttgtaaaaaataattttcggttggagataattagttgagaaattcgagtatttgaggcgttcgtttcgtattgtgggttcgcgtcgattggtttaggtaggtacgttttttgagcgtcgcgttcggaaggttacgggtcgtaggattcgtcgttcgagggtttcgagatttgattgggcgcgtaatttttttattttttttcgtttttgtattttttatttacgttgttgattggttttgttattgtatcgttcgttcgcgtcggcgggaggattttgtaatcgtttgttattttcgtttcgtttattacgttttttattggttagagagtgtttcgcgtagggagtacgaggagaaggaggagtttcgtaggttgtttttttttaggaggtcgatttcgtcgagtcggtggt

SEQ ID NO: 18784 - DNA, 612 bp, Artificial Sequence
  chemically treated genomic DNA (Homo sapiens) CpG-island No: 18784
accaccgactcgacgaaatcgacctcctaaaaaaaaacaacctacgaaactcctccttctcctcgtactccctacgcgaaacactctctaaccaataaaaaacgtaataaacgaaacgaaaataacaaacgattacaaaatcctcccgccgacgcgaacgaacgatacaataacaaaaccaatcaacaacgtaaataaaaaatacaaaaacgaaaaaaaataaaaaaattacgcgcccaatcaaatctcgaaaccctcgaacgacgaatcctacgacccgtaaccttccgaacgcgacgctcaaaaaacgtacctacctaaaccaatcgacgcgaacccacaatacgaaacgaacgcctcaaatactcgaatttctcaactaattatctccaaccgaaaattattttttacaactacgaaaccgaaccgcaacaaaaaaaaccgaaacccccgaaaaataaaaaaaaaaaaaaaacgaaatccgaaaaaaccgcgactactttacgctaaactccgaatcccgtcacgacgcttcctaaaattaaaaactaaaataaataaaaaataaaaaaacaatccttctccccttcgacgacgactccgaatccaacc

SEQ ID NO: 18785 - DNA, 749 bp, Artificial Sequence
  chemically treated genomic DNA (Homo sapiens) CpG-island No: 18785
  unsure (534)
gtgggaacgtaggatgtggttttaaggggtaggatgagggggcgggacgatcgaacgcggatgtcgagtttagggagggtaaggagggatgaaaagttagcggagggacgagggtgtaaggagcggttggagagagatgggttgcgggtttgggggcgttgttagagcgagaggaggcgaagtttacgagttgggtgggtaggagggcggtagggtttgttcgggcggggatgggcgggcgtggggatgcgcgggttggggcgcgggggtcgtagagtcgtaggttcggttttgtcggcgcgtatttattttattcgaggaattcggttacgtatttgtcgcggcgtagggtcgagtggttgtattcggtgtataggtagacgagtacgtcgagtagcgtttttacgtttagggcgttttcgttgcgttagggttcgtttaggagtagttgttttagttttttgagtcgtattttggtcgatatggtgtcgcgcggtcgttttcgacgcgtcgtttttgatagcggttgcgtantgcgttaggcgcgtttcggggtttagcgttgcgattcgtagtacgtttgttcgcgttcgttttatgtgggttcggttatgcgaatttgggttttttcgacgcgtaatttgggcggagtttcggttttggttttttttttggtgcgttttgtattcgttgttttcgcgttttatatttagttattttcgtcgtttaataatcgtaattttttgtat

SEQ ID NO: 18786 - DNA, 749 bp, Artificial Sequence
  chemically treated genomic DNA (Homo sapiens) CpG-island No: 18786
  unsure (216)
atacaaaaaattacgattattaaacgacgaaaataactaaatataaaacgcgaaaacaacgaatacaaaacgcaccaaaaaaaaaaccaaaaccgaaactccgcccaaattacgcgtcgaaaaaacccaaattcgcataaccgaacccacataaaacgaacgcgaacaaacgtactacgaatcgcaacgctaaaccccgaaacgcgcctaacgcantacgcaaccgctatcaaaaacgacgcgtcgaaaacgaccgcgcgacaccatatcgaccaaaatacgactcaaaaaactaaaacaactactcctaaacgaaccctaacgcaacgaaaacgccctaaacgtaaaaacgctactcgacgtactcgtctacctatacaccgaatacaaccactcgaccctacgccgcgacaaatacgtaaccgaattcctcgaataaaataaatacgcgccgacaaaaccgaacctacgactctacgacccccgcgccccaacccgcgcatccccacgcccgcccatccccgcccgaacaaaccctaccgccctcctacccacccaactcgtaaacttcgcctcctctcgctctaacaacgcccccaaacccgcaacccatctctctccaaccgctccttacaccctcgtccctccgctaacttttcatccctccttaccctccctaaactcgacatccgcgttcgatcgtcccgccccctcatcctaccccttaaaaccacatcctacgttcccac

SEQ ID NO: 18787 - DNA, 749 bp, Artificial Sequence
  chemically treated genomic DNA (Homo sapiens) CpG-island No: 18787
  unsure (216)
gtgtagaaagttgcgattattgggcggcgggagtagttgggtgtaggacgcgagagtaacgagtgtagggcgtattaggagaggggttaggatcggggtttcgtttagattgcgcgtcgaaggagtttagattcgtatagtcgggtttatatgggacgggcgcgagtaggcgtgttgcgggtcgtagcgttgagtttcgaggcgcgtttgacgtantgcgtagtcgttgttagaggcggcgcgtcgggagcggtcgcgcggtattatgtcggttaaggtgcggtttaagaagttggagtagttgtttttggacgggttttggcgtaacgagagcgttttgagcgtggaaacgttgttcgacgtgttcgtttgtttgtatatcgagtgtagttattcggttttgcgtcgcgataagtacgtggtcgagtttttcgagtggggtaagtgcgcgtcggtagggtcggatttgcggttttgcgattttcgcgttttagttcgcgtatttttacgttcgtttattttcgttcggatagattttgtcgtttttttgtttatttagttcgtgggtttcgttttttttcgttttggtagcgtttttaggttcgtagtttatttttttttagtcgttttttgtattttcgttttttcgttagttttttatttttttttgttttttttaggttcgatattcgcgttcgatcgtttcgtttttttattttgttttttggagttatattttacgtttttat

SEQ ID NO: 18788 - DNA, 749 bp, Artificial Sequence
  chemically treated genomic DNA (Homo sapiens) CpG-island No: 18788
  unsure (534)
ataaaaacgtaaaatataactccaaaaaacaaaataaaaaaacgaaacgatcgaacgcgaatatcgaacctaaaaaaaacaaaaaaaaataaaaaactaacgaaaaaacgaaaatacaaaaaacgactaaaaaaaaataaactacgaacctaaaaacgctaccaaaacgaaaaaaaacgaaacccacgaactaaataaacaaaaaaacgacaaaatctatccgaacgaaaataaacgaacgtaaaaatacgcgaactaaaacgcgaaaatcgcaaaaccgcaaatccgaccctaccgacgcgcacttaccccactcgaaaaactcgaccacgtacttatcgcgacgcaaaaccgaataactacactcgatatacaaacaaacgaacacgtcgaacaacgtttccacgctcaaaacgctctcgttacgccaaaacccgtccaaaaacaactactccaacttcttaaaccgcaccttaaccgacataataccgcgcgaccgctcccgacgcgccgcctctaacaacgactacgcantacgtcaaacgcgcctcgaaactcaacgctacgacccgcaacacgcctactcgcgcccgtcccatataaacccgactatacgaatctaaactccttcgacgcgcaatctaaacgaaaccccgatcctaacccctctcctaatacgccctacactcgttactctcgcgtcctacacccaactactcccgccgcccaataatcgcaactttctacac

SEQ ID NO: 18789 - DNA, 521 bp, Artificial Sequence
  chemically treated genomic DNA (Homo sapiens) CpG-island No: 18789
  unsure (61..62, 64, 66, 69, 93, 107)
gttttttgttttcggcgggttcgggtttcgtcgtttgtcgtagggagtcgggatgttgggnngntnggntcgggtttggggtgcggcgcgggntttttgtttcgcgnttgttttcgtggcgagtgggtcgttgagattgcggagttcgcgtatggtagagcgcgtttggtgggcgtgtgcgttttcgtttgcggattcggtgtttttagtattcggggttcgatcgcgcgcgtcgcggatttcggggtcgaagacgattttaagtatcggagaggtagagtcgcgattttaggtcgtcgagtttcgtttcgtagttcgcgggtttatgttgtttgcggggtttcggatttgttcggtcgaggtgggggtcgagggcggttcggtaggcgtagttttgatggtttcggcgggttgtgggttatttaaaacggtttgttttagttcgaagcggttttggaagattcgggttttatttttgattttatcgatgagagattgaggtttagacggtgtggggttag

SEQ ID NO: 18790 - DNA, 521 bp, Artificial Sequence
  chemically treated genomic DNA (Homo sapiens) CpG-island No: 18790
  unsure (415, 429, 453, 456, 458, 460..)
ctaaccccacaccgtctaaacctcaatctctcatcgataaaatcaaaaataaaacccgaatcttccaaaaccgcttcgaactaaaacaaaccgttttaaataacccacaacccgccgaaaccatcaaaactacgcctaccgaaccgccctcgacccccacctcgaccgaacaaatccgaaaccccgcaaacaacataaacccgcgaactacgaaacgaaactcgacgacctaaaatcgcgactctacctctccgatacttaaaatcgtcttcgaccccgaaatccgcgacgcgcgcgatcgaaccccgaatactaaaaacaccgaatccgcaaacgaaaacgcacacgcccaccaaacgcgctctaccatacgcgaactccgcaatctcaacgacccactcgccacgaaaacaancgcgaaacaaaaancccgcgccgcaccccaaacccganccnancnncccaacatcccgactccctacgacaaacgacgaaacccgaacccgccgaaaacaaaaaac

SEQ ID NO: 18791 - DNA, 521 bp, Artificial Sequence
  chemically treated genomic DNA (Homo sapiens) CpG-island No: 18791
  unsure (415, 429, 453, 456, 458, 460..)
ttgattttatatcgtttgggttttagttttttatcggtaaagttaggggtagggttcgagttttttaggatcgtttcgagttgggataagtcgttttaaatagtttataattcgtcgaggttattagagttgcgtttgtcgggtcgttttcgatttttatttcggtcgggtaggttcgaggtttcgtaggtaatatgggttcgcggattgcgggacggggttcgacggtttgagatcgcgattttgttttttcgatatttggggtcgttttcggtttcgggattcgcgacgcgcgcggtcggatttcgaatattgaaggtatcgggttcgtaggcgaaggcgtatacgtttattaggcgcgttttgttatgcgcgggtttcgtaattttagcggtttattcgttacgaaaatagncgcggggtaaaaanttcgcgtcgtattttaggttcggnttngntnntttagtatttcggttttttacggtaagcggcgaggttcgagttcgtcgggagtagggagt

SEQ ID NO: 18792 - DNA, 521 bp, Artificial Sequence
  chemically treated genomic DNA (Homo sapiens) CpG-island No: 18792
  unsure (61..62, 64, 66, 69, 93, 107)
actccctactcccgacgaactcgaacctcgccgcttaccgtaaaaaaccgaaatactaaannancnaanccgaacctaaaatacgacgcgaantttttaccccgcgnctattttcgtaacgaataaaccgctaaaattacgaaacccgcgcataacaaaacgcgcctaataaacgtatacgccttcgcctacgaacccgataccttcaatattcgaaatccgaccgcgcgcgtcgcgaatcccgaaaccgaaaacgaccccaaatatcgaaaaaacaaaatcgcgatctcaaaccgtcgaaccccgtcccgcaatccgcgaacccatattacctacgaaacctcgaacctacccgaccgaaataaaaatcgaaaacgacccgacaaacgcaactctaataacctcgacgaattataaactatttaaaacgacttatcccaactcgaaacgatcctaaaaaactcgaaccctacccctaactttaccgataaaaaactaaaacccaaacgatataaaatcaa

SEQ ID NO: 18793 - DNA, 695 bp, Artificial Sequence
  chemically treated genomic DNA (Homo sapiens) CpG-island No: 18793
ttatttgtcgggcgggacgagtaatatgattggtggaatcgagtaattattgattagtattgtttaattacggagggtagtttagagtcggtttaatgagggtttttagggggcgggtcggattgtcgcgggtcggggagcgttttgggtggttagttgtgggttcgggtcgtcgtgggtttcggtttgcgtgcggagatgagcgggtttttcggtcgagttgcggcggttttgtttcgttgggggcgcggcgcgggcggcggtggtttttggggttcgggcgtgcgggcggcgggttcgggcgcgggcggcggcggttcggcggagtagttggacgcgttggtgaagaaggataaggtggtggttttttttaaggggacgtcggagtagttttagtgcggttttagtaacgtcgtggtgtagattttgcggttgtacggcgttcgcgattacgcggtttataacgtgttggacgattcggagtttcgataaggttaggttagtgtgtcgggtaggcgtttttcgtttcgggtttaggagtatcgttgtacgaggtcgaggggtttcgtcgcgtcgggttgggggagcggggttttattcgtcggggtttgtttgaaggttcgagtcgggttagggcgaggagtattgttttggagtagagtttgggttgagggtgtagttgattttattgggtt

SEQ ID NO: 18794 - DNA, 695 bp, Artificial Sequence
  chemically treated genomic DNA (Homo sapiens) CpG-island No: 18794
aacccaataaaatcaactacaccctcaacccaaactctactccaaaacaatactcctcgccctaacccgactcgaaccttcaaacaaaccccgacgaataaaaccccgctcccccaacccgacgcgacgaaacccctcgacctcgtacaacgatactcctaaacccgaaacgaaaaacgcctacccgacacactaacctaaccttatcgaaactccgaatcgtccaacacgttataaaccgcgtaatcgcgaacgccgtacaaccgcaaaatctacaccacgacgttactaaaaccgcactaaaactactccgacgtccccttaaaaaaaaccaccaccttatccttcttcaccaacgcgtccaactactccgccgaaccgccgccgcccgcgcccgaacccgccgcccgcacgcccgaaccccaaaaaccaccgccgcccgcgccgcgcccccaacgaaacaaaaccgccgcaactcgaccgaaaaacccgctcatctccgcacgcaaaccgaaacccacgacgacccgaacccacaactaaccacccaaaacgctccccgacccgcgacaatccgacccgccccctaaaaaccctcattaaaccgactctaaactaccctccgtaattaaacaatactaatcaataattactcgattccaccaatcatattactcgtcccgcccgacaaataa

SEQ ID NO: 18795 - DNA, 695 bp, Artificial Sequence
  chemically treated genomic DNA (Homo sapiens) CpG-island No: 18795
gatttagtgaaattaattatatttttagtttagattttattttagggtagtatttttcgttttaattcggttcgaatttttagatagatttcggcggatggagtttcgtttttttagttcggcgcggcggaatttttcggtttcgtgtagcgatgtttttgggttcggggcggagggcgtttgttcggtatattggtttgattttgtcggagtttcgggtcgtttagtacgttgtaggtcgcgtaatcgcggacgtcgtgtagtcgtaggatttgtattacggcgttgttgaagtcgtattggggttgtttcggcgtttttttgaggaagattattattttgtttttttttattagcgcgtttaattgtttcgtcgagtcgtcgtcgttcgcgttcgagttcgtcgttcgtacgttcggattttaaaggttatcgtcgttcgcgtcgcgtttttagcggagtagagtcgtcgtagttcggtcgagggattcgtttattttcgtacgtaagtcggagtttacgacggttcgggtttatagttggttatttagagcgtttttcggttcgcggtagttcgattcgttttttggaggtttttattgggtcggttttaaattgtttttcgtgattggataatattgattagtaattattcgattttattaattatgttgttcgtttcgttcggtaggtag

SEQ ID NO: 18796 - DNA, 695 bp, Artificial Sequence
  chemically treated genomic DNA (Homo sapiens) CpG-island No: 18796
ctacctaccgaacgaaacgaacaacataattaataaaatcgaataattactaatcaatattatccaatcacgaaaaacaatttaaaaccgacccaataaaaacctccaaaaaacgaatcgaactaccgcgaaccgaaaaacgctctaaataaccaactataaacccgaaccgtcgtaaactccgacttacgtacgaaaataaacgaatccctcgaccgaactacgacgactctactccgctaaaaacgcgacgcgaacgacgataacctttaaaatccgaacgtacgaacgacgaactcgaacgcgaacgacgacgactcgacgaaacaattaaacgcgctaataaaaaaaaacaaaataataatcttcctcaaaaaaacgccgaaacaaccccaatacgacttcaacaacgccgtaatacaaatcctacgactacacgacgtccgcgattacgcgacctacaacgtactaaacgacccgaaactccgacaaaatcaaaccaatataccgaacaaacgccctccgccccgaacccaaaaacatcgctacacgaaaccgaaaaattccgccgcgccgaactaaaaaaacgaaactccatccgccgaaatctatctaaaaattcgaaccgaattaaaacgaaaaatactaccctaaaataaaatctaaactaaaaatataattaatttcactaaatc

SEQ ID NO: 18797 - DNA, 1379 bp, Artificial Sequence
  chemically treated genomic DNA (Homo sapiens) CpG-island No: 18797
tgttttcggttaaagtatagaagcggtttttagtttcgggtaggcggtcggggcgtcgggggtattggaagtgtttaaatttagcggtgttgtcgcgcggggaagcggaggtgcggtcgtaggataagcgcgttttttaagtttttggttatttgcgatgcgtttttaattcgtttgtttatcgttattattagaaattttagatagtttattgtgtgggtaggtagcgcgttttttcggtttcgtcgttttcgtttattttttgtcggttttttcggagcgttcgtatagtcggtagttcgtttttagcgttttgtaaagcgaaggaggacgttttgttagggttggagaaacgggataatatttcgtagtcggcgtagcggtttcgggcgggcgttttttaaaaggacgcgaatggggattcgcgtgagcgttatttttatatgtaaggggttagtttttataaaagcgcggttttcgggggtcgcgggttgtagcgcgtattttttttttttttgtgggagtgagttagtgtgcgtagtcgcgttttcgggatcggttttttttttcgttttcgaagtagtttcgttttcgtttcgttttttcgttcggtcgttgttttttttcggttcgtagggattgcgtttcgttggtttcggattttaaatgggaagttttcgagtgattcggtgtttagttcgtttcgggtttttagggtttcgtcgacggcgcgggggtagcgcgaggttttcgtgtatttttaggtcgtgggttcgggttttcggggttgcgttatttattgcgtttcggggtttaggcgttcggcgtcgtcgcgggaattatggtcgttggcgtatttcgggtttggcggcggtagcgggacggtcgcgtttagcgcgttcggttttcggttcggtcgcggttattcggagttttggacgtcggggaggaagggtcgggttcgcgcggggaggaggagttagggcgacgtcggtttcggcgcggttttttttttgcggttcgcgcggtttaggtagcggagggaggagcgggcggcgtcgtttgagttttcgtagacgcgttttttcgtttcgagcgttcgttttcgagatttgaagttagaaacgtcggggtttcgggtgcgggtgtaggagttggcgtttcgaggtcgttatcgagttggggttggcgttgttattttcgttttttgtttgttcgttttttttttttttttaatacgtttatatttattcgtatcgcggatattcgggtcgtagcgttttcgcgtagaggaagggttttcgtttttagtaagcgggattttaagggggtgattttttagttttcgggtgtcgattggttattaatattggaaaggg

SEQ ID NO: 18798 - DNA, 1379 bp, Artificial Sequence
  chemically treated genomic DNA (Homo sapiens) CpG-island No: 18798
ccctttccaatattaataaccaatcgacacccgaaaactaaaaaatcacccccttaaaatcccgcttactaaaaacgaaaacccttcctctacgcgaaaacgctacgacccgaatatccgcgatacgaataaatataaacgtattaaaaaaaaaaaaaaaacgaacaaacaaaaaacgaaaataacaacgccaaccccaactcgataacgacctcgaaacgccaactcctacacccgcacccgaaaccccgacgtttctaacttcaaatctcgaaaacgaacgctcgaaacgaaaaaacgcgtctacgaaaactcaaacgacgccgcccgctcctccctccgctacctaaaccgcgcgaaccgcaaaaaaaaaaccgcgccgaaaccgacgtcgccctaactcctcctccccgcgcgaacccgacccttcctccccgacgtccaaaactccgaataaccgcgaccgaaccgaaaaccgaacgcgctaaacgcgaccgtcccgctaccgccgccaaacccgaaatacgccaacgaccataattcccgcgacgacgccgaacgcctaaaccccgaaacgcaataaataacgcaaccccgaaaacccgaacccacgacctaaaaatacacgaaaacctcgcgctacccccgcgccgtcgacgaaaccctaaaaacccgaaacgaactaaacaccgaatcactcgaaaacttcccatttaaaatccgaaaccaacgaaacgcaatccctacgaaccgaaaaaaaacaacgaccgaacgaaaaaacgaaacgaaaacgaaactacttcgaaaacgaaaaaaaaaaccgatcccgaaaacgcgactacgcacactaactcactcccacaaaaaaaaaaaaaatacgcgctacaacccgcgacccccgaaaaccgcgcttttataaaaactaaccccttacatataaaaataacgctcacgcgaatccccattcgcgtccttttaaaaaacgcccgcccgaaaccgctacgccgactacgaaatattatcccgtttctccaaccctaacaaaacgtcctccttcgctttacaaaacgctaaaaacgaactaccgactatacgaacgctccgaaaaaaccgacaaaaaataaacgaaaacgacgaaaccgaaaaaacgcgctacctacccacacaataaactatctaaaatttctaataataacgataaacaaacgaattaaaaacgcatcgcaaataaccaaaaacttaaaaaacgcgcttatcctacgaccgcacctccgcttccccgcgcgacaacaccgctaaatttaaacacttccaatacccccgacgccccgaccgcctacccgaaactaaaaaccgcttctatactttaaccgaaaaca

SEQ ID NO: 18799 - DNA, 1379 bp, Artificial Sequence
  chemically treated genomic DNA (Homo sapiens) CpG-island No: 18799
ttttttttaatgttgatggttaatcgatattcgagggttgggaaattatttttttaaagtttcgtttgttgaaggcgggggttttttttttgcgcgaagacgttgcggttcgagtgttcgcggtgcgggtgagtgtaggcgtgttgggaaagaaagggaggcggataggtaaggggcgagggtggtagcgttagttttagttcggtggcgatttcggggcgttagtttttatattcgtattcggagtttcggcgtttttaattttagatttcggaggcgggcgttcggagcgggagggcgcgtttgcgagggtttaggcggcgtcgttcgttttttttttcgttgtttgagtcgcgcgggtcgtagaggaggagtcgcgtcggggtcggcgtcgttttgatttttttttttcgcgcgggttcggtttttttttttcggcgtttagagtttcgggtggtcgcggtcgagtcgggagtcgagcgcgttgggcgcggtcgtttcgttgtcgtcgttaagttcggagtgcgttagcggttatggttttcgcggcggcgtcgggcgtttgagtttcgggacgtagtaagtggcgtaatttcggggattcggatttacggtttgggggtgtacggaggtttcgcgttgttttcgcgtcgtcggcgaggttttgagagttcggagcgaattgggtatcggattattcgggggttttttatttggggttcggggttagcggggcgtaatttttgcgggtcgggaggaagtagcggtcgggcgggaggacgaggcggggacggggttgtttcggaggcgggaggaggggtcggtttcggaggcgcggttgcgtatattgatttatttttataaaaaaaaaaaggatgcgcgttgtagttcgcggttttcgagagtcgcgtttttgtaagagttggttttttatatatggaaatgacgtttacgcgggtttttattcgcgtttttttgaaggacgttcgttcggaatcgttgcgtcggttgcgaagtattgtttcgtttttttagttttaataaagcgttttttttcgttttgtagagcgttggaggcgggttgtcggttgtgcgggcgtttcggagagatcgatagaaggtaggcgagggcggcggggtcgggggagcgcgttgtttgtttatataatgggttgtttgaggtttttggtagtggcgatgggtaggcgagttgaggacgtatcgtaggtggttagggatttgggaggcgcgtttgttttgcggtcgtattttcgttttttcgcgcggtagtatcgttgggtttgggtatttttagtattttcgacgtttcggtcgtttgttcggagttgaaagtcgtttttgtgttttgatcgagagta

SEQ ID NO: 18800 - DNA, 1379 bp, Artificial Sequence
  chemically treated genomic DNA (Homo sapiens) CpG-island No: 18800
tactctcgatcaaaacacaaaaacgactttcaactccgaacaaacgaccgaaacgtcgaaaatactaaaaatacccaaacccaacgatactaccgcgcgaaaaaacgaaaatacgaccgcaaaacaaacgcgcctcccaaatccctaaccacctacgatacgtcctcaactcgcctacccatcgccactaccaaaaacctcaaacaacccattatataaacaaacaacgcgctcccccgaccccgccgccctcgcctaccttctatcgatctctccgaaacgcccgcacaaccgacaacccgcctccaacgctctacaaaacgaaaaaaaacgctttattaaaactaaaaaaacgaaacaatacttcgcaaccgacgcaacgattccgaacgaacgtccttcaaaaaaacgcgaataaaaacccgcgtaaacgtcatttccatatataaaaaaccaactcttacaaaaacgcgactctcgaaaaccgcgaactacaacgcgcatcctttttttttttataaaaataaatcaatatacgcaaccgcgcctccgaaaccgacccctcctcccgcctccgaaacaaccccgtccccgcctcgtcctcccgcccgaccgctacttcctcccgacccgcaaaaattacgccccgctaaccccgaaccccaaataaaaaacccccgaataatccgatacccaattcgctccgaactctcaaaacctcgccgacgacgcgaaaacaacgcgaaacctccgtacacccccaaaccgtaaatccgaatccccgaaattacgccacttactacgtcccgaaactcaaacgcccgacgccgccgcgaaaaccataaccgctaacgcactccgaacttaacgacgacaacgaaacgaccgcgcccaacgcgctcgactcccgactcgaccgcgaccacccgaaactctaaacgccgaaaaaaaaaaaccgaacccgcgcgaaaaaaaaaaatcaaaacgacgccgaccccgacgcgactcctcctctacgacccgcgcgactcaaacaacgaaaaaaaaaacgaacgacgccgcctaaaccctcgcaaacgcgccctcccgctccgaacgcccgcctccgaaatctaaaattaaaaacgccgaaactccgaatacgaatataaaaactaacgccccgaaatcgccaccgaactaaaactaacgctaccaccctcgccccttacctatccgcctccctttctttcccaacacgcctacactcacccgcaccgcgaacactcgaaccgcaacgtcttcgcgcaaaaaaaaaacccccgccttcaacaaacgaaactttaaaaaaataatttcccaaccctcgaatatcgattaaccatcaacattaaaaaaaa

SEQ ID NO: 18801 - DNA, 774 bp, Artificial Sequence
  chemically treated genomic DNA (Homo sapiens) CpG-island No: 18801
cgtttgggttcgattttacgacgcgattttagacgggttaacggggcggtttttatcggggtgggtttcgcgcggcgtttatttagtatttttttgcgtcgttgcgtgtgcggttggtcggtgtagatttattcgaagtcgttgcggttcgcgttgttgtttatggtggggcgggaggcgtcgttcggagcgcggtcggttcggttttgttgtatttgtcgcggcggtcgcggcgcggaattagttttgattagggcgggggcggggtttcggcggggcggggttaggtgcgttaggtttggggcggggtattttggttgggcggggcggtcgggtttcggcgttttttagatttcggcgggtagttggcgttttgggaattttagttgtttcggttggaaatggggtttttcggtaggatcgaggtggtcgcgtgttatttgcgcgagtttttgggtttttcgatgcgcgggggcgattgttgttatcgcggttttttatcggttttgcgcgtttcgtttattcgcgggtagtcgtcgggtttttatttcggttcgtttttttcgtagtttcgattcgttcgcgggtacgtttttgtggttcgcgtcgtttttgttttaaggaggagcggttggtaggatagggggattgcggaggatcggcgtggaatggatgcgacggtgttagtaaataggcgtcgaggaaaggttggtgtagtaattttttttttttttattcggtttttttattaataatgtaaaggggagataatgt

SEQ ID NO: 18802 - DNA, 774 bp, Artificial Sequence
  chemically treated genomic DNA (Homo sapiens) CpG-island No: 18802
acattatctcccctttacattattaataaaaaaaccgaataaaaaaaaaaaaaattactacaccaacctttcctcgacgcctatttactaacaccgtcgcatccattccacgccgatcctccgcaatccccctatcctaccaaccgctcctccttaaaacaaaaacgacgcgaaccacaaaaacgtacccgcgaacgaatcgaaactacgaaaaaaacgaaccgaaataaaaacccgacgactacccgcgaataaacgaaacgcgcaaaaccgataaaaaaccgcgataacaacaatcgcccccgcgcatcgaaaaacccaaaaactcgcgcaaataacacgcgaccacctcgatcctaccgaaaaaccccatttccaaccgaaacaactaaaattcccaaaacgccaactacccgccgaaatctaaaaaacgccgaaacccgaccgccccgcccaaccaaaataccccgccccaaacctaacgcacctaaccccgccccgccgaaaccccgcccccgccctaatcaaaactaattccgcgccgcgaccgccgcgacaaatacaacaaaaccgaaccgaccgcgctccgaacgacgcctcccgccccaccataaacaacaacgcgaaccgcaacgacttcgaataaatctacaccgaccaaccgcacacgcaacgacgcaaaaaaatactaaataaacgccgcgcgaaacccaccccgataaaaaccgccccgttaacccgtctaaaatcgcgtcgtaaaatcgaacccaaacg

SEQ ID NO: 18803 - DNA, 774 bp, Artificial Sequence
  chemically treated genomic DNA (Homo sapiens) CpG-island No: 18803
gtattattttttttttgtattattggtgaaagggtcgggtggaggaagggaggattgttgtattaattttttttcggcgtttgtttattggtatcgtcgtatttattttacgtcgatttttcgtagtttttttattttgttagtcgtttttttttggggtaggggcggcgcgagttataggggcgtgttcgcgagcgggtcggggttgcggagagaacgggtcggggtaaaaattcgacggttgttcgcgggtgggcggggcgcgtagagtcggtgggaggtcgcggtggtagtagtcgttttcgcgtatcgagggatttagggattcgcgtagatggtacgcggttatttcggttttgtcggggagttttatttttaatcgaggtaattgaggtttttaaagcgttagttattcgtcggggtttggagagcgtcggggttcggtcgtttcgtttagttagagtgtttcgttttaagtttggcgtatttggtttcgtttcgtcgggatttcgttttcgttttaattagagttggtttcgcgtcgcggtcgtcgcgataggtgtagtagagtcgagtcggtcgcgtttcgaacggcgtttttcgttttattatgggtaatagcgcgagtcgtagcgatttcgagtgggtttatatcgattagtcgtatacgtagcggcgtaaggagatattgggtgagcgtcgcgcggggtttatttcggtggggatcgtttcgttggttcgtttggagtcgcgtcgtggggtcgagtttagacg

SEQ ID NO: 18804 - DNA, 774 bp, Artificial Sequence
  chemically treated genomic DNA (Homo sapiens) CpG-island No: 18804
cgtctaaactcgaccccacgacgcgactccaaacgaaccaacgaaacgatccccaccgaaataaaccccgcgcgacgctcacccaatatctccttacgccgctacgtatacgactaatcgatataaacccactcgaaatcgctacgactcgcgctattacccataataaaacgaaaaacgccgttcgaaacgcgaccgactcgactctactacacctatcgcgacgaccgcgacgcgaaaccaactctaattaaaacgaaaacgaaatcccgacgaaacgaaaccaaatacgccaaacttaaaacgaaacactctaactaaacgaaacgaccgaaccccgacgctctccaaaccccgacgaataactaacgctttaaaaacctcaattacctcgattaaaaataaaactccccgacaaaaccgaaataaccgcgtaccatctacgcgaatccctaaatccctcgatacgcgaaaacgactactaccaccgcgacctcccaccgactctacgcgccccgcccacccgcgaacaaccgtcgaatttttaccccgacccgttctctccgcaaccccgacccgctcgcgaacacgcccctataactcgcgccgcccctaccccaaaaaaaaacgactaacaaaataaaaaaactacgaaaaatcgacgtaaaataaatacgacgataccaataaacaaacgccgaaaaaaaattaatacaacaatcctcccttcctccacccgaccctttcaccaataatacaaaaaaaaaataatac

SEQ ID NO: 18805 - DNA, 748 bp, Artificial Sequence
  chemically treated genomic DNA (Homo sapiens) CpG-island No: 18805
tagtatcgtcgtgttagtttattgacgtagcgtatcggtgtttgttagtatcgtcgtgttagtttattgacgtagcgtattcggtgttgttagtatcgtcgtgttagtttattgacgtagcgtatacggtggtgttagtatcgtcgtgttagtttattgacgtagcgtatacggtggtgttagtatcgtcgtgttagtttattgacgtagcgtatacggtggtgttagtatcgtcgtgttagtttattgacgtagcgtatacggtggtgttagtatcgtcgtgttagtttattgacgtagcgtatacggtggtgttagtatcgtcgtgttagtttattgacgtagcgtatacggtggtgttagtatcgtcgtgttagtttattgacgtagcgttatatggtggtgttagtatcgtcgtgttagtttattgacgtagcgtatacggtgttgtgttagtatcgtcgtgttagtttattgacgtagcgtatacggtgttgtgttagtatcgtcgtgttagtttattgacgtagcgtatacggtgttgtgttagtatcgtcgtgttagtttattgacgtagcgtatacggtgttgtgttagtatcgtcgtgttagtttattgacgtagcgtatacggtgttgtgttagtatcgtcgtgttagtttattgacgtagcgtatacggtgttgttagtatcgttgtgttagtttattgacgtagcgtatacggtgttgttagtatcgttgtgttag

SEQ ID NO: 18806 - DNA, 748 bp, Artificial Sequence
  chemically treated genomic DNA (Homo sapiens) CpG-island No: 18806
ctaacacaacgatactaacaacaccgtatacgctacgtcaataaactaacacaacgatactaacaacaccgtatacgctacgtcaataaactaacacgacgatactaacacaacaccgtatacgctacgtcaataaactaacacgacgatactaacacaacaccgtatacgctacgtcaataaactaacacgacgatactaacacaacaccgtatacgctacgtcaataaactaacacgacgatactaacacaacaccgtatacgctacgtcaataaactaacacgacgatactaacacaacaccgtatacgctacgtcaataaactaacacgacgatactaacaccaccatataacgctacgtcaataaactaacacgacgatactaacaccaccgtatacgctacgtcaataaactaacacgacgatactaacaccaccgtatacgctacgtcaataaactaacacgacgatactaacaccaccgtatacgctacgtcaataaactaacacgacgatactaacaccaccgtatacgctacgtcaataaactaacacgacgatactaacaccaccgtatacgctacgtcaataaactaacacgacgatactaacaccaccgtatacgctacgtcaataaactaacacgacgatactaacaacaccgaatacgctacgtcaataaactaacacgacgatactaacaaacaccgatacgctacgtcaataaactaacacgacgatacta

SEQ ID NO: 18807 - DNA, 748 bp, Artificial Sequence
  chemically treated genomic DNA (Homo sapiens) CpG-island No: 18807
ttgatatagcgatgttgataatatcgtgtgcgttacgttaatggattgatatagcgatgttgataatatcgtgtgcgttacgttaatggattgatacggcgatgttgatataatatcgtgtgcgttacgttagtggattgatacggcgatgttgatataatatcgtgtgcgttacgttagtggattgatacggcgatgttgatataatatcgtgtgcgttacgttagtggattgatacggcgatgttgatataatatcgtgtgcgttacgttagtggattgatacggcgatgttgatataatatcgtgtgcgttacgttagtggattgatacggcgatgttgatattattatgtggcgttacgttagtggattgatacggcgatgttgatattatcgtgtgcgttacgttaatggattgatacggcgatgttgatattatcgtgtgcgttacgttaatggattgatacggcgatgttgatattatcgtgtgcgttacgttaatggattgatacggcgatgttgatattatcgtgtgcgttacgttaatggattgatacggcgatgttgatattatcgtgtgcgttacgttaatggattgatacggcgatgttgatattatcgtgtgcgttacgttaatggattgatacggcgatgttgataatatcgggtgcgttacgttaatggattgatacggcgatgttgataaatatcggtgcgttacgttaatggattgatacggcgatgttg

SEQ ID NO: 18808 - DNA, 748 bp, Artificial Sequence
  chemically treated genomic DNA (Homo sapiens) CpG-island No: 18808
caacatcgccgtatcaatccattaacgtaacgcaccgatatttatcaacatcgccgtatcaatccattaacgtaacgcacccgatattatcaacatcgccgtatcaatccattaacgtaacgcacacgataatatcaacatcgccgtatcaatccattaacgtaacgcacacgataatatcaacatcgccgtatcaatccattaacgtaacgcacacgataatatcaacatcgccgtatcaatccattaacgtaacgcacacgataatatcaacatcgccgtatcaatccattaacgtaacgcacacgataatatcaacatcgccgtatcaatccattaacgtaacgcacacgataatatcaacatcgccgtatcaatccactaacgtaacgccacataataatatcaacatcgccgtatcaatccactaacgtaacgcacacgatattatatcaacatcgccgtatcaatccactaacgtaacgcacacgatattatatcaacatcgccgtatcaatccactaacgtaacgcacacgatattatatcaacatcgccgtatcaatccactaacgtaacgcacacgatattatatcaacatcgccgtatcaatccactaacgtaacgcacacgatattatatcaacatcgccgtatcaatccattaacgtaacgcacacgatattatcaacatcgctatatcaatccattaacgtaacgcacacgatattatcaacatcgctatatcaa

SEQ ID NO: 18809 - DNA, 607 bp, Artificial Sequence
  chemically treated genomic DNA (Homo sapiens) CpG-island No: 18809
aatttcggttcgcgtttcgtatttattttagggtttcgagatatttcgtagttttcgatacgcggtttcgtggtttcgttttttatcggtatttgcgattcggcggggcggttgttttggggttttcggattcggtttcgcgtacgcggatttcgggattatagcgtttataaggcggcgcggcgggcgcgcggttgcggggtgggcgggttcgtttcgtcgaacgcgttttgagggcggggtttcgcgcgtggtcgggcgttgcggtaggagcgtttttacggggtatttttttatttacggtcgttttttagtttcggcgtcggtttttttttattcggttatcgtcggggttacgcggtttttcgtgttgcggttttatttttggggtcgttttttgatttcgatcgtttttcgggtttttattttcgtcggcgttagtattttggggtgttattcgcggaggtgtcggtttttcgggcgggtattttgttatttttttttttcgcgttttttttattttcggtttttttttgatttttttttttcgacgaggttttgtgcgttttttttttggtattttggaatatttgtatttttggtcgta

SEQ ID NO: 18810 - DNA, 607 bp, Artificial Sequence
  chemically treated genomic DNA (Homo sapiens) CpG-island No: 18810
tacgaccaaaaatacaaatattccaaaataccaaaaaaaaaacgcacaaaacctcgtcgaaaaaaaaaaatcaaaaaaaaaccgaaaataaaaaaaacgcgaaaaaaaaaaataacaaaatacccgcccgaaaaaccgacacctccgcgaataacaccccaaaatactaacgccgacgaaaataaaaacccgaaaaacgatcgaaatcaaaaaacgaccccaaaaataaaaccgcaacacgaaaaaccgcgtaaccccgacgataaccgaataaaaaaaaaccgacgccgaaactaaaaaacgaccgtaaataaaaaaataccccgtaaaaacgctcctaccgcaacgcccgaccacgcgcgaaaccccgccctcaaaacgcgttcgacgaaacgaacccgcccaccccgcaaccgcgcgcccgccgcgccgccttataaacgctataatcccgaaatccgcgtacgcgaaaccgaatccgaaaaccccaaaacaaccgccccgccgaatcgcaaataccgataaaaaacgaaaccacgaaaccgcgtatcgaaaactacgaaatatctcgaaaccctaaaataaatacgaaacgcgaaccgaaatt

SEQ ID NO: 18811 - DNA, 607 bp, Artificial Sequence
  chemically treated genomic DNA (Homo sapiens) CpG-island No: 18811
tgcggttaggaatgtaggtgttttagggtgttaaaaggaaaacgtataaggtttcgtcgaggagggggggttaggaggggatcgggggtgggaagaacgcgggggagagggatggtagggtgttcgttcgagggatcgatattttcgcgagtggtattttaggatgttgacgtcggcgggggtgggggttcgaggggcggtcggggttagggggcggttttaggggtagggtcgtagtacgaggggtcgcgtgatttcggcggtgatcgggtggggagaggtcggcgtcggggttgggagacggtcgtgggtgggagggtgtttcgtggggacgtttttgtcgtagcgttcggttacgcgcgaggtttcgtttttaggacgcgttcggcgggacggattcgtttatttcgtagtcgcgcgttcgtcgcgtcgttttgtgggcgttgtagtttcggagttcgcgtgcgcggggtcgggttcgggagttttagggtagtcgtttcgtcgagtcgtaggtatcggtggggaacggggttacggggtcgcgtgtcgggggttgcggggtgtttcggggttttggggtgagtgcggggcgcgggtcgaggtt

SEQ ID NO: 18812 - DNA, 607 bp, Artificial Sequence
  chemically treated genomic DNA (Homo sapiens) CpG-island No: 18812
aacctcgacccgcgccccgcactcaccccaaaaccccgaaacaccccgcaacccccgacacgcgaccccgtaaccccgttccccaccgatacctacgactcgacgaaacgactaccctaaaactcccgaacccgaccccgcgcacgcgaactccgaaactacaacgcccacaaaacgacgcgacgaacgcgcgactacgaaataaacgaatccgtcccgccgaacgcgtcctaaaaacgaaacctcgcgcgtaaccgaacgctacgacaaaaacgtccccacgaaacaccctcccacccacgaccgtctcccaaccccgacgccgacctctccccacccgatcaccgccgaaatcacgcgacccctcgtactacgaccctacccctaaaaccgccccctaaccccgaccgcccctcgaacccccacccccgccgacgtcaacatcctaaaataccactcgcgaaaatatcgatccctcgaacgaacaccctaccatccctctcccccgcgttcttcccacccccgatcccctcctaaccccccctcctcgacgaaaccttatacgttttccttttaacaccctaaaacacctacattcctaaccgca

SEQ ID NO: 18813 - DNA, 613 bp, Artificial Sequence
  chemically treated genomic DNA (Homo sapiens) CpG-island No: 18813
atggtcggtgcggtcgggttttgggaaatgaagggttcgcggtgtttcgtattttttgtgggggcgggagtaattattaggtggtcgcggagttagtcgagggggcggttgttaattcgggcggcgatcgtaggcggagacgtttcgttcgggatagggatcgggtcgcgtcggcgttcgcggatagatattcgcggtttcggtcgttgtcgcgtttttcgttttcgttacgtttcggcggtttcgtttggggcgcgttttcgtttcgtacgcgtacgcgtttgtattcgtattggttcgttcggttttttcgcgttcgcggggtcgtttcgggggaggtgtcgagattcggttttggttcgcgcgcggttttcggggttcggcgcgtcggggatttataggcgaggcgagagaaaggggttggttcgcggggatatttatttgcgcggcgcggggttgtggcgtcggttattattatttcgcgtttttttttttgttagcgcgtacgtagatggcggggtggtttggggaggttttcgggtttttttttgggaacgtagggttaagttgtgtttcgattttacgttttttttatttacgtcgggtatacgta

SEQ ID NO: 18814 - DNA, 613 bp, Artificial Sequence
  chemically treated genomic DNA (Homo sapiens) CpG-island No: 18814
tacgtatacccgacgtaaataaaaaaaacgtaaaatcgaaacacaacttaaccctacgttcccaaaaaaaaacccgaaaacctccccaaaccaccccgccatctacgtacgcgctaacaaaaaaaaaaacgcgaaataataataaccgacgccacaaccccgcgccgcgcaaataaatatccccgcgaaccaacccctttctctcgcctcgcctataaatccccgacgcgccgaaccccgaaaaccgcgcgcgaaccaaaaccgaatctcgacacctcccccgaaacgaccccgcgaacgcgaaaaaaccgaacgaaccaatacgaatacaaacgcgtacgcgtacgaaacgaaaacgcgccccaaacgaaaccgccgaaacgtaacgaaaacgaaaaacgcgacaacgaccgaaaccgcgaatatctatccgcgaacgccgacgcgacccgatccctatcccgaacgaaacgtctccgcctacgatcgccgcccgaattaacaaccgccccctcgactaactccgcgaccacctaataattactcccgcccccacaaaaaatacgaaacaccgcgaacccttcatttcccaaaacccgaccgcaccgaccat

SEQ ID NO: 18815 - DNA, 613 bp, Artificial Sequence
  chemically treated genomic DNA (Homo sapiens) CpG-island No: 18815
tgcgtgtgttcgacgtgggtggggggggcgtggaatcggagtataatttggttttgcgtttttaggaagggattcgaagatttttttaggttatttcgttatttgcgtgcgcgttggtaagaggaggggcgcggggtaatggtggtcggcgttatagtttcgcgtcgcgtaggtaggtgttttcgcgagttaatttttttttttcgtttcgtttgtgggttttcggcgcgtcggatttcggaaatcgcgcgcgggttaaggtcgggtttcggtatttttttcggagcggtttcgcgagcgcgggggaatcgggcgggttagtgcgggtgtaggcgcgtgcgcgtgcgaggcgggggcgcgttttaagcgaggtcgtcggggcgtggcgggggcgggagacgcggtagcggtcgggatcgcgggtgtttgttcgcgagcgtcggcgcggttcggtttttgtttcgggcggggcgttttcgtttgcggtcgtcgttcgggttagtagtcgttttttcggttggtttcgcggttatttggtaattattttcgtttttataaaaagtgcgagatatcgcgagttttttattttttagagttcggtcgtatcggttat

SEQ ID NO: 18816 - DNA, 613 bp, Artificial Sequence
  chemically treated genomic DNA (Homo sapiens) CpG-island No: 18816
ataaccgatacgaccgaactctaaaaaataaaaaactcgcgatatctcgcactttttataaaaacgaaaataattaccaaataaccgcgaaaccaaccgaaaaaacgactactaacccgaacgacgaccgcaaacgaaaacgccccgcccgaaacaaaaaccgaaccgcgccgacgctcgcgaacaaacacccgcgatcccgaccgctaccgcgtctcccgcccccgccacgccccgacgacctcgcttaaaacgcgcccccgcctcgcacgcgcacgcgcctacacccgcactaacccgcccgattcccccgcgctcgcgaaaccgctccgaaaaaaataccgaaacccgaccttaacccgcgcgcgatttccgaaatccgacgcgccgaaaacccacaaacgaaacgaaaaaaaaaaattaactcgcgaaaacacctacctacgcgacgcgaaactataacgccgaccaccattaccccgcgcccctcctcttaccaacgcgcacgcaaataacgaaataacctaaaaaaatcttcgaatcccttcctaaaaacgcaaaaccaaattatactccgattccacgccccccccacccacgtcgaacacacgca

SEQ ID NO: 18817 - DNA, 691 bp, Artificial Sequence
  chemically treated genomic DNA (Homo sapiens) CpG-island No: 18817
gtttttaggtttgcgttttcgttttttaggcgttttgaggtttaaagttttagagaacgcgttggggcgggtgtggaggtgtcgtcgagcggtttcgggtcgttttcggcggttatatcggggtattttgggagtttttggttttttagacggtttttattaaggaagtcggacgggggcggggcggggcgagggggggcgagcggagggcgcggtgattatggcgatcgtagtggttatggcgatcgcggtttagagtatcgagaggtcgtgatacgatttggagcgttgtttgaagaatttggcgttgcgcggtattaggttggcgaggaattttttggtttttttggtgaggttttcgcggcgtgtaggtggcgtagggttttcggggttgttcggatcgggtttttggttttcggcgtggtttcggtttcgtcgtagtcggatttggcgtatcgcgttttcgaagagttttttcgtgttgtggtgtagtgcggtcgacgtttcgatgtgtttgtagtttagcgtttcggttaggtggcggttttttgtaggaaggtatcggtttaggcgttcgttgggttgtacgggattcggggcgagggtgggtttagggagggtttgggcgtgcggtggtaagggattggtattagtgaattttgtaatcgagagaatatggttgagtttatat

SEQ ID NO: 18818 - DNA, 691 bp, Artificial Sequence
  chemically treated genomic DNA (Homo sapiens) CpG-island No: 18818
atataaactcaaccatattctctcgattacaaaattcactaataccaatcccttaccaccgcacgcccaaaccctccctaaacccaccctcgccccgaatcccgtacaacccaacgaacgcctaaaccgataccttcctacaaaaaaccgccacctaaccgaaacgctaaactacaaacacatcgaaacgtcgaccgcactacaccacaacacgaaaaaactcttcgaaaacgcgatacgccaaatccgactacgacgaaaccgaaaccacgccgaaaaccaaaaacccgatccgaacaaccccgaaaaccctacgccacctacacgccgcgaaaacctcaccaaaaaaaccaaaaaattcctcgccaacctaataccgcgcaacgccaaattcttcaaacaacgctccaaatcgtatcacgacctctcgatactctaaaccgcgatcgccataaccactacgatcgccataatcaccgcgccctccgctcgccccccctcgccccgccccgcccccgtccgacttccttaataaaaaccgtctaaaaaaccaaaaactcccaaaataccccgatataaccgccgaaaacgacccgaaaccgctcgacgacacctccacacccgccccaacgcgttctctaaaactttaaacctcaaaacgcctaaaaaacgaaaacgcaaacctaaaaac

SEQ ID NO: 18819 - DNA, 691 bp, Artificial Sequence
  chemically treated genomic DNA (Homo sapiens) CpG-island No: 18819
atatgagtttagttatgttttttcggttgtaagatttattagtattaattttttgttatcgtacgtttaggttttttttagatttattttcgtttcgggtttcgtatagtttagcgggcgtttgagtcggtgtttttttgtagagggtcgttatttggtcgggacgttgagttgtaagtatatcgagacgtcggtcgtattgtattataatacgagggagtttttcgagggcgcggtgcgttagattcggttgcggcggggtcgaaattacgtcggaggttagaggttcgattcgggtagtttcgagggttttgcgttatttgtacgtcgcgagagttttattaagaaagttaagaggtttttcgttaatttggtgtcgcgtaacgttaagttttttaagtagcgttttaggtcgtgttacgatttttcggtgttttgagtcgcggtcgttatggttattgcggtcgttatggttatcgcgtttttcgttcgttttttttcgtttcgtttcgttttcgttcggtttttttggtggaggtcgtttaggaaattaaaaatttttaggatgtttcggtgtgatcgtcgggggcggttcggggtcgttcggcggtatttttatattcgttttaacgcgttttttggagttttgggttttagggcgtttagaaggcgaggacgtagatttgaaggt

SEQ ID NO: 18820 - DNA, 691 bp, Artificial Sequence
  chemically treated genomic DNA (Homo sapiens) CpG-island No: 18820
accttcaaatctacgtcctcgccttctaaacgccctaaaacccaaaactccaaaaaacgcgttaaaacgaatataaaaataccgccgaacgaccccgaaccgcccccgacgatcacaccgaaacatcctaaaaatttttaatttcctaaacgacctccaccaaaaaaaccgaacgaaaacgaaacgaaacgaaaaaaaacgaacgaaaaacgcgataaccataacgaccgcaataaccataacgaccgcgactcaaaacaccgaaaaatcgtaacacgacctaaaacgctacttaaaaaacttaacgttacgcgacaccaaattaacgaaaaacctcttaactttcttaataaaactctcgcgacgtacaaataacgcaaaaccctcgaaactacccgaatcgaacctctaacctccgacgtaatttcgaccccgccgcaaccgaatctaacgcaccgcgccctcgaaaaactccctcgtattataatacaatacgaccgacgtctcgatatacttacaactcaacgtcccgaccaaataacgaccctctacaaaaaaacaccgactcaaacgcccgctaaactatacgaaacccgaaacgaaaataaatctaaaaaaaacctaaacgtacgataacaaaaaattaatactaataaatcttacaaccgaaaaaacataactaaactcatat

SEQ ID NO: 18821 - DNA, 1198 bp, Artificial Sequence
  chemically treated genomic DNA (Homo sapiens) CpG-island No: 18821
gttcgtgcgcgttcgatttttagaattcggcgggttcggttaggagttcggaagtttcggaggttatcgtcgtcgcgggcgcgtaggcgggacgggtagaggttttttacgggcgattttcgttcgcggagtttcgtaattagcggcgttttagtttgcgggtttcggaacgtttcggcgttttacggtcgttttcgcggtagggttcgtacggtatagattagggcgttgaggttttgcggcggcgtcggatttcgaatttagggttcggttttcgattcggtttagattagagttatttcgcgtatttcgggtgggggagttttcggtttaatttcgttatttcgcgcgttttttttcgtcggatttgcgtatttagcgcgttttttgtttgaggcgttttcgcgtttcgttcgcgcgtttattacgtttttcgcgtttcgtttttcgcgtacgttcggttaatgaggcgcggcggcgaagcgtagtgttcgggggtgttgttcgcgtcgtgttcgtttattggttttattcggcgtttttattcgggttttgtcggtaggtacgaggggcggggcgcgcggttcgaggtgagggatcgcgggtcggaggggatttagcgagttagttgtcgtcgagggattagcgcgggtttagttgttgtcgttatttttattatttttgatcgcgtttgttcgggtttcgcgttaggaggagcggttaggtttagtttcggtatcgcgcgttcggggatttcgacggcgtttagttcggcgaggggttttagggggaggacgaggaggaaaggcggtttcgtcgggggattcggttatggcgttggattttttggttggatgcgcggggggtaaggaggcggcgggtcgggtcgggtcggggcgaggcgttcggggagggaggtcggtttattagtacgttttggtttcgcggtttttcgttggcgggggtcgtcgcgtttgtgaatggggattatagtttttttgtttcgggcgggtttcgtgggcgtaaattgattttaggttcgggttgttcgcgagggtaggtgtttttattttttttgggtacgttcggacgggaggtttggggcgtcggggtagtatcgtggttgagcggaggttaggattgtcgggaggatgttttattgtttttcgcgtcgaggtttcgggtttatttttttttt

SEQ ID NO: 18822 - DNA, 1198 bp, Artificial Sequence
  chemically treated genomic DNA (Homo sapiens) CpG-island No: 18822
aaaaaaaaaataaacccgaaacctcgacgcgaaaaacaataaaacatcctcccgacaatcctaacctccgctcaaccacgatactaccccgacgccccaaacctcccgtccgaacgtacccaaaaaaaataaaaacacctaccctcgcgaacaacccgaacctaaaatcaatttacgcccacgaaacccgcccgaaacaaaaaaactataatccccattcacaaacgcgacgacccccgccaacgaaaaaccgcgaaaccaaaacgtactaataaaccgacctccctccccgaacgcctcgccccgacccgacccgacccgccgcctccttaccccccgcgcatccaaccaaaaaatccaacgccataaccgaatcccccgacgaaaccgcctttcctcctcgtcctccccctaaaacccctcgccgaactaaacgccgtcgaaatccccgaacgcgcgataccgaaactaaacctaaccgctcctcctaacgcgaaacccgaacaaacgcgatcaaaaataataaaaataacgacaacaactaaacccgcgctaatccctcgacgacaactaactcgctaaatcccctccgacccgcgatccctcacctcgaaccgcgcgccccgcccctcgtacctaccgacaaaacccgaataaaaacgccgaataaaaccaataaacgaacacgacgcgaacaacacccccgaacactacgcttcgccgccgcgcctcattaaccgaacgtacgcgaaaaacgaaacgcgaaaaacgtaataaacgcgcgaacgaaacgcgaaaacgcctcaaacaaaaaacgcgctaaatacgcaaatccgacgaaaaaaaacgcgcgaaataacgaaattaaaccgaaaactcccccacccgaaatacgcgaaataactctaatctaaaccgaatcgaaaaccgaaccctaaattcgaaatccgacgccgccgcaaaacctcaacgccctaatctataccgtacgaaccctaccgcgaaaacgaccgtaaaacgccgaaacgttccgaaacccgcaaactaaaacgccgctaattacgaaactccgcgaacgaaaatcgcccgtaaaaaacctctacccgtcccgcctacgcgcccgcgacgacgataacctccgaaacttccgaactcctaaccgaacccgccgaattctaaaaatcgaacgcgcacgaac

SEQ ID NO: 18823 - DNA, 1198 bp, Artificial Sequence
  chemically treated genomic DNA (Homo sapiens) CpG-island No: 18823
gggaaggagatgagttcgggatttcggcgcggggggtagtggggtattttttcggtagttttggttttcgtttagttacggtgttgtttcggcgttttagatttttcgttcgagcgtgtttagagagaataaagatatttgttttcgcggatagttcgggtttgaagttaatttacgtttacgagattcgttcgaggtaagagaattgtggtttttatttatagacgcggcgattttcgttagcgggaagtcgcgaggttagggcgtgttggtgggtcgattttttttttcggacgtttcgtttcggttcggttcggttcgtcgtttttttatttttcgcgtatttagttaagaagtttagcgttatggtcgggtttttcggcgaggtcgtttttttttttcgttttttttttgaggtttttcgtcgggttgggcgtcgtcggggttttcgagcgcgcggtgtcggggttgggtttggtcgttttttttggcgcggagttcgggtaggcgcggttagggatggtggggatggcggtagtagttagattcgcgttggtttttcggcggtagttgattcgttggatttttttcggttcgcggttttttatttcgggtcgcgcgtttcgtttttcgtgtttgtcggtagggttcgggtgggggcgtcgagtgaggttaatgggcgggtacggcgcggataatattttcgggtattgcgtttcgtcgtcgcgttttattggtcgggcgtgcgcgggaggcggggcgcgggggacgtggtgggcgcgcgggcggggcgcggggacgttttagataaagagcgcgttgggtgcgtaggttcggcgggaggggacgcgcggggtggcggggttgagtcgaggatttttttattcggagtacgcggggtggttttggtttggatcgggtcgggaatcggattttgggttcggagttcggcgtcgtcgtagaattttagcgttttagtttgtgtcgtgcggattttgtcgcgaaaacggtcgtggagcgtcgggacgtttcgaggttcgtagattgggacgtcgttagttgcgaaatttcgcgagcgggaatcgttcgtggggagtttttgttcgtttcgtttgcgcgttcgcggcggcggtggttttcggggttttcggatttttggtcgaattcgtcgggttttgggggtcggacgcgtacgggt

SEQ ID NO: 18824 - DNA, 1198 bp, Artificial Sequence
  chemically treated genomic DNA (Homo sapiens) CpG-island No: 18824
acccgtacgcgtccgacccccaaaacccgacgaattcgaccaaaaatccgaaaaccccgaaaaccaccgccgccgcgaacgcgcaaacgaaacgaacaaaaactccccacgaacgattcccgctcgcgaaatttcgcaactaacgacgtcccaatctacgaacctcgaaacgtcccgacgctccacgaccgttttcgcgacaaaatccgcacgacacaaactaaaacgctaaaattctacgacgacgccgaactccgaacccaaaatccgattcccgacccgatccaaaccaaaaccaccccgcgtactccgaataaaaaaatcctcgactcaaccccgccaccccgcgcgtcccctcccgccgaacctacgcacccaacgcgctctttatctaaaacgtccccgcgccccgcccgcgcgcccaccacgtcccccgcgccccgcctcccgcgcacgcccgaccaataaaacgcgacgacgaaacgcaatacccgaaaatattatccgcgccgtacccgcccattaacctcactcgacgcccccacccgaaccctaccgacaaacacgaaaaacgaaacgcgcgacccgaaataaaaaaccgcgaaccgaaaaaaatccaacgaatcaactaccgccgaaaaaccaacgcgaatctaactactaccgccatccccaccatccctaaccgcgcctacccgaactccgcgccaaaaaaaacgaccaaacccaaccccgacaccgcgcgctcgaaaaccccgacgacgcccaacccgacgaaaaacctcaaaaaaaaaacgaaaaaaaaaaacgacctcgccgaaaaacccgaccataacgctaaacttcttaactaaatacgcgaaaaataaaaaaacgacgaaccgaaccgaaccgaaacgaaacgtccgaaaaaaaaaatcgacccaccaacacgccctaacctcgcgacttcccgctaacgaaaatcgccgcgtctataaataaaaaccacaattctcttacctcgaacgaatctcgtaaacgtaaattaacttcaaacccgaactatccgcgaaaacaaatatctttattctctctaaacacgctcgaacgaaaaatctaaaacgccgaaacaacaccgtaactaaacgaaaaccaaaactaccgaaaaaataccccactaccccccgcgccgaaatcccgaactcatctccttccc

SEQ ID NO: 18825 - DNA, 635 bp, Artificial Sequence
  chemically treated genomic DNA (Homo sapiens) CpG-island No: 18825
tgcggcggcgggcgttatttagtgcgttatttgttgttttatggagttggttaagacgcggttgtagttgtaggacgcgggtttagcgcgtatttataagggttcgttggattgtttcgcgtagatttacgggtacgagggtttgcgtggcgttaatcggggtatggtgtttacgttgttgcgtgagacgtttagtttcggcgtttatttttttatttatgacgtttttacgcgggcgttgggttgcgagtcgggcgatcgtttgttggtgtttaagttgttgttggcgggcggtacgttaggtatcgtgttttggttttttatttattttgtggacgtggttaagtcgcggttgtaggcggacggattgcggggcgtttcgcgttatcgcggtattttggattgcgtgtattagagttatcgcgtcgagggttggcgcgtttttatacgggggttggcgtttacgttgttgcgcgtttttttcgttaacgttgttattttcgttatcgttacggtggtgtttatttacgcgcgcggcgaggaggtcgggttcgagggcgaggttgtgttcgtcgtttttgcggggtttgttttggcgtagttttttagtttgtgacgtttatttcgtttttttt

SEQ ID NO: 18826 - DNA, 635 bp, Artificial Sequence
  chemically treated genomic DNA (Homo sapiens) CpG-island No: 18826
aaaaaaaacgaaataaacgtcacaaactaaaaaactacgccaaaacaaaccccgcaaaaacgacgaacacaacctcgccctcgaacccgacctcctcgccgcgcgcgtaaataaacaccaccgtaacgataacgaaaataacaacgttaacgaaaaaaacgcgcaacaacgtaaacgccaacccccgtataaaaacgcgccaaccctcgacgcgataactctaatacacgcaatccaaaataccgcgataacgcgaaacgccccgcaatccgtccgcctacaaccgcgacttaaccacgtccacaaaataaataaaaaaccaaaacacgatacctaacgtaccgcccgccaacaacaacttaaacaccaacaaacgatcgcccgactcgcaacccaacgcccgcgtaaaaacgtcataaataaaaaaataaacgccgaaactaaacgtctcacgcaacaacgtaaacaccataccccgattaacgccacgcaaaccctcgtacccgtaaatctacgcgaaacaatccaacgaacccttataaatacgcgctaaacccgcgtcctacaactacaaccgcgtcttaaccaactccataaaacaacaaataacgcactaaataacgcccgccgccgca

SEQ ID NO: 18827 - DNA, 635 bp, Artificial Sequence
  chemically treated genomic DNA (Homo sapiens) CpG-island No: 18827
aaggagggcggggtgagcgttataggttggagggttgcgttagggtaggtttcgtaggggcggcgggtatagtttcgttttcgggttcggttttttcgtcgcgcgcgtaggtgagtattatcgtgacggtggcgaaggtggtagcgttgacggggaaggcgcgtagtagcgtggacgttagttttcgtgtgaagacgcgttagttttcggcgcggtagttttggtgtacgtagtttaggatgtcgcggtagcgcggggcgtttcgtagttcgttcgtttgtagtcgcgatttgattacgtttataggataggtagagagttaggatacgatgtttgacgtatcgttcgttaatagtagtttgggtattagtaggcggtcgttcggttcgtagtttagcgttcgcgtgagagcgttataggtgaggaagtagacgtcgaagttgggcgttttacgtagtaacgtggatattatgtttcggttgacgttacgtagattttcgtgttcgtagatttgcgcgaggtagtttagcgagtttttgtaggtgcgcgttgggttcgcgttttgtagttgtagtcgcgttttggttagttttatggggtagtagatgacgtattggatggcgttcgtcgtcgta

SEQ ID NO: 18828 - DNA, 635 bp, Artificial Sequence
  chemically treated genomic DNA (Homo sapiens) CpG-island No: 18828
tacgacgacgaacgccatccaatacgtcatctactaccccataaaactaaccaaaacgcgactacaactacaaaacgcgaacccaacgcgcacctacaaaaactcgctaaactacctcgcgcaaatctacgaacacgaaaatctacgtaacgtcaaccgaaacataatatccacgttactacgtaaaacgcccaacttcgacgtctacttcctcacctataacgctctcacgcgaacgctaaactacgaaccgaacgaccgcctactaatacccaaactactattaacgaacgatacgtcaaacatcgtatcctaactctctacctatcctataaacgtaatcaaatcgcgactacaaacgaacgaactacgaaacgccccgcgctaccgcgacatcctaaactacgtacaccaaaactaccgcgccgaaaactaacgcgtcttcacacgaaaactaacgtccacgctactacgcgccttccccgtcaacgctaccaccttcgccaccgtcacgataatactcacctacgcgcgcgacgaaaaaaccgaacccgaaaacgaaactatacccgccgcccctacgaaacctaccctaacgcaaccctccaacctataacgctcaccccgccctcctt

SEQ ID NO: 18829 - DNA, 796 bp, Artificial Sequence
  chemically treated genomic DNA (Homo sapiens) CpG-island No: 18829
ttacggttcgacgggcgttttcgatagttttgtttattttttttttaattttgtttcgtcgaagggttagaggtaggagattgcggacgcgttcgtcgtgtattagtcggttgcgtttgtatttgtttttttcgcgggagtcgtcggggcgggtggtgcgttcgtagtcgtgtcgtcggttgtttagttattcgttttcgtagcgtagttcgttggagcgttggttgacgtcgaagtcgttgcgtcgatttgcgcgttattcgttcgcgtatatttttgtggtcgagttttcgatgagggcgggcggcgttgcggtcgggggttcgttggttttcgagtcgggcggttcggtgttgtttatttcgttgtttatttcgttgcgtagggagtttcgtttgttgtttagggagttgcgacgttcgttcgttcggagttcgttgagtagtagcgaacggcgaaagaattcgtcggtcgtcggagtgcgttttcgggacgacgcgtcgtcggcgttttcgggttcggttagtacgaagtcgtttcgggagttcgaggcggggttgtttttttcgtcgttcggtaagggtaggggcgggggtggcgtcggggggtcgttgtggtcggaatttagggaggtgcggcggggcgagcgtagtagcgtcgtttgatggtagggtatattttggcgtatttcgtagtcgtggcgtttttcggtttgttattggttttggtaggtgtttgcgggcggcggaggggtgggagaaagagttaggacgtgtcgttgggttttttgcgtttt

SEQ ID NO: 18830 - DNA, 796 bp, Artificial Sequence
  chemically treated genomic DNA (Homo sapiens) CpG-island No: 18830
aaaacgcaaaaaacccaacgacacgtcctaactctttctcccacccctccgccgcccgcaaacacctaccaaaaccaataacaaaccgaaaaacgccacgactacgaaatacgccaaaatataccctaccatcaaacgacgctactacgctcgccccgccgcacctccctaaattccgaccacaacgaccccccgacgccacccccgcccctacccttaccgaacgacgaaaaaaacaaccccgcctcgaactcccgaaacgacttcgtactaaccgaacccgaaaacgccgacgacgcgtcgtcccgaaaacgcactccgacgaccgacgaattctttcgccgttcgctactactcaacgaactccgaacgaacgaacgtcgcaactccctaaacaacaaacgaaactccctacgcaacgaaataaacaacgaaataaacaacaccgaaccgcccgactcgaaaaccaacgaacccccgaccgcaacgccgcccgccctcatcgaaaactcgaccacaaaaatatacgcgaacgaataacgcgcaaatcgacgcaacgacttcgacgtcaaccaacgctccaacgaactacgctacgaaaacgaataactaaacaaccgacgacacgactacgaacgcaccacccgccccgacgactcccgcgaaaaaaacaaatacaaacgcaaccgactaatacacgacgaacgcgtccgcaatctcctacctctaacccttcgacgaaacaaaattaaaaaaaaaataaacaaaactatcgaaaacgcccgtcgaaccgtaa

SEQ ID NO: 18831 - DNA, 796 bp, Artificial Sequence
  chemically treated genomic DNA (Homo sapiens) CpG-island No: 18831
ggggcgtaaggagtttagcggtacgttttgatttttttttttattttttcgtcgttcgtaggtatttattagggttagtggtaggtcgggaagcgttacggttacggggtacgttagagtgtgttttattattaggcggcgttgttgcgttcgtttcgtcgtatttttttggatttcggttatagcgatttttcgacgttattttcgtttttgtttttgtcgggcgacgagggaggtagtttcgtttcgggttttcggggcggtttcgtgttggtcgggttcggggacgtcgacggcgcgtcgtttcgaaagcgtatttcggcggtcggcggattttttcgtcgttcgttgttgtttagcgggtttcgagcgggcggacgtcgtagttttttgggtagtaagcgaggttttttgcgtagcgaggtgagtagcgaggtgggtagtatcggatcgttcggttcggaggttagcgggttttcggtcgtagcgtcgttcgtttttatcgagggttcggttatagaggtgtacgcgggcgagtggcgcgtagatcggcgtagcggtttcggcgttagttagcgttttaacgggttgcgttacgagggcgagtggttgggtaatcggcggtacggttacgggcgtattattcgtttcgacggttttcgcgaggagggtaagtataagcgtaatcggttggtgtacggcgggcgcgttcgtagttttttgtttttggtttttcggcggggtaaggttaaggagaaggtggatagggttgtcgagggcgttcgtcgagtcgtga

SEQ ID NO: 18832 - DNA, 796 bp, Artificial Sequence
  chemically treated genomic DNA (Homo sapiens) CpG-island No: 18832
tcacgactcgacgaacgccctcgacaaccctatccaccttctccttaaccttaccccgccgaaaaaccaaaaacaaaaaactacgaacgcgcccgccgtacaccaaccgattacgcttatacttaccctcctcgcgaaaaccgtcgaaacgaataatacgcccgtaaccgtaccgccgattacccaaccactcgccctcgtaacgcaacccgttaaaacgctaactaacgccgaaaccgctacgccgatctacgcgccactcgcccgcgtacacctctataaccgaaccctcgataaaaacgaacgacgctacgaccgaaaacccgctaacctccgaaccgaacgatccgatactacccacctcgctactcacctcgctacgcaaaaaacctcgcttactacccaaaaaactacgacgtccgcccgctcgaaacccgctaaacaacaacgaacgacgaaaaaatccgccgaccgccgaaatacgctttcgaaacgacgcgccgtcgacgtccccgaacccgaccaacacgaaaccgccccgaaaacccgaaacgaaactacctccctcgtcgcccgacaaaaacaaaaacgaaaataacgtcgaaaaatcgctataaccgaaatccaaaaaaatacgacgaaacgaacgcaacaacgccgcctaataataaaacacactctaacgtaccccgtaaccgtaacgcttcccgacctaccactaaccctaataaatacctacgaacgacgaaaaaataaaaaaaaaaatcaaaacgtaccgctaaactccttacgcccc

SEQ ID NO: 18833 - DNA, 537 bp, Artificial Sequence
  chemically treated genomic DNA (Homo sapiens) CpG-island No: 18833
cgtaagggcgtaaatggcgggcgaaggtttaaggttggggaaggcgtacgcggacgagtagatagatattggtgggtcgggtttcgtattttcgtcggagtaggttttagtgtcgtagtcgttttggaaatcgtttttttagagttcggcgtagcgtaggtcggatacgtttttttatacgtcgttgcgtttttttagttcgtttagttattcgtcgcggtacgtttagcggtttttgcgttttacgtttagtttttcgcgtttgttttgttgttagtggttttggtagttgtgttcgtcgggtttcgtgaagacgtttagtgattcgaagtcgtgtgtttagtagtcgttgtattcgttttgggcgtcggggttcgtgtatacgtcgtagttatgtgttcgtttcgttttttagttttttacgtagtagttttcgtcgttaaagtcgaatttgttttcgggggatatgtatgtagttggcgcggttttagtttttcggcggtttagcgtattttgggattggagagtttgttgggg

SEQ ID NO: 18834 - DNA, 537 bp, Artificial Sequence
  chemically treated genomic DNA (Homo sapiens) CpG-island No: 18834
ccccaacaaactctccaatcccaaaatacgctaaaccgccgaaaaactaaaaccgcgccaactacatacatatcccccgaaaacaaattcgactttaacgacgaaaactactacgtaaaaaactaaaaaacgaaacgaacacataactacgacgtatacacgaaccccgacgcccaaaacgaatacaacgactactaaacacacgacttcgaatcactaaacgtcttcacgaaacccgacgaacacaactaccaaaaccactaacaacaaaacaaacgcgaaaaactaaacgtaaaacgcaaaaaccgctaaacgtaccgcgacgaataactaaacgaactaaaaaaacgcaacgacgtataaaaaaacgtatccgacctacgctacgccgaactctaaaaaaacgatttccaaaacgactacgacactaaaacctactccgacgaaaatacgaaacccgacccaccaatatctatctactcgtccgcgtacgccttccccaaccttaaaccttcgcccgccatttacgcccttacg

SEQ ID NO: 18835 - DNA, 537 bp, Artificial Sequence
  chemically treated genomic DNA (Homo sapiens) CpG-island No: 18835
ttttagtaggttttttagttttaggatgcgttgagtcgtcggggggttgaggtcgcgttaattatatgtatgtttttcgggggtaagttcgattttgacgacgggggttgttacgtggggggttgggaggcggggcgggtatatggttacggcgtgtgtacgggtttcggcgtttagggcgagtatagcggttgttgggtatacggtttcgagttattgggcgtttttacggggttcggcggatatagttattagggttattggtagtagggtaagcgcgaagggttgggcgtggagcgtaagagtcgttggacgtatcgcggcgagtggttgggcgggttgaaggggcgtagcggcgtgtgggaaagcgtgttcggtttgcgttacgtcgggttttggaaggacggtttttaggacggttacggtattgagatttatttcgacggaggtgcggggttcggtttattagtgtttgtttgttcgttcgcgtgcgttttttttagttttgggttttcgttcgttatttgcgtttttgcg

SEQ ID NO: 18836 - DNA, 537 bp, Artificial Sequence
  chemically treated genomic DNA (Homo sapiens) CpG-island No: 18836
cgcaaaaacgcaaataacgaacgaaaacccaaaactaaaaaaaacgcacgcgaacgaacaaacaaacactaataaaccgaaccccgcacctccgtcgaaataaatctcaataccgtaaccgtcctaaaaaccgtccttccaaaacccgacgtaacgcaaaccgaacacgctttcccacacgccgctacgccccttcaacccgcccaaccactcgccgcgatacgtccaacgactcttacgctccacgcccaacccttcgcgcttaccctactaccaataaccctaataactatatccgccgaaccccgtaaaaacgcccaataactcgaaaccgtatacccaacaaccgctatactcgccctaaacgccgaaacccgtacacacgccgtaaccatatacccgccccgcctcccaaccccccacgtaacaacccccgtcgtcaaaatcgaacttacccccgaaaaacatacatataattaacgcgacctcaaccccccgacgactcaacgcatcctaaaactaaaaaacctactaaaa

SEQ ID NO: 18837 - DNA, 518 bp, Artificial Sequence
  chemically treated genomic DNA (Homo sapiens) CpG-island No: 18837
gggcgtagttgaggaggttggagtttttaatttcgaggcgttttttgtcgtcgtcgttttattgtggtttagagtttgggggttggcggcgggttcgggggtcggcgcgttttttagttggtcggttttttcgtgtatatttcgatggaggggcgagtcggcgttggggttagaggcgttagaggggtttttgcggtttttagggtcgtttttggcgtcgttgttttcgttttcgttttcgttttcgtcgtcggttttcggttgtttttcgtatttgaagcgtttttggcggcgtaagtagtagtcgttttcgaatatgttgtcggagttcgggtgtagcgtttagtaggagtttttgttcggtttgttcggggagcgtgttattttgacgaagtagttattgaaggatagcgagtggcggatggagttttgttagcgttgttggttttgtcggtaataggggaagaggtttatgatttattggtagatttcgtttagcgtgagtattttgttgggcg

SEQ ID NO: 18838 - DNA, 518 bp, Artificial Sequence
  chemically treated genomic DNA (Homo sapiens) CpG-island No: 18838
cgcccaacaaaatactcacgctaaacgaaatctaccaataaatcataaacctcttcccctattaccgacaaaaccaacaacgctaacaaaactccatccgccactcgctatccttcaataactacttcgtcaaaataacacgctccccgaacaaaccgaacaaaaactcctactaaacgctacacccgaactccgacaacatattcgaaaacgactactacttacgccgccaaaaacgcttcaaatacgaaaaacaaccgaaaaccgacgacgaaaacgaaaacgaaaacgaaaacaacgacgccaaaaacgaccctaaaaaccgcaaaaacccctctaacgcctctaaccccaacgccgactcgcccctccatcgaaatatacacgaaaaaaccgaccaactaaaaaacgcgccgacccccgaacccgccgccaacccccaaactctaaaccacaataaaacgacgacgacaaaaaacgcctcgaaattaaaaactccaacctcctcaactacgccc

SEQ ID NO: 18839 - DNA, 518 bp, Artificial Sequence
  chemically treated genomic DNA (Homo sapiens) CpG-island No: 18839
cgtttagtaagatgtttacgttgagcgagatttattagtggattatggatttttttttttattatcggtagaattagtagcgttggtagaattttattcgttattcgttgttttttaatgattgtttcgttaaggtggtacgtttttcggataagtcgggtaagggtttttattggacgttgtattcggatttcggtaatatgttcgagaacggttgttatttgcgtcgttagaagcgttttaagtgcgagaagtagtcgggggtcggcggcgggggcgggagcggaagcgggggtagcggcgttaagggcggttttgagagtcgtaaggatttttttggcgtttttaattttagcgtcgattcgtttttttatcggggtgtgtacgggaagatcggttagttagagggcgcgtcggttttcgggttcgtcgttagtttttagattttggattatagtggggcgacggcgatagggggcgtttcggagttgaagattttagtttttttaattgcgttt

SEQ ID NO: 18840 - DNA, 518 bp, Artificial Sequence
  chemically treated genomic DNA (Homo sapiens) CpG-island No: 18840
aaacgcaattaaaaaaactaaaatcttcaactccgaaacgccccctatcgccgtcgccccactataatccaaaatctaaaaactaacgacgaacccgaaaaccgacgcgccctctaactaaccgatcttcccgtacacaccccgataaaaaaacgaatcgacgctaaaattaaaaacgccaaaaaaatccttacgactctcaaaaccgcccttaacgccgctacccccgcttccgctcccgcccccgccgccgacccccgactacttctcgcacttaaaacgcttctaacgacgcaaataacaaccgttctcgaacatattaccgaaatccgaatacaacgtccaataaaaacccttacccgacttatccgaaaaacgtaccaccttaacgaaacaatcattaaaaaacaacgaataacgaataaaattctaccaacgctactaattctaccgataataaaaaaaaaaatccataatccactaataaatctcgctcaacgtaaacatcttactaaacg

SEQ ID NO: 18841 - DNA, 506 bp, Artificial Sequence
  chemically treated genomic DNA (Homo sapiens) CpG-island No: 18841
cgggcggtcgcgcggcgcggggcgggggaggggagttgagtagttgtagttattcgagcgttcgcgcgggtttaacgttattcgggcgaagaggaagtttagagttgcggggcgcggcgtgcgcggcggcggcggcggcgcggcgggcgggggtagcgtcgggggtaggcggttgtcgcggagcgcggcgtcggggagcgttttcgcgggaagtgagcgggttgtttttgcgaggtaagtgtagttgagttgatgtggattttacgtcgtttgagtgtttattttttcgttttttttttatttgttcgtcgtataaagacgttcgtatttataaagttcgaggtgtatttgtaaggcggtcgttcgttagttcggtcgtcgcgtttttcgtttcgtcgttttatcgttgcgcgcgatttttttttcgcgattttttttttaagcggggtttttattttgtttgtaaagtagtgtaattggtttaggttcggaggttagggaaagag

SEQ ID NO: 18842 - DNA, 506 bp, Artificial Sequence
  chemically treated genomic DNA (Homo sapiens) CpG-island No: 18842
ctctttccctaacctccgaacctaaaccaattacactactttacaaacaaaataaaaaccccgcttaaaaaaaaaatcgcgaaaaaaaaatcgcgcgcaacgataaaacgacgaaacgaaaaacgcgacgaccgaactaacgaacgaccgccttacaaatacacctcgaactttataaatacgaacgtctttatacgacgaacaaataaaaaaaaaacgaaaaaataaacactcaaacgacgtaaaatccacatcaactcaactacacttacctcgcaaaaacaacccgctcacttcccgcgaaaacgctccccgacgccgcgctccgcgacaaccgcctacccccgacgctacccccgcccgccgcgccgccgccgccgccgcgcacgccgcgccccgcaactctaaacttcctcttcgcccgaataacgttaaacccgcgcgaacgctcgaataactacaactactcaactcccctcccccgccccgcgccgcgcgaccgcccg

SEQ ID NO: 18843 - DNA, 506 bp, Artificial Sequence
  chemically treated genomic DNA (Homo sapiens) CpG-island No: 18843
ttttttttttagttttcgggtttaaattaattatattgttttgtaaataaagtgagggtttcgtttgggggaggggtcgcgggggaggggtcgcgcgtagcggtgaagcggcggggcgggaggcgcggcggtcggattggcgggcggtcgttttgtaggtgtatttcgggttttgtaggtgcgagcgtttttgtgcggcggataaatggggagaggacgaggaggtgggtatttaagcgacgtaagatttatattagtttaattgtatttgtttcgtagaggtagttcgtttatttttcgcggaggcgtttttcggcgtcgcgtttcgcggtagtcgtttgttttcggcgttgttttcgttcgtcgcgtcgtcgtcgtcgtcgcgtacgtcgcgtttcgtagttttgggtttttttttcgttcgggtggcgttgggttcgcgcgggcgttcgggtgattgtagttgtttagtttttttttttcgtttcgcgtcgcgcggtcgttcg

SEQ ID NO: 18844 - DNA, 506 bp, Artificial Sequence
  chemically treated genomic DNA (Homo sapiens) CpG-island No: 18844
cgaacgaccgcgcgacgcgaaacgaaaaaaaaaaactaaacaactacaatcacccgaacgcccgcgcgaacccaacgccacccgaacgaaaaaaaaacccaaaactacgaaacgcgacgtacgcgacgacgacgacgacgcgacgaacgaaaacaacgccgaaaacaaacgactaccgcgaaacgcgacgccgaaaaacgcctccgcgaaaaataaacgaactacctctacgaaacaaatacaattaaactaatataaatcttacgtcgcttaaatacccacctcctcgtcctctccccatttatccgccgcacaaaaacgctcgcacctacaaaacccgaaatacacctacaaaacgaccgcccgccaatccgaccgccgcgcctcccgccccgccgcttcaccgctacgcgcgacccctcccccgcgacccctcccccaaacgaaaccctcactttatttacaaaacaatataattaatttaaacccgaaaactaaaaaaaaaa

SEQ ID NO: 18845 - DNA, 954 bp, Artificial Sequence
  chemically treated genomic DNA (Homo sapiens) CpG-island No: 18845
tttttagattcggtcgggagagtttcgcgcgtcgcgatttcggagagagggcgtagggggtagacgatttttcgtcgcgttttttgtatttcgggttcggttggttgtggttcgcgttaaggtgtatgtttagttaagtagaaggagcgggtatcgcgtaggtagcgttgtttcgagggataaaggttgggtttatattttttacggtcgtagttcgcgcgtttgaggaagttcgtttggttgttaggggtttttcgttggtcggagtttgcgtagcgtgtgggggaaggggagttcggtcgttcgtttttttttcgtcgcgtttttagggatttgttgattaagatttttatagtttagtcgtcgtcgattcgttttttatttttacgtttcggtttcgcggagtttttcgtttcggtcgtttttacgtattgtagaagcgatagtttttcggcggtttttgaaatttcggataaagaatttagaaattttcgattttttattttagaatttttagttttcgttttcgttttatcgtttgtttttttcgtcgtcgtcgttatcgtcgtagtcgttagtaattttatttttagatcgcgcgagatcggtttttgcggtcgtcgcgagatcgcgtacgcgttttcgggattttggcgtagtgggcgcgcggattcgagttttatttcgttcgtgagaggttggcgcggtttgtttaatttcgagtcggagcggagagagcgttcgtttattggtttttttcgtagttttagtcgggtgcgcgtagtcgcgcgtttttaagtttaaaacgcggattgtttcgggttagttggttcggtagagttttttcgggatttggtcggcgggttttgtggggacgcgaggtttttttgggtttttatattttttggtttttgtttttggatgacgtattttgaagaaaatttgatttttttt

SEQ ID NO: 18846 - DNA, 954 bp, Artificial Sequence
  chemically treated genomic DNA (Homo sapiens) CpG-island No: 18846
aaaaaaaatcaaattttcttcaaaatacgtcatccaaaaacaaaaaccaaaaaatataaaaacccaaaaaaacctcgcgtccccacaaaacccgccgaccaaatcccgaaaaaactctaccgaaccaactaacccgaaacaatccgcgttttaaacttaaaaacgcgcgactacgcgcacccgactaaaactacgaaaaaaaccaataaacgaacgctctctccgctccgactcgaaattaaacaaaccgcgccaacctctcacgaacgaaataaaactcgaatccgcgcgcccactacgccaaaatcccgaaaacgcgtacgcgatctcgcgacgaccgcaaaaaccgatctcgcgcgatctaaaaataaaattactaacgactacgacgataacgacgacgacgaaaaaaacaaacgataaaacgaaaacgaaaactaaaaattctaaaataaaaaatcgaaaatttctaaattctttatccgaaatttcaaaaaccgccgaaaaactatcgcttctacaatacgtaaaaacgaccgaaacgaaaaactccgcgaaaccgaaacgtaaaaataaaaaacgaatcgacgacgactaaactataaaaatcttaatcaacaaatccctaaaaacgcgacgaaaaaaaaacgaacgaccgaactccccttcccccacacgctacgcaaactccgaccaacgaaaaacccctaacaaccaaacgaacttcctcaaacgcgcgaactacgaccgtaaaaaatataaacccaacctttatccctcgaaacaacgctacctacgcgatacccgctccttctacttaactaaacatacaccttaacgcgaaccacaaccaaccgaacccgaaatacaaaaaacgcgacgaaaaatcgtctaccccctacgccctctctccgaaatcgcgacgcgcgaaactctcccgaccgaatctaaaaa

SEQ ID NO: 18847 - DNA, 954 bp, Artificial Sequence
  chemically treated genomic DNA (Homo sapiens) CpG-island No: 18847
aagaggaattagattttttttaggatacgttatttagagataagagttaagggatgtagaaatttagggaagtttcgcgtttttataaagttcgtcggttaaatttcgaaggggttttatcgggttagttagttcggagtagttcgcgttttagatttagaggcgcgcgattgcgcgtattcggttggagttgcggagaggattaatgagcgggcgtttttttcgtttcggttcgggattgggtaagtcgcgttagttttttacgggcggggtgggattcggattcgcgcgtttattgcgttagagtttcgggggcgcgtgcgcggtttcgcggcggtcgtaggggtcggtttcgcgcggtttagaagtggagttgttggcggttgcggcggtgacggcggcgacggaggaggtaggcggtggggcgggggcggggattaaggattttgaggtggggagtcgggagtttttggattttttattcggaattttaagggtcgtcggagggttgtcgtttttgtagtgcgtaggagcggtcggggcgggaggtttcgcggagtcgaggcgtggaggtaagaggcggatcggcggcggttgggttgtagagattttaattaataggtttttgggagcgcggcgggggaggggcgggcggtcgggtttttttttttttatacgttgcgtaaatttcggttagcgggagatttttggtagttaggcgggtttttttaggcgcgcgagttgcggtcgtggagggtgtgagtttaatttttgtttttcggagtaacgttgtttgcgcggtgttcgttttttttgtttggttgggtatgtattttggcgcgggttatagttagtcgagttcgaggtgtagggggcgcggcggggagtcgtttgttttttgcgtttttttttcgaggtcgcgacgcgcgggattttttcggtcgggtttgggaa

SEQ ID NO: 18848 - DNA, 954 bp, Artificial Sequence
  chemically treated genomic DNA (Homo sapiens) CpG-island No: 18848
ttcccaaacccgaccgaaaaaatcccgcgcgtcgcgacctcgaaaaaaaaacgcaaaaaacaaacgactccccgccgcgccccctacacctcgaactcgactaactataacccgcgccaaaatacatacccaaccaaacaaaaaaaacgaacaccgcgcaaacaacgttactccgaaaaacaaaaattaaactcacaccctccacgaccgcaactcgcgcgcctaaaaaaacccgcctaactaccaaaaatctcccgctaaccgaaatttacgcaacgtataaaaaaaaaaaaacccgaccgcccgcccctcccccgccgcgctcccaaaaacctattaattaaaatctctacaacccaaccgccgccgatccgcctcttacctccacgcctcgactccgcgaaacctcccgccccgaccgctcctacgcactacaaaaacgacaaccctccgacgacccttaaaattccgaataaaaaatccaaaaactcccgactccccacctcaaaatccttaatccccgcccccgccccaccgcctacctcctccgtcgccgccgtcaccgccgcaaccgccaacaactccacttctaaaccgcgcgaaaccgacccctacgaccgccgcgaaaccgcgcacgcgcccccgaaactctaacgcaataaacgcgcgaatccgaatcccaccccgcccgtaaaaaactaacgcgacttacccaatcccgaaccgaaacgaaaaaaacgcccgctcattaatcctctccgcaactccaaccgaatacgcgcaatcgcgcgcctctaaatctaaaacgcgaactactccgaactaactaacccgataaaaccccttcgaaatttaaccgacgaactttataaaaacgcgaaacttccctaaatttctacatcccttaactcttatctctaaataacgtatcctaaaaaaaatctaattcctctt

SEQ ID NO: 18849 - DNA, 910 bp, Artificial Sequence
  chemically treated genomic DNA (Homo sapiens) CpG-island No: 18849
  unsure (267)
cgcgttttcgttgttgcgcgtcggtcggcgggtcgtcgcggttgttcgtcgtttttcgtttttttttttttcgtttttttaattattttaagttttatttttttatcgttttttttttttgcgttttgttttttttcgtgtttcgttcgttttttatgcgtcgttttttttttgggtatagtttagcgggggatttggtttgtcgtacgtcgcgttcggtcggttcgggcggcgagcgttttttcgttgttttgttttgtttcgttngttcggcgcgttttcggttcggtttttatgttacggttattattattttaatattagtgtcgcgttaaggttagcgcgtttttttcgggtttagtttagtgtgtgtgagcggcggcgcgttgcgggtcgggatacggcgcggtcggcggttttagtatggaggacggtttttttagttatagtagtttgtacgatacgttttcgttgttttagttttgtaacggtgaggggcggtcgcgcggggtcggggcggcgagcggttggtggcgggcggcggcgacggcgacggcggggattaagtcgaggggtcgaggttcggcggtcgcgggcgaggtcgcgtaaagttgttgcggaggggcgcgcggttttcgttttcgtcgtcggcgtattgtgttggagtcgcggggtcgcgtttcgtttcgggtcgtttcgggtttttcgtcgttatttcggttttcggtattggcgcgcggatttcgtcggttttagtattcgcggagcgcgttcgggcggaggcgcgtggggtatagggcggcggggaggttcgggtagttttcgcgtttcggggaacgtgttgtttttttgtttttcgatttatatttgtttggaaatgattggatgaagaattcgggaaataaatttt

SEQ ID NO: 18850 - DNA, 910 bp, Artificial Sequence
  chemically treated genomic DNA (Homo sapiens) CpG-island No: 18850
  unsure (644)
aaaatttatttcccgaattcttcatccaatcatttccaaacaaatataaatcgaaaaacaaaaaaacaacacgttccccgaaacgcgaaaactacccgaacctccccgccgccctataccccacgcgcctccgcccgaacgcgctccgcgaatactaaaaccgacgaaatccgcgcgccaataccgaaaaccgaaataacgacgaaaaacccgaaacgacccgaaacgaaacgcgaccccgcgactccaacacaatacgccgacgacgaaaacgaaaaccgcgcgcccctccgcaacaactttacgcgacctcgcccgcgaccgccgaacctcgacccctcgacttaatccccgccgtcgccgtcgccgccgcccgccaccaaccgctcgccgccccgaccccgcgcgaccgcccctcaccgttacaaaactaaaacaacgaaaacgtatcgtacaaactactataactaaaaaaaccgtcctccatactaaaaccgccgaccgcgccgtatcccgacccgcaacgcgccgccgctcacacacactaaactaaacccgaaaaaaacgcgctaaccttaacgcgacactaatattaaaataataataaccgtaacataaaaaccgaaccgaaaacgcgccgaacnaacgaaacaaaacaaaacaacgaaaaaacgctcgccgcccgaaccgaccgaacgcgacgtacgacaaaccaaatcccccgctaaactatacccaaaaaaaaaacgacgcataaaaaacgaacgaaacacgaaaaaaaacaaaacgcaaaaaaaaaaaacgataaaaaaataaaacttaaaataattaaaaaaacgaaaaaaaaaaaaacgaaaaacgacgaacaaccgcgacgacccgccgaccgacgcgcaacaacgaaaacgcg

SEQ ID NO: 18851 - DNA, 910 bp, Artificial Sequence
  chemically treated genomic DNA (Homo sapiens) CpG-island No: 18851
  unsure (644)
aggatttgtttttcgagttttttatttagttatttttaaatagatgtgggtcgggaagtaaaaaagtaatacgtttttcggaacgcggaggttgttcgggttttttcgtcgttttgtgttttacgcgttttcgttcgggcgcgtttcgcgggtgttggagtcggcggggttcgcgcgttagtgtcgggagtcggggtggcggcggggagttcggggcggttcggagcgaggcgcggtttcgcggttttaatataatgcgtcggcggcgggaacggggatcgcgcgttttttcgtaataattttgcgcggtttcgttcgcggtcgtcgggtttcggtttttcggtttggttttcgtcgtcgtcgtcgtcgtcgttcgttattagtcgttcgtcgtttcggtttcgcgcggtcgttttttatcgttgtagaattggagtagcgaggacgtgtcgtataggttgttgtagttggagaagtcgttttttatgttgaggtcgtcggtcgcgtcgtatttcggttcgtagcgcgtcgtcgtttatatatattgagttgaattcgaagaaaacgcgttggttttggcgcggtattgatgttgagatgatgatgatcgtaatatggaaatcgggtcggagacgcgtcgagtnggcgaaataaagtagaataacgaaaggacgttcgtcgttcgggtcggtcggacgcgacgtgcggtaggttagatttttcgttaagttatatttaggaggaggacggcgtatgaaagacgggcgaaatacgagaaaagatagaacgtaaaaagggggaacggtaaggaggtggggtttagggtggttaaaaaagcgagaaaggggggggcgggaagcgacgaataatcgcggcgattcgtcggtcggcgcgtaataacgaaagcgcg

SEQ ID NO: 18852 - DNA, 910 bp, Artificial Sequence
  chemically treated genomic DNA (Homo sapiens) CpG-island No: 18852
  unsure (267)
cgcgctttcgttattacgcgccgaccgacgaatcgccgcgattattcgtcgcttcccgcccccccctttctcgcttttttaaccaccctaaaccccacctccttaccgttccccctttttacgttctatcttttctcgtatttcgcccgtctttcatacgccgtcctcctcctaaatataacttaacgaaaaatctaacctaccgcacgtcgcgtccgaccgacccgaacgacgaacgtcctttcgttattctactttatttcgccnactcgacgcgtctccgacccgatttccatattacgatcatcatcatctcaacatcaataccgcgccaaaaccaacgcgttttcttcgaattcaactcaatatatataaacgacgacgcgctacgaaccgaaatacgacgcgaccgacgacctcaacataaaaaacgacttctccaactacaacaacctatacgacacgtcctcgctactccaattctacaacgataaaaaacgaccgcgcgaaaccgaaacgacgaacgactaataacgaacgacgacgacgacgacgacgaaaaccaaaccgaaaaaccgaaacccgacgaccgcgaacgaaaccgcgcaaaattattacgaaaaaacgcgcgatccccgttcccgccgccgacgcattatattaaaaccgcgaaaccgcgcctcgctccgaaccgccccgaactccccgccgccaccccgactcccgacactaacgcgcgaaccccgccgactccaacacccgcgaaacgcgcccgaacgaaaacgcgtaaaacacaaaacgacgaaaaaacccgaacaacctccgcgttccgaaaaacgtattacttttttacttcccgacccacatctatttaaaaataactaaataaaaaactcgaaaaacaaatcct

SEQ ID NO: 18853 - DNA, 584 bp, Artificial Sequence
  chemically treated genomic DNA (Homo sapiens) CpG-island No: 18853
aaaacgtgtggatagaggaacgcgtcggtcggatgtgggttatagtgagtcgcggcgtggaaacggtcgaaatgtgcgggcgcgttgtttatgtttggtcgtggagttgttcgcgggcgcgggaatagcgcgtcgggggcgggtgggtttgggtgttcgtggcggaggttatttcgggttttacgcgttcgttttttttcggttttggtttttgttttcgcgttttcgtaagagtcgttcgtcgcgtttcgtagtttttgagttttcgtgcgcggaggcggggtttggttaaggggatagcgggcggtagacgcgtttttgcggtttttaggtcgttcgggtcgcgtttttcgcggggaaagaggtcgtacgacggggaggttcggtttcgtttcgttacgtttttttttcggttcgggtttcgcggtcgtcgaggcgttttttcgcgggcggacgtggcgttgggttcgcgcggttgcggcggcggcggcgggttcggggttgttatggtaatcggtagtagtagtcgttatagtagggtcggtttagtttaattttgggagttcgtcgcgtattttattgtg

SEQ ID NO: 18854 - DNA, 584 bp, Artificial Sequence
  chemically treated genomic DNA (Homo sapiens) CpG-island No: 18854
cacaataaaatacgcgacgaactcccaaaattaaactaaaccgaccctactataacgactactactaccgattaccataacaaccccgaacccgccgccgccgccgcaaccgcgcgaacccaacgccacgtccgcccgcgaaaaaacgcctcgacgaccgcgaaacccgaaccgaaaaaaaaacgtaacgaaacgaaaccgaacctccccgtcgtacgacctctttccccgcgaaaaacgcgacccgaacgacctaaaaaccgcaaaaacgcgtctaccgcccgctatccccttaaccaaaccccgcctccgcgcacgaaaactcaaaaactacgaaacgcgacgaacgactcttacgaaaacgcgaaaacaaaaaccaaaaccgaaaaaaaacgaacgcgtaaaacccgaaataacctccgccacgaacacccaaacccacccgcccccgacgcgctattcccgcgcccgcgaacaactccacgaccaaacataaacaacgcgcccgcacatttcgaccgtttccacgccgcgactcactataacccacatccgaccgacgcgttcctctatccacacgtttt

SEQ ID NO: 18855 - DNA, 584 bp, Artificial Sequence
  chemically treated genomic DNA (Homo sapiens) CpG-island No: 18855
tatagtgaggtgcgcggcgggtttttagggttgggttgggtcggttttgttgtggcggttgttgttgtcggttattatggtaatttcgggttcgtcgtcgtcgtcgtagtcgcgcgagtttagcgttacgttcgttcgcgagggggcgtttcggcggtcgcggggttcgggtcgggagggggacgtggcggggcggggtcgagttttttcgtcgtgcggttttttttttcgcggggagcgcggttcgggcggtttgggagtcgtaggggcgcgtttgtcgttcgttgtttttttggttaggtttcgttttcgcgtacgggggtttaggggttgcggggcgcggcgggcggtttttgcgggggcgcggggataaagattaaggtcgggagagagcgggcgcgtggggttcggggtaattttcgttacggatatttaagtttattcgttttcgacgcgttgttttcgcgttcgcgggtagttttacgattaaatatggataacgcgttcgtatatttcggtcgtttttacgtcgcggtttattgtggtttatattcgatcggcgcgtttttttgtttatacgtttt

SEQ ID NO: 18856 - DNA, 584 bp, Artificial Sequence
  chemically treated genomic DNA (Homo sapiens) CpG-island No: 18856
aaaacgtataaacaaaaaaacgcgccgatcgaatataaaccacaataaaccgcgacgtaaaaacgaccgaaatatacgaacgcgttatccatatttaatcgtaaaactacccgcgaacgcgaaaacaacgcgtcgaaaacgaataaacttaaatatccgtaacgaaaattaccccgaaccccacgcgcccgctctctcccgaccttaatctttatccccgcgcccccgcaaaaaccgcccgccgcgccccgcaacccctaaacccccgtacgcgaaaacgaaacctaaccaaaaaaacaacgaacgacaaacgcgcccctacgactcccaaaccgcccgaaccgcgctccccgcgaaaaaaaaaaccgcacgacgaaaaaactcgaccccgccccgccacgtccccctcccgacccgaaccccgcgaccgccgaaacgccccctcgcgaacgaacgtaacgctaaactcgcgcgactacgacgacgacgacgaacccgaaattaccataataaccgacaacaacaaccgccacaacaaaaccgacccaacccaaccctaaaaacccgccgcgcacctcactata

SEQ ID NO: 18857 - DNA, 518 bp, Artificial Sequence
  chemically treated genomic DNA (Homo sapiens) CpG-island No: 18857
ttttcgtcggtttcgtttttttaggttgttttcggcgtttcgggtttttttcgcgtagtttttgagtttcgtaggttttgcgttttcgatgtatattttcgtttattttcgtggttttcggttcggtatggcgcgcgcggtggggttcgagcggtggttgttggtcgtttatatcggcggtattattggtatgcggagtgagttcggcggtgagttcgatattttgggcggagtaggtttttggatttggtcgcgatcggtagtttcggatttttttgtatttacggggtgtcgttggggagttaaattcgcgtttggatggcgggtgcggtttgcggtcgttttttttcggtttcggttatcggcgtttttacgtatggagtttcgatttggatagaggagattgcggtgggttttcgtcgtcgcggtgttttcgggagcgttttgcgattttggggttaggttttttgtgttgtcgttgcgtttttgagggttagcgttttgaagttttggaatat

SEQ ID NO: 18858 - DNA, 518 bp, Artificial Sequence
  chemically treated genomic DNA (Homo sapiens) CpG-island No: 18858
atattccaaaacttcaaaacgctaaccctcaaaaacgcaacgacaacacaaaaaacctaaccccaaaatcgcaaaacgctcccgaaaacaccgcgacgacgaaaacccaccgcaatctcctctatccaaatcgaaactccatacgtaaaaacgccgataaccgaaaccgaaaaaaaacgaccgcaaaccgcacccgccatccaaacgcgaatttaactccccaacgacaccccgtaaatacaaaaaaatccgaaactaccgatcgcgaccaaatccaaaaacctactccgcccaaaatatcgaactcaccgccgaactcactccgcataccaataataccgccgatataaacgaccaacaaccaccgctcgaaccccaccgcgcgcgccataccgaaccgaaaaccacgaaaataaacgaaaatatacatcgaaaacgcaaaacctacgaaactcaaaaactacgcgaaaaaaacccgaaacgccgaaaacaacctaaaaaaacgaaaccgacgaaaa

SEQ ID NO: 18859 - DNA, 518 bp, Artificial Sequence
  chemically treated genomic DNA (Homo sapiens) CpG-island No: 18859
atattttaggattttaggacgttggtttttaggggcgtagcggtagtatagggggtttggttttagggtcgtagggcgttttcgggagtatcgcgacggcgagaatttatcgtaattttttttgtttaggtcggggttttatgcgtggggacgtcggtggtcggaatcggaggagagcgatcgtagatcgtattcgttatttaggcgcggatttggttttttagcgatatttcgtgggtgtaggagggttcgaggttatcggtcgcggttaggtttagaggtttatttcgtttagggtatcggatttatcgtcgagtttatttcgtatgttaatggtgtcgtcggtgtagacggttagtagttatcgttcgggttttatcgcgcgcgttatgtcggatcggggattacgggagtggacgggggtgtgtatcggggacgtagggtttgcgggatttagggattgcgcggaggaggttcggggcgtcgggggtagtttgggagggcggggtcggcggggg

SEQ ID NO: 18860 - DNA, 518 bp, Artificial Sequence
  chemically treated genomic DNA (Homo sapiens) CpG-island No: 18860
cccccgccgaccccgccctcccaaactacccccgacgccccgaacctcctccgcgcaatccctaaatcccgcaaaccctacgtccccgatacacacccccgtccactcccgtaatccccgatccgacataacgcgcgcgataaaacccgaacgataactactaaccgtctacaccgacgacaccattaacatacgaaataaactcgacgataaatccgataccctaaacgaaataaacctctaaacctaaccgcgaccgataacctcgaaccctcctacacccacgaaatatcgctaaaaaaccaaatccgcgcctaaataacgaatacgatctacgatcgctctcctccgattccgaccaccgacgtccccacgcataaaaccccgacctaaacaaaaaaaattacgataaattctcgccgtcgcgatactcccgaaaacgccctacgaccctaaaaccaaaccccctatactaccgctacgcccctaaaaaccaacgtcctaaaatcctaaaatat

SEQ ID NO: 18861 - DNA, 917 bp, Artificial Sequence
  chemically treated genomic DNA (Homo sapiens) CpG-island No: 18861
tggagtttcgggtttttcgtgcgttcgagtattttcggtttagacgagacggttcgggcgtggttcggcggggatttagaattcgggaggttaggtgcgtttaggttaggcgttggaggttggggcgtcggatggggcggggcggtcgttgagttagggttattttcgcgcgggcgcgcggagtaggttttcgggtcgtggaggattagtcgcgggatttatgggttcgggagtcgtttcgttcggaaaaatcggtcgggttagcgcggcgcgggtatatttcggcgtcgggaagggcggttgcgtcgtataaaaggcgtcgtcgcgttggttatcgtcgttcggagtttagtcgttttgttacgcggggttcgcgggacgaggggacgtcggggttagcgaggacgcggcggggttgggtttggcggttgggattttttagcgttaggcgagggcgtttaaggcgttcggtacggcgtcggggtcgggtggttgtagtagggtagggggtgcgcgattagcggggatttgggcgtaggggtcggttttcgggattcgtaggcgacgcgggcggttttaagggcgtcgggggttttttttttcgtagttcggcgaatcgacggtgttggggattcgcgcgttgggtttagtggtttttaatagtttaatagttttgtagcgtaattgtgaaatgtttaggattattagattcggcgggcgcggcgatagcgacggagcgttttacgcgcggtttggagttagagttatagttaggggtgcgtcggcgattaatttaggggagtttacggatcggtttcgcgttttaggtcggtcgttttatgcgtcgcgtttcgtagtttttagggtttggttggttttatttgttgttagggaagattttcggtcggagagttaag

SEQ ID NO: 18862 - DNA, 917 bp, Artificial Sequence
  chemically treated genomic DNA (Homo sapiens) CpG-island No: 18862
cttaactctccgaccgaaaatcttccctaacaacaaataaaaccaaccaaaccctaaaaactacgaaacgcgacgcataaaacgaccgacctaaaacgcgaaaccgatccgtaaactcccctaaattaatcgccgacgcacccctaactataactctaactccaaaccgcgcgtaaaacgctccgtcgctatcgccgcgcccgccgaatctaataatcctaaacatttcacaattacgctacaaaactattaaactattaaaaaccactaaacccaacgcgcgaatccccaacaccgtcgattcgccgaactacgaaaaaaaaaacccccgacgcccttaaaaccgcccgcgtcgcctacgaatcccgaaaaccgacccctacgcccaaatccccgctaatcgcgcaccccctaccctactacaaccacccgaccccgacgccgtaccgaacgccttaaacgccctcgcctaacgctaaaaaatcccaaccgccaaacccaaccccgccgcgtcctcgctaaccccgacgtcccctcgtcccgcgaaccccgcgtaacaaaacgactaaactccgaacgacgataaccaacgcgacgacgccttttatacgacgcaaccgcccttcccgacgccgaaatatacccgcgccgcgctaacccgaccgatttttccgaacgaaacgactcccgaacccataaatcccgcgactaatcctccacgacccgaaaacctactccgcgcgcccgcgcgaaaataaccctaactcaacgaccgccccgccccatccgacgccccaacctccaacgcctaacctaaacgcacctaacctcccgaattctaaatccccgccgaaccacgcccgaaccgtctcgtctaaaccgaaaatactcgaacgcacgaaaaacccgaaactcca

SEQ ID NO: 18863 - DNA, 917 bp, Artificial Sequence
  chemically treated genomic DNA (Homo sapiens) CpG-island No: 18863
tttggtttttcggtcgagggttttttttggtagtaggtggagttagttaggttttggggattgcggggcgcggcgtatggggcggtcgatttggagcgcggagtcggttcgtgggtttttttggattggtcgtcggcgtatttttgattgtgattttgattttaggtcgcgcgtgggacgtttcgtcgttgtcgtcgcgttcgtcgggtttagtggttttaaatattttataattgcgttatagaattgttgaattgttaagaattattggatttagcgcgcgagtttttaatatcgtcggttcgtcgagttgcggagagaggagttttcgacgtttttgggatcgttcgcgtcgtttgcggatttcggggatcggtttttgcgtttagattttcgttggtcgcgtattttttgttttgttgtagttattcggtttcgacgtcgtatcggacgttttagacgttttcgtttggcgttgggggattttagtcgttaagtttagtttcgtcgcgttttcgttggtttcggcgttttttcgtttcgcgggtttcgcgtggtagggcggttgagtttcgagcggcggtggttagcgcggcggcgttttttatgcggcgtagtcgtttttttcggcgtcggaatgtgttcgcgtcgcgttggttcgatcggttttttcgggcggggcggttttcgggtttataggtttcgcgattgattttttacggttcggggatttgtttcgcgcgttcgcgcgggggtggttttgatttagcggtcgtttcgttttattcggcgttttagtttttagcgtttggtttgggcgtatttggtttttcgggttttgggttttcgtcgggttacgttcgaatcgtttcgtttgggtcgggggtgttcgggcgtacggagggttcggggtttta

SEQ ID NO: 18864 - DNA, 917 bp, Artificial Sequence
  chemically treated genomic DNA (Homo sapiens) CpG-island No: 18864
taaaaccccgaaccctccgtacgcccgaacacccccgacccaaacgaaacgattcgaacgtaacccgacgaaaacccaaaacccgaaaaaccaaatacgcccaaaccaaacgctaaaaactaaaacgccgaataaaacgaaacgaccgctaaatcaaaaccacccccgcgcgaacgcgcgaaacaaatccccgaaccgtaaaaaatcaatcgcgaaacctataaacccgaaaaccgccccgcccgaaaaaaccgatcgaaccaacgcgacgcgaacacattccgacgccgaaaaaaacgactacgccgcataaaaaacgccgccgcgctaaccaccgccgctcgaaactcaaccgccctaccacgcgaaacccgcgaaacgaaaaaacgccgaaaccaacgaaaacgcgacgaaactaaacttaacgactaaaatcccccaacgccaaacgaaaacgtctaaaacgtccgatacgacgtcgaaaccgaataactacaacaaaacaaaaaatacgcgaccaacgaaaatctaaacgcaaaaaccgatccccgaaatccgcaaacgacgcgaacgatcccaaaaacgtcgaaaactcctctctccgcaactcgacgaaccgacgatattaaaaactcgcgcgctaaatccaataattcttaacaattcaacaattctataacgcaattataaaatatttaaaaccactaaacccgacgaacgcgacgacaacgacgaaacgtcccacgcgcgacctaaaatcaaaatcacaatcaaaaatacgccgacgaccaatccaaaaaaacccacgaaccgactccgcgctccaaatcgaccgccccatacgccgcgccccgcaatccccaaaacctaactaactccacctactaccaaaaaaaaccctcgaccgaaaaaccaaa

SEQ ID NO: 18865 - DNA, 720 bp, Artificial Sequence
  chemically treated genomic DNA (Homo sapiens) CpG-island No: 18865
gcgtttcgcgcgtttcgggagaagaggagttgttcgcggggtagcggtgcgaggcgggagtttgttttcggcgtgagaagaagcgagcgggagggaggaagggagggagagagggcgggcggggaggggagagaagaggaggtgaggggattcgttacggttcgtcgggtcggtttcgcgaggtcgtgttggtttgttttcgttttcgatttttgcgtttcgttttttttcgtcgtcggtcgtttagtcgcgtttcgtatttttgggttagtcgcgaatttagttttgttattattattttcgttgagagaggtgcgcgtaggcgtattcgtgtttacgggttgggaaggcggaagtgaagtgaaggtcgagatttcggttcggaatggataatgtttgggtttggattcgttcggtaggaggtcgttcggggttggtggttcgttttgtttttgttggcgttttttttattttagggacggtgttcgttcgtttatatgtattttttgaacgcgagggtcggagattcgtttacgtttcgtgtcggttacgtattttcgtggggcggtcgcggggtcggtttaagttgatagttatggtcgttgttttcgaggcgtttaagcgttttttataaagtttgtaggggaagttgttttcgtcggggtggtagttataattttagtaggtaacgttgaggtttacggaaggaaggggcgaggt

SEQ ID NO: 18866 - DNA, 720 bp, Artificial Sequence
  chemically treated genomic DNA (Homo sapiens) CpG-island No: 18866
acctcgccccttccttccgtaaacctcaacgttacctactaaaattataactaccaccccgacgaaaacaacttcccctacaaactttataaaaaacgcttaaacgcctcgaaaacaacgaccataactatcaacttaaaccgaccccgcgaccgccccacgaaaatacgtaaccgacacgaaacgtaaacgaatctccgaccctcgcgttcaaaaaatacatataaacgaacgaacaccgtccctaaaataaaaaaaacgccaacaaaaacaaaacgaaccaccaaccccgaacgacctcctaccgaacgaatccaaacccaaacattatccattccgaaccgaaatctcgaccttcacttcacttccgccttcccaacccgtaaacacgaatacgcctacgcgcacctctctcaacgaaaataataataacaaaactaaattcgcgactaacccaaaaatacgaaacgcgactaaacgaccgacgacgaaaaaaaacgaaacgcaaaaatcgaaaacgaaaacaaaccaacacgacctcgcgaaaccgacccgacgaaccgtaacgaatcccctcacctcctcttctctcccctccccgcccgccctctctccctcccttcctccctcccgctcgcttcttctcacgccgaaaacaaactcccgcctcgcaccgctaccccgcgaacaactcctcttctcccgaaacgcgcgaaacgc

SEQ ID NO: 18867 - DNA, 720 bp, Artificial Sequence
  chemically treated genomic DNA (Homo sapiens) CpG-island No: 18867
atttcgtttttttttttcgtgggttttaacgttgtttgttgagattgtgattgttatttcgacgggagtagttttttttatagattttgtagagagcgtttaaacgtttcggggatagcggttatgattgttagtttgggtcgatttcgcggtcgttttacgggaatgcgtggtcgatacggggcgtgggcgaattttcgattttcgcgtttagggggtatatataaacgggcggatatcgtttttggggtaagggaggcgttagtaagaataaggcgggttattaatttcgagcgattttttatcggacggatttaaatttaaatattgtttatttcgggtcgaagtttcggtttttattttattttcgtttttttagttcgtgaatacgaatgcgtttgcgcgtattttttttagcggaagtaatagtgataaagttgggttcgcggttggtttaggagtgcggggcgcgattgggcggtcggcggcggggaggggcggagcgtaggagtcggaggcgggagtagattagtacggtttcgcggagtcggttcggcggatcgtgacgggtttttttatttttttttttttttttttttcgttcgttttttttttttttttttttttttttcgttcgtttttttttacgtcgggagtaggttttcgtttcgtatcgttgtttcgcgagtagttttttttttttcgaggcgcgcggggcgt

SEQ ID NO: 18868 - DNA, 720 bp, Artificial Sequence
  chemically treated genomic DNA (Homo sapiens) CpG-island No: 18868
acgccccgcgcgcctcgaaaaaaaaaaaactactcgcgaaacaacgatacgaaacgaaaacctactcccgacgtaaaaaaaaacgaacgaaaaaaaaaaaaaaaaaaaaaaaaaacgaacgaaaaaaaaaaaaaaaaaaaaataaaaaaacccgtcacgatccgccgaaccgactccgcgaaaccgtactaatctactcccgcctccgactcctacgctccgcccctccccgccgccgaccgcccaatcgcgccccgcactcctaaaccaaccgcgaacccaactttatcactattacttccgctaaaaaaaatacgcgcaaacgcattcgtattcacgaactaaaaaaacgaaaataaaataaaaaccgaaacttcgacccgaaataaacaatatttaaatttaaatccgtccgataaaaaatcgctcgaaattaataacccgccttattcttactaacgcctcccttaccccaaaaacgatatccgcccgtttatatataccccctaaacgcgaaaatcgaaaattcgcccacgccccgtatcgaccacgcattcccgtaaaacgaccgcgaaatcgacccaaactaacaatcataaccgctatccccgaaacgtttaaacgctctctacaaaatctataaaaaaaactactcccgtcgaaataacaatcacaatctcaacaaacaacgttaaaacccacgaaaaaaaaaaacgaaat

SEQ ID NO: 18869 - DNA, 575 bp, Artificial Sequence
  chemically treated genomic DNA (Homo sapiens) CpG-island No: 18869
ttggttacgtattttattaatggggttattaaattttcgttaacgtagcgtacggcgtggtggtgtgagcgttgtacgtacgttgggtttacgaaggggtaggcgttttgttttcgtttaatcggaagttagtaagaatttttcgggtcgttatgttttatttttttcgcgtcgcgttacgggtcgtttttttgtagtcgattaatttttttgatttttttgtgcgtattatttaattagagaggtcgaggcggggttttatttgatcgttttaagtcgtcgcgtagtttgcgtttttttcggtataggttgaggttattaaggtatattttgttgggttaggttgggcgggttttcgggatgggtagttttttcgacgagcggcgacgtcgtggttgagtttagaaagttagagttgttggatagttatcgcgggagcgcggagggaagtgggaggtttggacggagtgtgtacgtgttggtagtttcgtttcgtcgtcggagttattaggttaaatttgtgttggttttggttaaagaaatttttgcgggttaggttgttgttgtcggtgtag

SEQ ID NO: 18870 - DNA, 575 bp, Artificial Sequence
  chemically treated genomic DNA (Homo sapiens) CpG-island No: 18870
ctacaccgacaacaacaacctaacccgcaaaaatttctttaaccaaaaccaacacaaatttaacctaataactccgacgacgaaacgaaactaccaacacgtacacactccgtccaaacctcccacttccctccgcgctcccgcgataactatccaacaactctaactttctaaactcaaccacgacgtcgccgctcgtcgaaaaaactacccatcccgaaaacccgcccaacctaacccaacaaaatataccttaataacctcaacctataccgaaaaaaacgcaaactacgcgacgacttaaaacgatcaaataaaaccccgcctcgacctctctaattaaataatacgcacaaaaaaatcaaaaaaattaatcgactacaaaaaaacgacccgtaacgcgacgcgaaaaaaataaaacataacgacccgaaaaattcttactaacttccgattaaacgaaaacaaaacgcctaccccttcgtaaacccaacgtacgtacaacgctcacaccaccacgccgtacgctacgttaacgaaaatttaataaccccattaataaaatacgtaaccaa

SEQ ID NO: 18871 - DNA, 575 bp, Artificial Sequence
  chemically treated genomic DNA (Homo sapiens) CpG-island No: 18871
ttgtatcggtaatagtagtttgattcgtagaagtttttttggttagggttagtataggtttgatttggtggtttcgacggcggagcgagattgttaatacgtgtatatttcgtttagattttttattttttttcgcgttttcgcgatagttgtttagtaattttagttttttagatttaattacggcgtcgtcgttcgtcgagagggttgtttatttcggggattcgtttagtttggtttagtaaaatgtattttagtagttttaatttgtatcggagaaaacgtaggttgcgcggcggtttagagcggttaagtggaatttcgtttcgatttttttgattgggtaatgcgtataagaaaattaagaggattggtcggttgtagagaggcggttcgtaacgcgacgcgaaagaagtggggtatagcggttcggggaatttttgttagttttcgattggacgaaagtagaacgtttgttttttcgtagatttagcgtacgtataacgtttatattattacgtcgtacgttgcgttagcggaagtttaatggttttattggtgggatgcgtggttaa

SEQ ID NO: 18872 - DNA, 575 bp, Artificial Sequence
  chemically treated genomic DNA (Homo sapiens) CpG-island No: 18872
ttaaccacgcatcccaccaataaaaccattaaacttccgctaacgcaacgtacgacgtaataatataaacgttatacgtacgctaaatctacgaaaaaacaaacgttctactttcgtccaatcgaaaactaacaaaaattccccgaaccgctataccccacttctttcgcgtcgcgttacgaaccgcctctctacaaccgaccaatcctcttaattttcttatacgcattacccaatcaaaaaaatcgaaacgaaattccacttaaccgctctaaaccgccgcgcaacctacgttttctccgatacaaattaaaactactaaaatacattttactaaaccaaactaaacgaatccccgaaataaacaaccctctcgacgaacgacgacgccgtaattaaatctaaaaaactaaaattactaaacaactatcgcgaaaacgcgaaaaaaaataaaaaatctaaacgaaatatacacgtattaacaatctcgctccgccgtcgaaaccaccaaatcaaacctatactaaccctaaccaaaaaaacttctacgaatcaaactactattaccgatacaa

SEQ ID NO: 18873 - DNA, 942 bp, Artificial Sequence
  chemically treated genomic DNA (Homo sapiens) CpG-island No: 18873
gattttaggtgggtattgttggcgttcggttgttaatttatagtttacgtttttataggtgcgcgtttagagttacgcgtttagtatcgttcggttggtcgggaagaggcgatcgggttcgtggttcgagtttcgtattttcggtttttttttgggtttcggggtaatagtttttttcgggtcgtataggtcgtattgagggcgttatttcggggttttcgaattttcgggttttcggcggggacgaggcgtagggacgggggtattttcggttcgcggggttcgggtcgttcgttcgttcgattcgtttatttggttgtcgttgacgtagaagacgcggtcgttacggtttaggtatacgcgggcgttcgggggtttcgcggtcgcgtcgtagaaggtgaaggaatagcgcgaggtacgtagtcgtcgtatcgtggcgcgtacgagtttagtcggtcggcgattttagcgcgtttataggtataggtagtatagcgtgatgagtatggtcgcgtcgtcggtagggcgagttcgttttgttcgttcgttttagcgttttaggttcggtttcgtttcggtcggaagggtcgcgtcgttttttcgggttaggcggcgcgggggtggggacggcgggggaggcggggattcggaaggtgacgcgggtaattggaggttgcggcgggaggggcgggggggggtgaggtcgcgttcggttgtgtgatggggagtttcggaggtcgcgtttagggttggtggcggcggcgaggggtagcgttggggcggggggtgtgtatcggggttaggggacgtcggggttgtattcggagagggggttcgagggagtggaggtcggggtgcggggtcgcgttagggttgaggagtgggatgggtatgttgtggatgcgggggaggggaggttttagtggttgttcgatttgttta

SEQ ID NO: 18874 - DNA, 942 bp, Artificial Sequence
  chemically treated genomic DNA (Homo sapiens) CpG-island No: 18874
taaacaaatcgaacaaccactaaaacctcccctcccccgcatccacaacatacccatcccactcctcaaccctaacgcgaccccgcaccccgacctccactccctcgaaccccctctccgaatacaaccccgacgtcccctaaccccgatacacaccccccgccccaacgctacccctcgccgccgccaccaaccctaaacgcgacctccgaaactccccatcacacaaccgaacgcgacctcacccccccccgcccctcccgccgcaacctccaattacccgcgtcaccttccgaatccccgcctcccccgccgtccccacccccgcgccgcctaacccgaaaaaacgacgcgacccttccgaccgaaacgaaaccgaacctaaaacgctaaaacgaacgaacaaaacgaactcgccctaccgacgacgcgaccatactcatcacgctatactacctatacctataaacgcgctaaaatcgccgaccgactaaactcgtacgcgccacgatacgacgactacgtacctcgcgctattccttcaccttctacgacgcgaccgcgaaacccccgaacgcccgcgtatacctaaaccgtaacgaccgcgtcttctacgtcaacgacaaccaaataaacgaatcgaacgaacgaacgacccgaaccccgcgaaccgaaaatacccccgtccctacgcctcgtccccgccgaaaacccgaaaattcgaaaaccccgaaataacgccctcaatacgacctatacgacccgaaaaaaactattaccccgaaacccaaaaaaaaaccgaaaatacgaaactcgaaccacgaacccgatcgcctcttcccgaccaaccgaacgatactaaacgcgtaactctaaacgcgcacctataaaaacgtaaactataaattaacaaccgaacgccaacaatacccacctaaaatc

SEQ ID NO: 18875 - DNA, 942 bp, Artificial Sequence
  chemically treated genomic DNA (Homo sapiens) CpG-island No: 18875
taaataggtcgggtagttattggagttttttttttttcgtatttataatatatttattttattttttagttttggcgcggtttcgtatttcggtttttattttttcgagtttttttttcgggtgtagtttcggcgttttttgatttcggtgtatatttttcgttttagcgttgtttttcgtcgtcgttattagttttgggcgcggttttcggagttttttattatatagtcgggcgcggttttattttttttcgtttttttcgtcgtagtttttagttgttcgcgttatttttcgggttttcgtttttttcgtcgtttttattttcgcgtcgtttggttcgggggggcggcgcggttttttcggtcggggcggggtcgggtttggggcgttggggcgggcgggtaaggcgggttcgttttgtcggcggcgcggttatgtttattacgttgtgttatttgtatttgtgggcgcgttggggtcgtcggtcggttgagttcgtgcgcgttacggtgcggcggttgcgtgtttcgcgttgtttttttattttttgcggcgcggtcgcggagttttcgggcgttcgcgtgtgtttgagtcgtggcggtcgcgttttttgcgttagcgatagttaggtgggcgggtcgggcgggcgggcgattcgggtttcgcgagtcggaagtgttttcgtttttgcgtttcgttttcgtcgggagttcgggagttcgggagtttcggagtggcgtttttagtgcggtttgtgcggttcgggaggggttgttgtttcggggtttagagagaggtcggaggtgcgggattcggattacggattcggtcgttttttttcggttagtcgggcggtgttggacgcgtgattttaggcgcgtatttgtgaggacgtgagttgtggattgatagtcggacgttagtagtgtttatttggggtt

SEQ ID NO: 18876 - DNA, 942 bp, Artificial Sequence
  chemically treated genomic DNA (Homo sapiens) CpG-island No: 18876
aaccccaaataaacactactaacgtccgactatcaatccacaactcacgtcctcacaaatacgcgcctaaaatcacgcgtccaacaccgcccgactaaccgaaaaaaaacgaccgaatccgtaatccgaatcccgcacctccgacctctctctaaaccccgaaacaacaacccctcccgaaccgcacaaaccgcactaaaaacgccactccgaaactcccgaactcccgaactcccgacgaaaacgaaacgcaaaaacgaaaacacttccgactcgcgaaacccgaatcgcccgcccgcccgacccgcccacctaactatcgctaacgcaaaaaacgcgaccgccacgactcaaacacacgcgaacgcccgaaaactccgcgaccgcgccgcaaaaaataaaaaaacaacgcgaaacacgcaaccgccgcaccgtaacgcgcacgaactcaaccgaccgacgaccccaacgcgcccacaaatacaaataacacaacgtaataaacataaccgcgccgccgacaaaacgaacccgccttacccgcccgccccaacgccccaaacccgaccccgccccgaccgaaaaaaccgcgccgcccccccgaaccaaacgacgcgaaaataaaaacgacgaaaaaaacgaaaacccgaaaaataacgcgaacaactaaaaactacgacgaaaaaaacgaaaaaaaataaaaccgcgcccgactatataataaaaaactccgaaaaccgcgcccaaaactaataacgacgacgaaaaacaacgctaaaacgaaaaatatacaccgaaatcaaaaaacgccgaaactacacccgaaaaaaaaactcgaaaaaataaaaaccgaaatacgaaaccgcgccaaaactaaaaaataaaataaatatattataaatacgaaaaaaaaaaaactccaataactacccgacctattta

SEQ ID NO: 18877 - DNA, 849 bp, Artificial Sequence
  chemically treated genomic DNA (Homo sapiens) CpG-island No: 18877
gcgagtaggttttgcggttttgtttttaatatgggcgcggggtacgcggttaggggtcgtgggagggggatagggcgcgcgaatttaggtttttaggtcgcgtcgtcgcgcgtgcgtattgatagtcgggtcgagttagttcgggtttcgtagggaagaacgttagcggcgcgcggagtcgcgttgtttgggtcgcgaggtttttatggttgttttatcggaagtttcgtttttttttggtagttggaggcggtttttcggtcgtttcggttgtagtttcgaggtttcgatttaggagacggttgttttttggtagaggttcgcggtggattgtttgattttcgttcggttttagtacgttttcggcgaacgtttatttttgtttcggttcgtagcgtttcgatttatttttgaggtcgaaacgcggtcgtttttgcgtcgggtggtcgttcgcgaatttttgtcgcgtcgcgttgcgttttttcgtggttcgtttggtggtgtaattgggttttttgcgtagggtcgcggggtcgtttggtttttttttgttttggtcgcggtgtcgcgcgttcgggaacgcgggtttttcgtcgttagttagttttttttttcggttatttgttttttttcgtttacgttgtttgggaggcgcgtttttgtcgtttttttgatcgcgttcgttttagtttcgtttatttttgcggttttatagggtcgaattttattttgttttgcggaaggtaggtttatatttttttttcgcgtttttttttttgatcggtattaaatattacgttgttttttttagtatcgacgatttattttttagttttttgatattagttg

SEQ ID NO: 18878 - DNA, 849 bp, Artificial Sequence
  chemically treated genomic DNA (Homo sapiens) CpG-island No: 18878
caactaatatcaaaaaactaaaaaataaatcgtcgatactaaaaaaaacaacgtaatatttaataccgatcaaaaaaaaaaacgcgaaaaaaaaatataaacctaccttccgcaaaacaaaataaaattcgaccctataaaaccgcaaaaataaacgaaactaaaacgaacgcgatcaaaaaaacgacaaaaacgcgcctcccaaacaacgtaaacgaaaaaaaacaaataaccgaaaaaaaaaactaactaacgacgaaaaacccgcgttcccgaacgcgcgacaccgcgaccaaaacaaaaaaaaaccaaacgaccccgcgaccctacgcaaaaaacccaattacaccaccaaacgaaccacgaaaaaacgcaacgcgacgcgacaaaaattcgcgaacgaccacccgacgcaaaaacgaccgcgtttcgacctcaaaaataaatcgaaacgctacgaaccgaaacaaaaataaacgttcgccgaaaacgtactaaaaccgaacgaaaatcaaacaatccaccgcgaacctctaccaaaaaacaaccgtctcctaaatcgaaacctcgaaactacaaccgaaacgaccgaaaaaccgcctccaactaccaaaaaaaaacgaaacttccgataaaacaaccataaaaacctcgcgacccaaacaacgcgactccgcgcgccgctaacgttcttccctacgaaacccgaactaactcgacccgactatcaatacgcacgcgcgacgacgcgacctaaaaacctaaattcgcgcgccctatccccctcccacgacccctaaccgcgtaccccgcgcccatattaaaaacaaaaccgcaaaacctactcgc

SEQ ID NO: 18879 - DNA, 849 bp, Artificial Sequence
  chemically treated genomic DNA (Homo sapiens) CpG-island No: 18879
tagttggtgttagagaattggggaataggtcgtcgatgttggaaagggtaacgtggtgtttggtgtcggttagggaggaaggcgcggagggaaggtgtaggtttgtttttcgtagggtagggtgaggttcggttttgtaaggtcgtaggagtgggcgaggttagagcgagcgcggttaagaaggcggtagaagcgcgttttttaggtagcgtgggcgagagaggataggtggtcgagaggagaagttggttagcggcgaaaggttcgcgttttcgagcgcgcggtatcgcggttagggtaggaggaggttaggcggtttcgcggttttgcgtagagagtttagttgtattattaggcgggttacgagagggcgtagcgcggcgcggtagggattcgcgggcgattattcggcgtaggagcggtcgcgtttcggttttagaagtaagtcggggcgttgcgggtcgggataggggtgggcgttcgtcgggggcgtgttggggtcgggcgagggttaggtagtttatcgcgagtttttgttagggaatagtcgttttttgagtcgaggtttcggggttgtagtcgggacggtcggaaagtcgtttttagttgttagaagggggcggggttttcggtggggtagttatagggatttcgcggtttaggtagcgcggtttcgcgcgtcgttggcgtttttttttgcgggattcgggttggttcggttcggttgttagtgcgtacgcgcggcgacgcggtttgagaatttgggttcgcgcgttttgttttttttttacggtttttggtcgcgtgtttcgcgtttatgttaggggtagagtcgtagggtttattcgt

SEQ ID NO: 18880 - DNA, 849 bp, Artificial Sequence
  chemically treated genomic DNA (Homo sapiens) CpG-island No: 18880
acgaataaaccctacgactctacccctaacataaacgcgaaacacgcgaccaaaaaccgtaaaaaaaaaacaaaacgcgcgaacccaaattctcaaaccgcgtcgccgcgcgtacgcactaacaaccgaaccgaaccaacccgaatcccgcaaaaaaaaacgccaacgacgcgcgaaaccgcgctacctaaaccgcgaaatccctataactaccccaccgaaaaccccgcccccttctaacaactaaaaacgactttccgaccgtcccgactacaaccccgaaacctcgactcaaaaaacgactattccctaacaaaaactcgcgataaactacctaaccctcgcccgaccccaacacgcccccgacgaacgcccacccctatcccgacccgcaacgccccgacttacttctaaaaccgaaacgcgaccgctcctacgccgaataatcgcccgcgaatccctaccgcgccgcgctacgccctctcgtaacccgcctaataatacaactaaactctctacgcaaaaccgcgaaaccgcctaacctcctcctaccctaaccgcgataccgcgcgctcgaaaacgcgaacctttcgccgctaaccaacttctcctctcgaccacctatcctctctcgcccacgctacctaaaaaacgcgcttctaccgccttcttaaccgcgctcgctctaacctcgcccactcctacgaccttacaaaaccgaacctcaccctaccctacgaaaaacaaacctacaccttccctccgcgccttcctccctaaccgacaccaaacaccacgttaccctttccaacatcgacgacctattccccaattctctaacaccaacta

SEQ ID NO: 18881 - DNA, 693 bp, Artificial Sequence
  chemically treated genomic DNA (Homo sapiens) CpG-island No: 18881
ggcgttatttttttgagtttttttcgttttttttttattttcggttttttggttttttttcggaatttttttggtttttttcgttttttcgattcgggtttttttttcgtattttgcggtttttttcgtattttttacggagtttttcgggttttgtttttttttagcgtttgttcgcgtcgtttcgttttcgtttttaaatttggcgcgcgggtaggtgagcgcgttagttcgagtggatttaggcgcgttcgtaggtcggcgtcgtagtaaggggcgcgggtttcgtcggtattatggagttcgaagcggcggtcggagttcggaaggcgcgggggcgcggttgttattgtttcggggacgttttttggaggttttcgttatcgcgcgggtcggagaggtgagggtggtttcgcgtttcggtggacgcgttgagaggcgtgcgcggtggcggtgcggggagcgtagcgagcgggaggttggggcgttgttgaattttcgatttttagcggagtttcggagttcgacggcgacgttaagtaagtttttgagtcggtagtcgggttttcgggaggggcgtttagtttttcggttttaacgtatagttttgaagtgcggaggtttaggatgtagttggttaggaaaggggtcgacgttttcgtgtagaggagattttagttagttagtcgggga

SEQ ID NO: 18882 - DNA, 693 bp, Artificial Sequence
  chemically treated genomic DNA (Homo sapiens) CpG-island No: 18882
tccccgactaactaactaaaatctcctctacacgaaaacgtcgacccctttcctaaccaactacatcctaaacctccgcacttcaaaactatacgttaaaaccgaaaaactaaacgcccctcccgaaaacccgactaccgactcaaaaacttacttaacgtcgccgtcgaactccgaaactccgctaaaaatcgaaaattcaacaacgccccaacctcccgctcgctacgctccccgcaccgccaccgcgcacgcctctcaacgcgtccaccgaaacgcgaaaccaccctcacctctccgacccgcgcgataacgaaaacctccaaaaaacgtccccgaaacaataacaaccgcgcccccgcgccttccgaactccgaccgccgcttcgaactccataataccgacgaaacccgcgccccttactacgacgccgacctacgaacgcgcctaaatccactcgaactaacgcgctcacctacccgcgcgccaaatttaaaaacgaaaacgaaacgacgcgaacaaacgctaaaaaaaaacaaaacccgaaaaactccgtaaaaaatacgaaaaaaaccgcaaaatacgaaaaaaaaacccgaatcgaaaaaacgaaaaaaaccaaaaaaattccgaaaaaaaaccaaaaaaccgaaaataaaaaaaaaacgaaaaaaactcaaaaaaataacgcc

SEQ ID NO: 18883 - DNA, 693 bp, Artificial Sequence
  chemically treated genomic DNA (Homo sapiens) CpG-island No: 18883
ttttcggttggttaattgagattttttttatacggaagcgtcggttttttttttggttagttatattttgggttttcgtattttagagttgtgcgttggaatcggagaattgagcgtttttttcgggaattcggttgtcggtttaggagtttgtttggcgtcgtcgtcgagtttcggagtttcgttggggatcgggggtttagtagcgttttagtttttcgttcgttgcgtttttcgtatcgttatcgcgtacgttttttagcgcgtttatcggggcgcggggttatttttattttttcggttcgcgcggtggcggaggtttttagggagcgttttcggggtagtgatagtcgcgttttcgcgtttttcgggtttcggtcgtcgtttcgggttttatggtgtcggcggagttcgcgttttttgttgcggcgtcggtttacgagcgcgtttagatttattcgggttaacgcgtttatttattcgcgcgttaggtttaaaaacgggggcggggcggcgcgggtaagcgttgggagggggtaggattcgaggagtttcgtgaggggtgcggagggggtcgtagggtacgaaggaaaagttcgggtcggaggagcggaggggattagagaagtttcgggaggggattagggagtcggggatggggaggagacgagaaaagtttaaggaggtggcgtt

SEQ ID NO: 18884 - DNA, 693 bp, Artificial Sequence
  chemically treated genomic DNA (Homo sapiens) CpG-island No: 18884
aacgccacctccttaaacttttctcgtctcctccccatccccgactccctaatcccctcccgaaacttctctaatcccctccgctcctccgacccgaacttttccttcgtaccctacgaccccctccgcacccctcacgaaactcctcgaatcctaccccctcccaacgcttacccgcgccgccccgcccccgtttttaaacctaacgcgcgaataaataaacgcgttaacccgaataaatctaaacgcgctcgtaaaccgacgccgcaacaaaaaacgcgaactccgccgacaccataaaacccgaaacgacgaccgaaacccgaaaaacgcgaaaacgcgactatcactaccccgaaaacgctccctaaaaacctccgccaccgcgcgaaccgaaaaaataaaaataaccccgcgccccgataaacgcgctaaaaaacgtacgcgataacgatacgaaaaacgcaacgaacgaaaaactaaaacgctactaaacccccgatccccaacgaaactccgaaactcgacgacgacgccaaacaaactcctaaaccgacaaccgaattcccgaaaaaaacgctcaattctccgattccaacgcacaactctaaaatacgaaaacccaaaatataactaaccaaaaaaaaaaccgacgcttccgtataaaaaaaatctcaattaaccaaccgaaaa

SEQ ID NO: 18885 - DNA, 651 bp, Artificial Sequence
  chemically treated genomic DNA (Homo sapiens) CpG-island No: 18885
ggttcgcgcggcgtttattagtatgcgggtttattaggtcgcggcgtttaggtttcgggttttgtttattcgtggagatttttattttttattcgaggcggggtatgggggggttttcgatttcgggttttttatacgtttatttaggtttttttcgatatttcggttattttagcgttgagtttttcgcgtaagcgtcgattggggagtcgtagtggggaagaggaaaatttgagggaaaggtttaggcgcgacggtaatttttattttggcgtaggcgtataacgatttttttcgggtgggagttagcgagcgcgggggcgggcgtgatttcgcggttcgcgacggcgaaggagggggcggtggggtgcgattgcgtacgcgcgttgttagtttacgtgacgtatttcgttttaacgtcgttattcgttttttttcgtcgtcggttgacgtggagggtcggaggtggcggcggcggcggcggcggttgttgttgttgttgttcgcgttcgaggttcgcgggcggcgggttcgggtgagtgtatattcggcgcgttgtcgggttttcggatgtgttattttgtttcgttgtagtcgagatgtcgggggagcggggttttttatatttttttcgtgggtgtgtggtgagtg

SEQ ID NO: 18886 - DNA, 651 bp, Artificial Sequence
  chemically treated genomic DNA (Homo sapiens) CpG-island No: 18886
cactcaccacacacccacgaaaaaaatataaaaaaccccgctcccccgacatctcgactacaacgaaacaaaataacacatccgaaaacccgacaacgcgccgaatatacactcacccgaacccgccgcccgcgaacctcgaacgcgaacaacaacaacaacaaccgccgccgccgccgccgccacctccgaccctccacgtcaaccgacgacgaaaaaaaacgaataacgacgttaaaacgaaatacgtcacgtaaactaacaacgcgcgtacgcaatcgcaccccaccgccccctccttcgccgtcgcgaaccgcgaaatcacgcccgcccccgcgctcgctaactcccacccgaaaaaaatcgttatacgcctacgccaaaataaaaattaccgtcgcgcctaaacctttccctcaaattttcctcttccccactacgactccccaatcgacgcttacgcgaaaaactcaacgctaaaataaccgaaatatcgaaaaaaacctaaataaacgtataaaaaacccgaaatcgaaaacccccccataccccgcctcgaataaaaaataaaaatctccacgaataaacaaaacccgaaacctaaacgccgcgacctaataaacccgcatactaataaacgccgcgcgaacc

SEQ ID NO: 18887 - DNA, 651 bp, Artificial Sequence
  chemically treated genomic DNA (Homo sapiens) CpG-island No: 18887
tatttattatatatttacggagggggtgtggaaggtttcgttttttcggtatttcggttgtagcgggataaggtgatatattcgggagttcggtagcgcgtcgggtgtgtatttattcgggttcgtcgttcgcgagtttcggacgcgggtagtagtagtagtagtcgtcgtcgtcgtcgtcgttattttcggttttttacgttagtcgacggcgggagggagcgggtggcggcgttgaagcgaggtgcgttacgtgggttggtagcgcgcgtgcgtagtcgtattttatcgttttttttttcgtcgtcgcgagtcgcgggattacgttcgttttcgcgttcgttggtttttattcggggagggtcgttgtgcgtttgcgttagggtgggggttgtcgtcgcgtttaggttttttttttaggttttttttttttttattgcggttttttagtcggcgtttgcgcggagaatttagcgttgaggtggtcgaggtgtcgggaggggtttgggtgggcgtatgaaggattcgaggtcgagggtttttttatatttcgtttcgaatgagaaatagaagtttttacgaatgggtagggttcggggtttgggcgtcgcgatttagtaggttcgtatgttggtgggcgtcgcgcgagtt

SEQ ID NO: 18888 - DNA, 651 bp, Artificial Sequence
  chemically treated genomic DNA (Homo sapiens) CpG-island No: 18888
aactcgcgcgacgcccaccaacatacgaacctactaaatcgcgacgcccaaaccccgaaccctacccattcgtaaaaacttctatttctcattcgaaacgaaatataaaaaaaccctcgacctcgaatccttcatacgcccacccaaacccctcccgacacctcgaccacctcaacgctaaattctccgcgcaaacgccgactaaaaaaccgcaataaaaaaaaaaaaaacctaaaaaaaaaacctaaacgcgacgacaacccccaccctaacgcaaacgcacaacgaccctccccgaataaaaaccaacgaacgcgaaaacgaacgtaatcccgcgactcgcgacgacgaaaaaaaaaacgataaaatacgactacgcacgcgcgctaccaacccacgtaacgcacctcgcttcaacgccgccacccgctccctcccgccgtcgactaacgtaaaaaaccgaaaataacgacgacgacgacgacgactactactactactacccgcgtccgaaactcgcgaacgacgaacccgaataaatacacacccgacgcgctaccgaactcccgaatatatcaccttatcccgctacaaccgaaataccgaaaaaacgaaaccttccacaccccctccgtaaatatataataaata

SEQ ID NO: 18889 - DNA, 876 bp, Artificial Sequence
  chemically treated genomic DNA (Homo sapiens) CpG-island No: 18889
gcggtgaggcgcgaacgtcgcgaagtttatagttaaagtttcgttgataaattaagagatgatttcgtatttaaaattttttcgaataggaacgcgttagaggtcggaagttacgttacgtgattagttttttttcgcggttatttttagcgaggtagtaggtatcgtttttgttatattttttagtttttaaagcgcgggattaggcggaaacgtgcgataggaggcggttttatttagttttggattggagtgttagtagaattttcgttttttttagtaacgttttgtaagttttttatcgtaaagaattgtcgtagattttcgtttgggtgttaattacgtgattacgcgagcgttggagaggcgtaggttcgattttattattttatttttcgggtttcgttagtttagtattcgttacggcgcgtgataacgcggttcgtcggcggttttcgtttcggcgcgtttgcgtacgcggttttcgcggtgtttcgcgtttattttcgtttatttttgttttcgtttttttcgtttttttttttttttttattttgtttttcggcggcggcggcggcggcggtggtggttcgcgtacgttgttggttcgttatataaaggagagaagcgggcggatcggacggttggagttgtagtcggtggcggtagcggcggcgtagggagcggtgatcggtggtggtttttttttttggcgcggggtggggagcgggtaacgtttttcggatttttgaagggtcgtggttttttttttttttttaaggcgattttcgaggtttttagttgcgggaggagtgtttttttttttttttttttttcgtttttttttatttttttaggattgattttgtttaaaat

SEQ ID NO: 18890 - DNA, 876 bp, Artificial Sequence
  chemically treated genomic DNA (Homo sapiens) CpG-island No: 18890
attttaaacaaaatcaatcctaaaaaaataaaaaaaaacgaaaaaaaaaaaaaaaaaaaaacactcctcccgcaactaaaaacctcgaaaatcgccttaaaaaaaaaaaaaaaaccacgacccttcaaaaatccgaaaaacgttacccgctccccaccccgcgccaaaaaaaaaaaccaccaccgatcaccgctccctacgccgccgctaccgccaccgactacaactccaaccgtccgatccgcccgcttctctcctttatataacgaaccaacaacgtacgcgaaccaccaccgccgccgccgccgccgccgaaaaacaaaataaaaaaaaaaaaaaaaacgaaaaaaacgaaaacaaaaataaacgaaaataaacgcgaaacaccgcgaaaaccgcgtacgcaaacgcgccgaaacgaaaaccgccgacgaaccgcgttatcacgcgccgtaacgaatactaaactaacgaaacccgaaaaataaaataataaaatcgaacctacgcctctccaacgctcgcgtaatcacgtaattaacacccaaacgaaaatctacgacaattctttacgataaaaaacttacaaaacgttactaaaaaaaacgaaaattctactaacactccaatccaaaactaaataaaaccgcctcctatcgcacgtttccgcctaatcccgcgctttaaaaactaaaaaatataacaaaaacgatacctactacctcgctaaaaataaccgcgaaaaaaaactaatcacgtaacgtaacttccgacctctaacgcgttcctattcgaaaaaattttaaatacgaaatcatctcttaatttatcaacgaaactttaactataaacttcgcgacgttcgcgcctcaccgc

SEQ ID NO: 18891 - DNA, 876 bp, Artificial Sequence
  chemically treated genomic DNA (Homo sapiens) CpG-island No: 18891
attttaaataaaattaattttgaaggagtaggggagagcggagagaggaggaggaggggggtatttttttcgtagttgaaaatttcgagaatcgttttaaaaaaaaaaaaaaagttacgattttttaggggttcggggggcgttgttcgttttttatttcgcgttaaggagggaaattattatcggttatcgttttttgcgtcgtcgttgtcgttatcggttgtagttttagtcgttcggttcgttcgttttttttttttatatagcgagttaataacgtgcgcgagttattatcgtcgtcgtcgtcgtcgtcgagagatagggtgaagggggagggaggggcggaaagggcgggggtagaggtgggcggaaatgagcgcgagatatcgcgagagtcgcgtgcgtaggcgcgtcggggcggaggtcgtcggcgagtcgcgttgttacgcgtcgtggcgggtattggattggcggagttcggggagtgaagtagtgaaatcggatttacgtttttttaacgttcgcgtgattacgtggttggtatttaggcggaagtttgcggtagttttttgcggtgaagaatttgtaaagcgttgttggaaaagacgggagttttattgatattttagtttaaagttaggtgggatcgttttttgtcgtacgttttcgtttggtttcgcgttttaggagttaggaaatgtgatagaggcggtgtttattgtttcgttaggaatggtcgcggaggaggattggttacgtggcgtggttttcggtttttggcgcgtttttattcgggaaggttttaaatgcggagttattttttgatttgttagcgaggttttgattgtgagtttcgcggcgttcgcgttttatcgt

SEQ ID NO: 18892 - DNA, 876 bp, Artificial Sequence
  chemically treated genomic DNA (Homo sapiens) CpG-island No: 18892
acgataaaacgcgaacgccgcgaaactcacaatcaaaacctcgctaacaaatcaaaaaataactccgcatttaaaaccttcccgaataaaaacgcgccaaaaaccgaaaaccacgccacgtaaccaatcctcctccgcgaccattcctaacgaaacaataaacaccgcctctatcacatttcctaactcctaaaacgcgaaaccaaacgaaaacgtacgacaaaaaacgatcccacctaactttaaactaaaatatcaataaaactcccgtcttttccaacaacgctttacaaattcttcaccgcaaaaaactaccgcaaacttccgcctaaataccaaccacgtaatcacgcgaacgttaaaaaaacgtaaatccgatttcactacttcactccccgaactccgccaatccaatacccgccacgacgcgtaacaacgcgactcgccgacgacctccgccccgacgcgcctacgcacgcgactctcgcgatatctcgcgctcatttccgcccacctctacccccgccctttccgcccctccctcccccttcaccctatctctcgacgacgacgacgacgacgataataactcgcgcacgttattaactcgctatataaaaaaaaaaaacgaacgaaccgaacgactaaaactacaaccgataacgacaacgacgacgcaaaaaacgataaccgataataatttccctccttaacgcgaaataaaaaacgaacaacgccccccgaacccctaaaaaatcgtaactttttttttttttttaaaacgattctcgaaattttcaactacgaaaaaaatacccccctcctcctcctctctccgctctcccctactccttcaaaattaattttatttaaaat

SEQ ID NO: 18893 - DNA, 822 bp, Artificial Sequence
  chemically treated genomic DNA (Homo sapiens) CpG-island No: 18893
gtagatgcggcggcggcgtttgttttggggttttttcgtagggtagttagtttcgcgcgggaagtatttggcggggacgtatttggcgggaacgtatttattttggcggagacgtatttggcgggatagttttgtttcgtttagggacgcgggacgtgcgtagagcgatggagatagcggaatttgtagattcgtttaattttatttttatttttatttttagtttttatttatttcggcgtgataaattttattcgtttttttaattttgatgtttagggcggtttttatttttaatttttcgtagtagtcgttattttcggttgcgcgtgattttagggaaataaggggcgttttttcgtttcgttttgggtttcgtttttttttttttttgtcggtagtggtttacgtgatttcgtagcggcgtcgtatatattttttagtttcgaggggcgaatgtttacgttttttttttttcggtataagagtcggttttagtgcgggtcgaagcgttgttacggtttatttcgttttttttgggcgtgaaagacggggttaagttagttttatttttttcgtagggatagttttacgtcggaaatgtttttttgttgttcgggttagcggagggagggaggaacggtttttttcgcgtgtttcgcggttggaggcggagtcgagtttgtttgtcggttgtagtttgcgtaggaaggatgacgttttcgttaggttgtgcggcgtagacggtcgtttaatggagttgttttttaggaggttttaatttggtaatgtttgttttttttaaatgtttttagttttttt

SEQ ID NO: 18894 - DNA, 822 bp, Artificial Sequence
  chemically treated genomic DNA (Homo sapiens) CpG-island No: 18894
aaaaaaactaaaaacatttaaaaaaaacaaacattaccaaattaaaacctcctaaaaaacaactccattaaacgaccgtctacgccgcacaacctaacgaaaacgtcatccttcctacgcaaactacaaccgacaaacaaactcgactccgcctccaaccgcgaaacacgcgaaaaaaaccgttcctccctccctccgctaacccgaacaacaaaaaaacatttccgacgtaaaactatccctacgaaaaaaataaaactaacttaaccccgtctttcacgcccaaaaaaaacgaaataaaccgtaacaacgcttcgacccgcactaaaaccgactcttataccgaaaaaaaaaaaacgtaaacattcgcccctcgaaactaaaaaatatatacgacgccgctacgaaatcacgtaaaccactaccgacaaaaaaaaaaaaaaacgaaacccaaaacgaaacgaaaaaacgccccttatttccctaaaatcacgcgcaaccgaaaataacgactactacgaaaaattaaaaataaaaaccgccctaaacatcaaaattaaaaaaacgaataaaatttatcacgccgaaataaataaaaactaaaaataaaaataaaaataaaattaaacgaatctacaaattccgctatctccatcgctctacgcacgtcccgcgtccctaaacgaaacaaaactatcccgccaaatacgtctccgccaaaataaatacgttcccgccaaatacgtccccgccaaatacttcccgcgcgaaactaactaccctacgaaaaaaccccaaaacaaacgccgccgccgcatctac

SEQ ID NO: 18895 - DNA, 822 bp, Artificial Sequence
  chemically treated genomic DNA (Homo sapiens) CpG-island No: 18895
gaggagattaaggatatttgaggagggtaggtattattaagttaaaattttttgaaagataattttattgggcgatcgtttgcgtcgtatagtttgacgggagcgttattttttttgcgtaggttgtaatcgatagataggttcggtttcgtttttagtcgcggggtacgcggggagagtcgttttttttttttttcgttaattcggatagtaaaggagtattttcggcgtaagattgtttttacggaaggggtggggttagtttggtttcgttttttacgtttagagggggcggggtgaatcgtgatagcgtttcggttcgtattaaggtcggtttttgtgtcggaaggaggaaggcgtgggtattcgtttttcggagttagggagtgtgtgcgacgtcgttgcgaggttacgtgagttattgtcggtagagagggaaaggggcggggtttagaacgaagcggggaggcgttttttgtttttttggggttacgcgtagtcggaagtggcggttgttgcggagaattggagatggggatcgttttggatattaagattaaaagagcgaataaagtttattacgtcggggtaagtgggggttgggggtggggatggaggtggggttgggcgggtttgtaggtttcgttgtttttatcgttttgcgtacgtttcgcgtttttaggcggggtagggttgtttcgttaggtgcgttttcgttaaggtgggtgcgttttcgttaggtgcgttttcgttaggtgtttttcgcgcgaggttggttgttttgcgaggaggttttagggtaggcgtcgtcgtcgtatttgt

SEQ ID NO: 18896 - DNA, 822 bp, Artificial Sequence
  chemically treated genomic DNA (Homo sapiens) CpG-island No: 18896
acaaatacgacgacgacgcctaccctaaaacctcctcgcaaaacaaccaacctcgcgcgaaaaacacctaacgaaaacgcacctaacgaaaacgcacccaccttaacgaaaacgcacctaacgaaacaaccctaccccgcctaaaaacgcgaaacgtacgcaaaacgataaaaacaacgaaacctacaaacccgcccaaccccacctccatccccacccccaacccccacttaccccgacgtaataaactttattcgctcttttaatcttaatatccaaaacgatccccatctccaattctccgcaacaaccgccacttccgactacgcgtaaccccaaaaaaacaaaaaacgcctccccgcttcgttctaaaccccgcccctttccctctctaccgacaataactcacgtaacctcgcaacgacgtcgcacacactccctaactccgaaaaacgaatacccacgccttcctccttccgacacaaaaaccgaccttaatacgaaccgaaacgctatcacgattcaccccgccccctctaaacgtaaaaaacgaaaccaaactaaccccaccccttccgtaaaaacaatcttacgccgaaaatactcctttactatccgaattaacgaaaaaaaaaaaaaacgactctccccgcgtaccccgcgactaaaaacgaaaccgaacctatctatcgattacaacctacgcaaaaaaaataacgctcccgtcaaactatacgacgcaaacgatcgcccaataaaattatctttcaaaaaattttaacttaataatacctaccctcctcaaatatccttaatctcctc

SEQ ID NO: 18897 - DNA, 741 bp, Artificial Sequence
  chemically treated genomic DNA (Homo sapiens) CpG-island No: 18897
cgttataaaatttgggcggttcgatcggagttaggtgttagttttagggtcgtcgggttcggcgtagcgttcggaatttttgcgatgtttggggcgcggcggtggttttttttcgtttttattacggttttcgtcggtatttttcggttaggaggttcgttagtttttcgaagaatcggttttacgcgcggacggtcgcggtcgtcgcgtttttcggggagagaggcgagcgcggcgttcggatcgcggtgagagttttttaggttcgggcgcgcggggtgggtttttcgggttttcgttcgaaggtcgcggcgtttttttttttttttttttttcgttcggggtagttcgttttttttttcggcgcgggcggggttgcgggcgtcgacgcggaagcgcggggcgttagggttgcgggggcggcggcgcgggaggtcgcgcgcgtttttcgggtcgtagtcggcgcgggcgcggggcggggcggggcggtcgggaggcggcgggcgatcgcgtataggtttggtcgtcgtttcgtttttttttttttagtttttattttttttcggtttagtcgtttttttttttttttttttttcgggcgaattacgcgtttttttttgatattcgtagcggattcgagtttcgaatttattttttacgtgatttgagggggttgggtggttggttggggatagagggggagacggaaaggagggaacggaatttgtcgttatttgagta

SEQ ID NO: 18898 - DNA, 741 bp, Artificial Sequence
  chemically treated genomic DNA (Homo sapiens) CpG-island No: 18898
tactcaaataacgacaaattccgttccctcctttccgtctccccctctatccccaaccaaccacccaaccccctcaaatcacgtaaaaaataaattcgaaactcgaatccgctacgaatatcaaaaaaaaacgcgtaattcgcccgaaaaaaaaaaaaaaaaaaaaacgactaaaccgaaaaaaaataaaaactaaaaaaaaaaaaacgaaacgacgaccaaacctatacgcgatcgcccgccgcctcccgaccgccccgccccgccccgcgcccgcgccgactacgacccgaaaaacgcgcgcgacctcccgcgccgccgcccccgcaaccctaacgccccgcgcttccgcgtcgacgcccgcaaccccgcccgcgccgaaaaaaaaaacgaactaccccgaacgaaaaaaaaaaaaaaaaaaaaacgccgcgaccttcgaacgaaaacccgaaaaacccaccccgcgcgcccgaacctaaaaaactctcaccgcgatccgaacgccgcgctcgcctctctccccgaaaaacgcgacgaccgcgaccgtccgcgcgtaaaaccgattcttcgaaaaactaacgaacctcctaaccgaaaaataccgacgaaaaccgtaataaaaacgaaaaaaaaccaccgccgcgccccaaacatcgcaaaaattccgaacgctacgccgaacccgacgaccctaaaactaacacctaactccgatcgaaccgcccaaattttataacg

SEQ ID NO: 18899 - DNA, 741 bp, Artificial Sequence
  chemically treated genomic DNA (Homo sapiens) CpG-island No: 18899
tgtttaggtaacggtagatttcgttttttttttttcgtttttttttttgtttttagttaattatttaatttttttaggttacgtgaaggataaattcggagttcgggttcgttacgagtgttagaggagggcgcgtgattcgttcgggggaggggagaggagggggacggttaggtcgagggagggtaggggttggggaagggggggcgaggcggcggttaggtttgtgcgcgatcgttcgtcgtttttcggtcgtttcgtttcgtttcgcgttcgcgtcgattgcggttcggggagcgcgcgcggtttttcgcgtcgtcgttttcgtagttttagcgtttcgcgttttcgcgtcggcgttcgtagtttcgttcgcgtcggggggaggggcgggttgtttcgggcgggggagggggaggaggaggggcgtcgcggttttcgggcggggattcgggaagtttatttcgcgcgttcgggtttggagggtttttatcgcggttcgggcgtcgcgttcgttttttttttcgggaagcgcggcggtcgcgatcgttcgcgcgtggagtcggtttttcgaagggttggcgggttttttagtcggaaaatgtcggcggaggtcgtggtgggggcggggaggagttatcgtcgcgttttagatatcgtaggaatttcggacgttgcgtcgggttcggcggttttgaggttggtatttggtttcggtcgggtcgtttaggttttgtggcg

SEQ ID NO: 18900 - DNA, 741 bp, Artificial Sequence
  chemically treated genomic DNA (Homo sapiens) CpG-island No: 18900
cgccacaaaacctaaacgacccgaccgaaaccaaataccaacctcaaaaccgccgaacccgacgcaacgtccgaaattcctacgatatctaaaacgcgacgataactcctccccgcccccaccacgacctccgccgacattttccgactaaaaaacccgccaacccttcgaaaaaccgactccacgcgcgaacgatcgcgaccgccgcgcttcccgaaaaaaaaaacgaacgcgacgcccgaaccgcgataaaaaccctccaaacccgaacgcgcgaaataaacttcccgaatccccgcccgaaaaccgcgacgcccctcctcctccccctcccccgcccgaaacaacccgcccctccccccgacgcgaacgaaactacgaacgccgacgcgaaaacgcgaaacgctaaaactacgaaaacgacgacgcgaaaaaccgcgcgcgctccccgaaccgcaatcgacgcgaacgcgaaacgaaacgaaacgaccgaaaaacgacgaacgatcgcgcacaaacctaaccgccgcctcgcccccccttccccaacccctaccctccctcgacctaaccgtccccctcctctcccctcccccgaacgaatcacgcgccctcctctaacactcgtaacgaacccgaactccgaatttatccttcacgtaacctaaaaaaattaaataattaactaaaaacaaaaaaaaaaacgaaaaaaaaaaaacgaaatctaccgttacctaaaca

SEQ ID NO: 18901 - DNA, 1084 bp, Artificial Sequence
  chemically treated genomic DNA (Homo sapiens) CpG-island No: 18901
ggggtggcggcggtaatcgcggcgggggtattcggggagattgttgttgtcgttgttgttgatcgcggtttaggtcggttttagagagcggatatttcgagcggggggtgcgggcgtcgtcgtcgtcgtttttgttgttgttgtttttgttgttgttgttggtgtcgttgtcgtcgtcggcgagtaggcgggatcggtgtgagtgcgagtgtgtgtgcgagggagcgtgtgcgagggcgattgtgcgcgcgagtgtgcgggtgtgtgcgagtgtttgtttgtttgtgcggggattcgggggcgggcggttcgggtttttttggcggaggagtcgtcgtcgtcgttcgggtttcggcgtttttcgttgcgtaggttcggagcgcgcgttattttgtgagatttataaaatttttttcgggaagaagtcgtcggtagtagtcgtcgttcggcgttcggtttcgtcgacgtcgttttttgcgtcgggtcggtcgtgcggtttcgtcgtttggaatcggggttcggggattgcggtatttgtcggggagggggttgtcgttttttcggtttcgggcgtcgttggaatcgcgagtcgaggagagattgagtaggttgcggcgcggttaggagtcggagcgtcgggggcggagagaggttgtcggggcggcgttggttgcggaggtcgcggcgggagcgcggcgcgggagttcgaggttgagatttatcggaggaagcggcgcgagcgtttcgttatcgtttcggtgagtgttcggttcggtcgcggtttcgttcggtttggcgttcggttttttcggcggttcgtagtcgggtcggagtcgaggtcggtcgggcggagggagggatttgttattttaggaggaggcgtcgcgggtttagggtcggtcgtcgggggagggagttttaggtcgggtttcggaggagcggcgggcgcgagcggagggaaagttgcggagggtgggagcgggggtcgcggtttttcgggagtcggggtttggggggtcgtagatagcgttagatttttattggtcgttcgagcgaaggggtggaggttgtttttttttttttt

SEQ ID NO: 18902 - DNA, 1084 bp, Artificial Sequence
  chemically treated genomic DNA (Homo sapiens) CpG-island No: 18902
aaaaaaaaaaaaaacaacctccaccccttcgctcgaacgaccaataaaaatctaacgctatctacgaccccccaaaccccgactcccgaaaaaccgcgacccccgctcccaccctccgcaactttccctccgctcgcgcccgccgctcctccgaaacccgacctaaaactccctcccccgacgaccgaccctaaacccgcgacgcctcctcctaaaataacaaatccctccctccgcccgaccgacctcgactccgacccgactacgaaccgccgaaaaaaccgaacgccaaaccgaacgaaaccgcgaccgaaccgaacactcaccgaaacgataacgaaacgctcgcgccgcttcctccgataaatctcaacctcgaactcccgcgccgcgctcccgccgcgacctccgcaaccaacgccgccccgacaacctctctccgcccccgacgctccgactcctaaccgcgccgcaacctactcaatctctcctcgactcgcgattccaacgacgcccgaaaccgaaaaaacgacaaccccctccccgacaaataccgcaatccccgaaccccgattccaaacgacgaaaccgcacgaccgacccgacgcaaaaaacgacgtcgacgaaaccgaacgccgaacgacgactactaccgacgacttcttcccgaaaaaaattttataaatctcacaaaataacgcgcgctccgaacctacgcaacgaaaaacgccgaaacccgaacgacgacgacgactcctccgccaaaaaaacccgaaccgcccgcccccgaatccccgcacaaacaaacaaacactcgcacacacccgcacactcgcgcgcacaatcgccctcgcacacgctccctcgcacacacactcgcactcacaccgatcccgcctactcgccgacgacgacaacgacaccaacaacaacaacaaaaacaacaacaacaaaaacgacgacgacgacgcccgcaccccccgctcgaaatatccgctctctaaaaccgacctaaaccgcgatcaacaacaacgacaacaacaatctccccgaatacccccgccgcgattaccgccgccacccc

SEQ ID NO: 18903 - DNA, 1084 bp, Artificial Sequence
  chemically treated genomic DNA (Homo sapiens) CpG-island No: 18903
gaggaggaggaagataatttttattttttcgttcgggcggttagtgaaggtttggcgttgtttacggttttttaggtttcggttttcgggaggtcgcggttttcgtttttatttttcgtaatttttttttcgttcgcgttcgtcgttttttcgggattcggtttgaggttttttttttcggcggtcggttttgggttcgcggcgtttttttttaaaatggtaggttttttttttcgttcggtcggtttcggtttcggttcggttgcgggtcgtcgggggagtcgagcgttaggtcgggcggggtcgcggtcgggtcggatatttatcgggacgatggcggggcgttcgcgtcgtttttttcggtgagttttagtttcgggttttcgcgtcgcgttttcgtcgcggttttcgtagttagcgtcgtttcggtagttttttttcgttttcggcgtttcggtttttggtcgcgtcgtagtttgtttagttttttttcggttcgcggttttagcggcgttcggggtcggggaggcgatagtttttttttcggtaaatatcgtagttttcgggtttcgattttaggcggcggggtcgtacggtcggttcggcgtagagggcggcgtcggcgaggtcgggcgtcgagcggcggttgttgtcggcggttttttttcgaggaggattttgtaaattttataaaatggcgcgcgtttcgaatttgcgtagcgagaagcgtcggggttcgggcggcggcggcggttttttcgttaggagagttcgaatcgttcgttttcgagttttcgtatagatagatagatattcgtatatattcgtatattcgcgcgtataatcgttttcgtatacgttttttcgtatatatattcgtatttatatcggtttcgtttgttcgtcggcggcggtagcggtattaatagtagtagtaggaatagtagtagtagaagcggcggcggcggcgttcgtatttttcgttcggggtgttcgttttttgaggtcgatttgggtcgcgattagtagtagcgatagtagtagttttttcggatattttcgtcgcggttgtcgtcgttatttt

SEQ ID NO: 18904 - DNA, 1084 bp, Artificial Sequence
  chemically treated genomic DNA (Homo sapiens) CpG-island No: 18904
aaaataacgacgacaaccgcgacgaaaatatccgaaaaaactactactatcgctactactaatcgcgacccaaatcgacctcaaaaaacgaacaccccgaacgaaaaatacgaacgccgccgccgccgcttctactactactattcctactactactattaataccgctaccgccgccgacgaacaaacgaaaccgatataaatacgaatatatatacgaaaaaacgtatacgaaaacgattatacgcgcgaatatacgaatatatacgaatatctatctatctatacgaaaactcgaaaacgaacgattcgaactctcctaacgaaaaaaccgccgccgccgcccgaaccccgacgcttctcgctacgcaaattcgaaacgcgcgccattttataaaatttacaaaatcctcctcgaaaaaaaaccgccgacaacaaccgccgctcgacgcccgacctcgccgacgccgccctctacgccgaaccgaccgtacgaccccgccgcctaaaatcgaaacccgaaaactacgatatttaccgaaaaaaaaactatcgcctccccgaccccgaacgccgctaaaaccgcgaaccgaaaaaaaactaaacaaactacgacgcgaccaaaaaccgaaacgccgaaaacgaaaaaaaactaccgaaacgacgctaactacgaaaaccgcgacgaaaacgcgacgcgaaaacccgaaactaaaactcaccgaaaaaaacgacgcgaacgccccgccatcgtcccgataaatatccgacccgaccgcgaccccgcccgacctaacgctcgactcccccgacgacccgcaaccgaaccgaaaccgaaaccgaccgaacgaaaaaaaaaacctaccattttaaaaaaaaacgccgcgaacccaaaaccgaccgccgaaaaaaaaaacctcaaaccgaatcccgaaaaaacgacgaacgcgaacgaaaaaaaaattacgaaaaataaaaacgaaaaccgcgacctcccgaaaaccgaaacctaaaaaaccgtaaacaacgccaaaccttcactaaccgcccgaacgaaaaaataaaaattatcttcctcctcctc

SEQ ID NO: 18905 - DNA, 962 bp, Artificial Sequence
  chemically treated genomic DNA (Homo sapiens) CpG-island No: 18905
atggcgcgcgcgaagagcgagggcggcgttaggttcgttagttattggaatttgtttttatttagtagtcgttgttagcgcggtcggtcgtttagtagtttttggcgggtcgagtcggcggtatttacgggggtgtatagcgttaggaggtttagtagtagtaggcggcgttggcgcggtttttcgggagttgaggcgggggtttcggcggcggagggagtggtttcggcgtcgcggtttagttggcgtagtagtagttcgagaggcgtgaggtcgtcgtcgtttcgtagatcgggcgaggcgtcgtggtttagtagtaggaagaggtattcggggcgcgttagtttataggttacgtgtagcgacgtgttatcgttttttacgcggttgtagttacgtcggtttagtacgcgcgttcgtttttcggtcgggaagtcgcgtaaggtgcgtaggatgcggcgtagaatgtttacgcggttgtagcgtattgttagcgttacgtgcggttcgggagtcgcgtagtagcggaagtcggtattgggcggtgcgagcgcgcgtcgcgggaacgtggttagtaggtaatgcgcgtacgtttggtggtcgtgtacgagcgcgtagagtagcgttttagagggcgagtaggcggcggcgcgttcgcgttcgttttagtggaaggtttcgttggcgcgtatattttttagtagttatacgggtagtaggtcgcgtatcgtttggtagaaggcgaacgacgatttgcggtattgtttttgcgttcgcgagcgcgtcgcgttcgaggtttcgggttcgtcgttcgcgttatttttaggtcgtcgcgcgttttacggtatgttggcggcggggcgtttttgggttttaaggtatggatttcgcgaaggtatatttgcggggaaaggaagaggttacggtgaggcgcggggaaattggggaggttcggggatttt

SEQ ID NO: 18906 - DNA, 962 bp, Artificial Sequence
  chemically treated genomic DNA (Homo sapiens) CpG-island No: 18906
aaaatccccgaacctccccaatttccccgcgcctcaccgtaacctcttcctttccccgcaaatataccttcgcgaaatccataccttaaaacccaaaaacgccccgccgccaacataccgtaaaacgcgcgacgacctaaaaataacgcgaacgacgaacccgaaacctcgaacgcgacgcgctcgcgaacgcaaaaacaataccgcaaatcgtcgttcgccttctaccaaacgatacgcgacctactacccgtataactactaaaaaatatacgcgccaacgaaaccttccactaaaacgaacgcgaacgcgccgccgcctactcgccctctaaaacgctactctacgcgctcgtacacgaccaccaaacgtacgcgcattacctactaaccacgttcccgcgacgcgcgctcgcaccgcccaataccgacttccgctactacgcgactcccgaaccgcacgtaacgctaacaatacgctacaaccgcgtaaacattctacgccgcatcctacgcaccttacgcgacttcccgaccgaaaaacgaacgcgcgtactaaaccgacgtaactacaaccgcgtaaaaaacgataacacgtcgctacacgtaacctataaactaacgcgccccgaatacctcttcctactactaaaccacgacgcctcgcccgatctacgaaacgacgacgacctcacgcctctcgaactactactacgccaactaaaccgcgacgccgaaaccactccctccgccgccgaaacccccgcctcaactcccgaaaaaccgcgccaacgccgcctactactactaaacctcctaacgctatacacccccgtaaataccgccgactcgacccgccaaaaactactaaacgaccgaccgcgctaacaacgactactaaataaaaacaaattccaataactaacgaacctaacgccgccctcgctcttcgcgcgcgccat

SEQ ID NO: 18907 - DNA, 962 bp, Artificial Sequence
  chemically treated genomic DNA (Homo sapiens) CpG-island No: 18907
ggagttttcgggtttttttagttttttcgcgttttatcgtggttttttttttttttcgtaggtgtgttttcgcgggatttatgttttgaggtttaggaacgtttcgtcgttagtatgtcgtgggacgcgcggcggtttgggggtggcgcggacggcgggttcgaggtttcgggcgcggcgcgttcgcgagcgtagaagtagtgtcgtaagtcgtcgttcgttttttattaggcggtgcgcgatttgttattcgtgtggttgttggaggatatgcgcgttagcgaggttttttattgggacgagcgcgggcgcgtcgtcgtttattcgttttttgaggcgttgttttacgcgttcgtgtacgattattaagcgtacgcgtattatttgttggttacgttttcgcggcgcgcgttcgtatcgtttagtgtcggttttcgttgttgcgcggttttcgggtcgtacgtggcgttggtagtgcgttataatcgcgtgggtattttgcgtcgtattttgcgtattttgcgcgatttttcggtcgaggagcgggcgcgcgtgttggatcggcgtggttgtagtcgcgtggagggcggtggtacgtcgttgtacgtggtttgtgagttggcgcgtttcgagtgtttttttttgttgttgggttacggcgtttcgttcggtttgcgggacggcggcggttttacgtttttcgagttgttgttgcgttagttgggtcgcgacgtcggggttatttttttcgtcgtcggagttttcgttttagttttcggggagtcgcgttagcgtcgtttgttgttgttggattttttggcgttgtatattttcgtgggtgtcgtcggttcggttcgttaggagttgttgggcgatcggtcgcgttggtagcggttgttgggtgaggataagttttagtggttggcgggtttggcgtcgttttcgtttttcgcgcgcgttat

SEQ ID NO: 18908 - DNA, 962 bp, Artificial Sequence
  chemically treated genomic DNA (Homo sapiens) CpG-island No: 18908
ataacgcgcgcgaaaaacgaaaacgacgccaaacccgccaaccactaaaacttatcctcacccaacaaccgctaccaacgcgaccgatcgcccaacaactcctaacgaaccgaaccgacgacacccacgaaaatatacaacgccaaaaaatccaacaacaacaaacgacgctaacgcgactccccgaaaactaaaacgaaaactccgacgacgaaaaaaataaccccgacgtcgcgacccaactaacgcaacaacaactcgaaaaacgtaaaaccgccgccgtcccgcaaaccgaacgaaacgccgtaacccaacaacaaaaaaaaacactcgaaacgcgccaactcacaaaccacgtacaacgacgtaccaccgccctccacgcgactacaaccacgccgatccaacacgcgcgcccgctcctcgaccgaaaaatcgcgcaaaatacgcaaaatacgacgcaaaatacccacgcgattataacgcactaccaacgccacgtacgacccgaaaaccgcgcaacaacgaaaaccgacactaaacgatacgaacgcgcgccgcgaaaacgtaaccaacaaataatacgcgtacgcttaataatcgtacacgaacgcgtaaaacaacgcctcaaaaaacgaataaacgacgacgcgcccgcgctcgtcccaataaaaaacctcgctaacgcgcatatcctccaacaaccacacgaataacaaatcgcgcaccgcctaataaaaaacgaacgacgacttacgacactacttctacgctcgcgaacgcgccgcgcccgaaacctcgaacccgccgtccgcgccacccccaaaccgccgcgcgtcccacgacatactaacgacgaaacgttcctaaacctcaaaacataaatcccgcgaaaacacacctacgaaaaaaaaaaaaaaccacgataaaacgcgaaaaaactaaaaaaacccgaaaactcc

SEQ ID NO: 18909 - DNA, 557 bp, Artificial Sequence
  chemically treated genomic DNA (Homo sapiens) CpG-island No: 18909
  unsure (541)
cgggcgggttacgtaaagttcggtttttttacgttatcgggtagagttacggtcgcggttcgtgaataagggggttgggttatcgaaggtagcgtcgcgttcggggttattcgttattttttattcgttttttttcggtttgtacggttagacgtcgggcggcggagggtcgcggggtcgagcggggcgttcgcgcgtaggtggtcggcgtagcgagggttgtatttgcgtgcgcgtgtgtcggaggaggagggggcggcggcgtcggcgcgcgcgggggacgggatttatatggggggcgcgggggtataggcgggtttttttttttgttagatcgagtcgcgtcgttattcggtagtcggtaggttacgaggacgacggaggagataagacggtcgcgagcgattttacgcgcgcggttgaggcgcgttttttcgcgcgcgcggcgcggcgggggcgtttcgtcggtagatatttcgtttcgttttattttcgcgggtcggcggatttgcgcgttgcgtttttttcgcgcgggggcgtngcgttatttaatttcg

SEQ ID NO: 18910 - DNA, 557 bp, Artificial Sequence
  chemically treated genomic DNA (Homo sapiens) CpG-island No: 18910
  unsure (17)
cgaaattaaataacgcnacgcccccgcgcgaaaaaaacgcaacgcgcaaatccgccgacccgcgaaaataaaacgaaacgaaatatctaccgacgaaacgcccccgccgcgccgcgcgcgcgaaaaaacgcgcctcaaccgcgcgcgtaaaatcgctcgcgaccgtcttatctcctccgtcgtcctcgtaacctaccgactaccgaataacgacgcgactcgatctaacaaaaaaaaaaacccgcctatacccccgcgccccccatataaatcccgtcccccgcgcgcgccgacgccgccgccccctcctcctccgacacacgcgcacgcaaatacaaccctcgctacgccgaccacctacgcgcgaacgccccgctcgaccccgcgaccctccgccgcccgacgtctaaccgtacaaaccgaaaaaaaacgaataaaaaataacgaataaccccgaacgcgacgctaccttcgataacccaacccccttattcacgaaccgcgaccgtaactctacccgataacgtaaaaaaaccgaactttacgtaacccgcccg

SEQ ID NO: 18911 - DNA, 557 bp, Artificial Sequence
  chemically treated genomic DNA (Homo sapiens) CpG-island No: 18911
  unsure (17)
cgaagttgggtggcgtnacgttttcgcgcgagaagaacgtaacgcgtaagttcgtcggttcgcggaaatggggcgaggcggggtgtttgtcggcgaagcgttttcgtcgcgtcgcgcgcgcgggaggacgcgttttagtcgcgcgcgtagagtcgttcgcggtcgttttgtttttttcgtcgttttcgtgatttgtcggttgtcgggtgacggcgcggttcggtttggtagggggggaggttcgtttgtgttttcgcgttttttatgtgagtttcgtttttcgcgcgcgtcggcgtcgtcgtttttttttttttcggtatacgcgtacgtaggtgtagttttcgttgcgtcggttatttgcgcgcggacgtttcgttcggtttcgcgatttttcgtcgttcgacgtttggtcgtgtaggtcgggaggggacgggtaggaggtggcgggtggtttcgggcgcggcgttgttttcgatggtttaatttttttatttacgagtcgcggtcgtgattttgttcggtgacgtggggaggtcgaattttacgtaattcgttcg

SEQ ID NO: 18912 - DNA, 557 bp, Artificial Sequence
  chemically treated genomic DNA (Homo sapiens) CpG-island No: 18912
  unsure (541)
cgaacgaattacgtaaaattcgacctccccacgtcaccgaacaaaatcacgaccgcgactcgtaaataaaaaaattaaaccatcgaaaacaacgccgcgcccgaaaccacccgccacctcctacccgtcccctcccgacctacacgaccaaacgtcgaacgacgaaaaatcgcgaaaccgaacgaaacgtccgcgcgcaaataaccgacgcaacgaaaactacacctacgtacgcgtataccgaaaaaaaaaaaaacgacgacgccgacgcgcgcgaaaaacgaaactcacataaaaaacgcgaaaacacaaacgaacctccccccctaccaaaccgaaccgcgccgtcacccgacaaccgacaaatcacgaaaacgacgaaaaaaacaaaacgaccgcgaacgactctacgcgcgcgactaaaacgcgtcctcccgcgcgcgcgacgcgacgaaaacgcttcgccgacaaacaccccgcctcgccccatttccgcgaaccgacgaacttacgcgttacgttcttctcgcgcgaaaacgtnacgccacccaacttcg

SEQ ID NO: 18913 - DNA, 676 bp, Artificial Sequence
  chemically treated genomic DNA (Homo sapiens) CpG-island No: 18913
  unsure (170)
ttataggttcggcgttttcgtttttgtcgcggatcggagcgcgcgttgtttttcgcgggcgagcgggtaaaggttttacgacggacgtacgggagggagttatcgtcgttcgcgttcgtcgtagtcgcgtatcgagtcgtcgcggtcggaacgtagggcggcggggtcgncgtcggcggcgggcggcgggcggcgggcggcgggcggcgtagtgcggtttcggttaggtaggatagcgggatcgttcgtcgtcgttattggttcgcgtcgtcggttttcgttattatttattggtcgtcgcgttgtattattgttacgttattggtcggcgggcggggcgtatcgttggattcgcggaaaatttcggagaaatttgagggagcgtcggcggggagaacggagaggaggggcggggtcgtggcgaaaggggcggggcgttgatgggcgggggcggggttttcggaattcgagttgcgggcgaagaaaggtttcgagtttcgagttgttttagttcgggagggcgtcgttgttttgcgaattcgggcgcgcgcgtaggtggttcgtttttcgtcgtgcgtgatttttttcgtcgcgtttagttttttttttttttgattttacgtgattttgggaaaaatttttaggttgttattttatttgtatatgggagggtcgg

SEQ ID NO: 18914 - DNA, 676 bp, Artificial Sequence
  chemically treated genomic DNA (Homo sapiens) CpG-island No: 18914
  unsure (507)
ccgaccctcccatatacaaataaaataacaacctaaaaatttttcccaaaatcacgtaaaatcaaaaaaaaaaaaaactaaacgcgacgaaaaaaatcacgcacgacgaaaaacgaaccacctacgcgcgcgcccgaattcgcaaaacaacgacgccctcccgaactaaaacaactcgaaactcgaaacctttcttcgcccgcaactcgaattccgaaaaccccgcccccgcccatcaacgccccgcccctttcgccacgaccccgcccctcctctccgttctccccgccgacgctccctcaaatttctccgaaattttccgcgaatccaacgatacgccccgcccgccgaccaataacgtaacaataatacaacgcgacgaccaataaataataacgaaaaccgacgacgcgaaccaataacgacgacgaacgatcccgctatcctacctaaccgaaaccgcactacgccgcccgccgcccgccgcccgccgcccgccgccgacgncgaccccgccgccctacgttccgaccgcgacgactcgatacgcgactacgacgaacgcgaacgacgataactccctcccgtacgtccgtcgtaaaacctttacccgctcgcccgcgaaaaacaacgcgcgctccgatccgcgacaaaaacgaaaacgccgaacctataa

SEQ ID NO: 18915 - DNA, 676 bp, Artificial Sequence
  chemically treated genomic DNA (Homo sapiens) CpG-island No: 18915
  unsure (507)
tcggtttttttatgtgtagatggggtagtagtttggaggttttttttaaggttacgtaaggttaaagaaaaggggagttggacgcgacgaggaaagttacgtacggcggagggcgggttatttacgcgcgcgttcgagttcgtagagtagcggcgttttttcgggttagggtagttcggagttcggagttttttttcgttcgtagttcgggtttcgggagtttcgttttcgtttattaacgtttcgtttttttcgttacggtttcgtttttttttttcgtttttttcgtcggcgtttttttaagttttttcgaagtttttcgcgggtttagcggtgcgtttcgttcgtcggttagtgacgtaataatggtgtagcgcggcggttaatgggtggtggcgggggtcggcggcgcgggttaatggcggcggcggacggtttcgttgttttgtttggtcggggtcgtattgcgtcgttcgtcgttcgtcgttcgtcgttcgtcgtcggcgncggtttcgtcgttttgcgtttcggtcgcggcggttcggtgcgcggttgcggcgggcgcgggcggcggtggttttttttcgtgcgttcgtcgtgggatttttgttcgttcgttcgcgggggatagcgcgcgtttcggttcgcggtaggggcggggacgtcgagtttgtaa

SEQ ID NO: 18916 - DNA, 676 bp, Artificial Sequence
  chemically treated genomic DNA (Homo sapiens) CpG-island No: 18916
  unsure (170)
ttacaaactcgacgtccccgcccctaccgcgaaccgaaacgcgcgctatcccccgcgaacgaacgaacaaaaatcccacgacgaacgcacgaaaaaaaaccaccgccgcccgcgcccgccgcaaccgcgcaccgaaccgccgcgaccgaaacgcaaaacgacgaaaccgncgccgacgacgaacgacgaacgacgaacgacgaacgacgcaatacgaccccgaccaaacaaaacaacgaaaccgtccgccgccgccattaacccgcgccgccgacccccgccaccacccattaaccgccgcgctacaccattattacgtcactaaccgacgaacgaaacgcaccgctaaacccgcgaaaaacttcgaaaaaacttaaaaaaacgccgacgaaaaaaacgaaaaaaaaaaacgaaaccgtaacgaaaaaaacgaaacgttaataaacgaaaacgaaactcccgaaacccgaactacgaacgaaaaaaaactccgaactccgaactaccctaacccgaaaaaacgccgctactctacgaactcgaacgcgcgcgtaaataacccgccctccgccgtacgtaactttcctcgtcgcgtccaactccccttttctttaaccttacgtaaccttaaaaaaaacctccaaactactaccccatctacacataaaaaaaccga

SEQ ID NO: 18917 - DNA, 1011 bp, Artificial Sequence
  chemically treated genomic DNA (Homo sapiens) CpG-island No: 18917
gcgggcgcgttttttatttatatgtttcgattcgtcgggtttttgcgttcgtaagattatttttcgggttcgaggcggggaaggggtcgggatatgggttggggattgagcgtcgttgaattgcgttatggtcggagagagtttgtaggggcggaggtgttttttggtcggattttgtcgatcgttttcggggagaggcgaggttttggttcgtgacggttgggttcgggttttagtatttttattcgtttaggggaaagcgggcggtagttcggagttcgattttagcgtttagcgcggttcgatatcgttttttggcggtcgcggacgttattgcgattcgtagttttcgtcgaagtcgggcgagggattttcgattcgggcgtattaggttgcgggtgcgggggcggggacgtttagcgttttggtttcgggggcggggttcgcgggttgagtgtttatttcgtttttttttcgtttcgcggtttcggcgggtttttcgtttattagggtttttattttttttcgggtgaaatggttatagtttcgttattcgcgtcgtcgttattgcgtttgttttcggttgggtcgatcggaggtttcggcggggcgggcgaggtaggtggttcggcgggtttttttcgggttttttttttttagtcggagttcgcggatcgcgttgggcgtagggagggggttgtgcgcgttttcgtttttcggtttttttagcggggacgagcgtcgattttcgtttagtcgggagacgtttttaaggttttaggttttgtttttgttcgttcgcggttcgcggattgcgggtgatagggttttcggttcgagttttatttttttaggagagcggattttagcgtttttgtattttttatttggtggtcgtttacgtagttcggtttgttcgcgcgttttaattgttattttttttgttttttttagtcgtacgtttattaggtttttgtgtgtttgtttggttgggattttcgtatattttag

SEQ ID NO: 18918 - DNA, 1011 bp, Artificial Sequence
  chemically treated genomic DNA (Homo sapiens) CpG-island No: 18918
ctaaaatatacgaaaatcccaaccaaacaaacacacaaaaacctaataaacgtacgactaaaaaaaacaaaaaaaataacaattaaaacgcgcgaacaaaccgaactacgtaaacgaccaccaaataaaaaatacaaaaacgctaaaatccgctctcctaaaaaaataaaactcgaaccgaaaaccctatcacccgcaatccgcgaaccgcgaacgaacaaaaacaaaacctaaaaccttaaaaacgtctcccgactaaacgaaaatcgacgctcgtccccgctaaaaaaaccgaaaaacgaaaacgcgcacaaccccctccctacgcccaacgcgatccgcgaactccgactaaaaaaaaaaaacccgaaaaaaacccgccgaaccacctacctcgcccgccccgccgaaacctccgatcgacccaaccgaaaacaaacgcaataacgacgacgcgaataacgaaactataaccatttcacccgaaaaaaaataaaaaccctaataaacgaaaaacccgccgaaaccgcgaaacgaaaaaaaaacgaaataaacactcaacccgcgaaccccgcccccgaaaccaaaacgctaaacgtccccgcccccgcacccgcaacctaatacgcccgaatcgaaaatccctcgcccgacttcgacgaaaactacgaatcgcaataacgtccgcgaccgccaaaaaacgatatcgaaccgcgctaaacgctaaaatcgaactccgaactaccgcccgctttcccctaaacgaataaaaatactaaaacccgaacccaaccgtcacgaaccaaaacctcgcctctccccgaaaacgatcgacaaaatccgaccaaaaaacacctccgcccctacaaactctctccgaccataacgcaattcaacgacgctcaatccccaacccatatcccgaccccttccccgcctcgaacccgaaaaataatcttacgaacgcaaaaacccgacgaatcgaaacatataaataaaaaacgcgcccgc

SEQ ID NO: 18919 - DNA, 1011 bp, Artificial Sequence
  chemically treated genomic DNA (Homo sapiens) CpG-island No: 18919
ttggagtatgcggaagttttagttaggtagatatataggagtttggtagacgtgcggttggggaaggtaagggaagtggtagttgggacgcgcgagtaggtcgggttgcgtggacggttattaggtggagggtataggagcgttggggttcgtttttttagggagatggggttcggatcggggattttgttattcgtagttcgcgggtcgcgggcgggtagaagtagagtttgggattttgagggcgtttttcgattgggcgggggtcggcgttcgttttcgttgggaaggtcgggaagcggaggcgcgtatagttttttttttgcgtttagcgcggttcgcggatttcggttgggggaggggaattcggaaggggttcgtcggattatttgtttcgttcgtttcgtcgggattttcgatcggtttagtcgggggtaggcgtagtggcggcggcgcggatggcgggattgtggttattttattcggggggaggtggagattttggtgggcggggggttcgtcgaggtcgcggggcgaggggagagcggagtgggtatttagttcgcgaatttcgttttcggggttagggcgttgggcgttttcgttttcgtattcgtagtttggtgcgttcgggtcgggggtttttcgttcggtttcggcggaggttgcgggtcgtagtgacgttcgcggtcgttagggggcggtgtcgggtcgcgttgggcgttggggtcgggtttcgggttgtcgttcgtttttttttgagcggatggggatattgaggttcggatttagtcgttacgggttagggtttcgttttttttcgagggcggtcggtagggttcgattagggaatattttcgtttttgtaaatttttttcgattatggcgtagtttagcggcgtttagtttttaatttatgtttcggtttttttttcgtttcgggttcggaaagtgattttgcggacgtagggattcggcgggtcggggtatgtgggtagagggcgcgttcgt

SEQ ID NO: 18920 - DNA, 1011 bp, Artificial Sequence
  chemically treated genomic DNA (Homo sapiens) CpG-island No: 18920
acgaacgcgccctctacccacataccccgacccgccgaatccctacgtccgcaaaatcactttccgaacccgaaacgaaaaaaaaaccgaaacataaattaaaaactaaacgccgctaaactacgccataatcgaaaaaaatttacaaaaacgaaaatattccctaatcgaaccctaccgaccgccctcgaaaaaaaacgaaaccctaacccgtaacgactaaatccgaacctcaatatccccatccgctcaaaaaaaaacgaacgacaacccgaaacccgaccccaacgcccaacgcgacccgacaccgccccctaacgaccgcgaacgtcactacgacccgcaacctccgccgaaaccgaacgaaaaacccccgacccgaacgcaccaaactacgaatacgaaaacgaaaacgcccaacgccctaaccccgaaaacgaaattcgcgaactaaatacccactccgctctcccctcgccccgcgacctcgacgaaccccccgcccaccaaaatctccacctccccccgaataaaataaccacaatcccgccatccgcgccgccgccactacgcctacccccgactaaaccgatcgaaaatcccgacgaaacgaacgaaacaaataatccgacgaaccccttccgaattcccctcccccaaccgaaatccgcgaaccgcgctaaacgcaaaaaaaaaactatacgcgcctccgcttcccgaccttcccaacgaaaacgaacgccgacccccgcccaatcgaaaaacgccctcaaaatcccaaactctacttctacccgcccgcgacccgcgaactacgaataacaaaatccccgatccgaaccccatctccctaaaaaaacgaaccccaacgctcctataccctccacctaataaccgtccacgcaacccgacctactcgcgcgtcccaactaccacttcccttaccttccccaaccgcacgtctaccaaactcctatatatctacctaactaaaacttccgcatactccaa

SEQ ID NO: 18921 - DNA, 661 bp, Artificial Sequence
  chemically treated genomic DNA (Homo sapiens) CpG-island No: 18921
gaatcgatttaattcgggtcgttacgttgtgtttagaatatcgatagtcgtttttaggtaattagtatttgttgcgtttcgtttttagcgatttttttaatcgcgtggattcgtatttacgtgttcggcggggtcgtagtagaaaggttcggattttttaggacgatcggtcggtgggggtcggtggggtcgtagattcggggggcggggggcgttaggttttcgggttttgttttcgtttcgtggggaatagtaggacggcgtcgaggtcgtttcgttttttttcgcgtttatttgtcgggaggggatttcgtgtttcgatttgaaggtgacggtagagtttgcgggaggtttaggtcggtttcgttttacgggtttcgggggcgattttcgcgttgatattggcgtttaggtcgcggtttttgttttcgcgtttatttacgtcgggtttggttttcgttttttcgggaaaagtttcgtcggcggtcgcgagagcgcggaagcgtagtcgtagtgatcgcgagataaagattcggcggcgggggaggcggcggagagatttcgttagcgcggagattttagggaagtttttttggaagatttggtgttggttcgttttttcgggattttattttttttatgtggataacgggggcggggt

SEQ ID NO: 18922 - DNA, 661 bp, Artificial Sequence
  chemically treated genomic DNA (Homo sapiens) CpG-island No: 18922
accccgcccccgttatccacataaaaaaaataaaatcccgaaaaaacgaaccaacaccaaatcttccaaaaaaacttccctaaaatctccgcgctaacgaaatctctccgccgcctcccccgccgccgaatctttatctcgcgatcactacgactacgcttccgcgctctcgcgaccgccgacgaaacttttcccgaaaaaacgaaaaccaaacccgacgtaaataaacgcgaaaacaaaaaccgcgacctaaacgccaatatcaacgcgaaaatcgcccccgaaacccgtaaaacgaaaccgacctaaacctcccgcaaactctaccgtcaccttcaaatcgaaacacgaaatcccctcccgacaaataaacgcgaaaaaaaacgaaacgacctcgacgccgtcctactattccccacgaaacgaaaacaaaacccgaaaacctaacgccccccgccccccgaatctacgaccccaccgacccccaccgaccgatcgtcctaaaaaatccgaacctttctactacgaccccgccgaacacgtaaatacgaatccacgcgattaaaaaaatcgctaaaaacgaaacgcaacaaatactaattacctaaaaacgactatcgatattctaaacacaacgtaacgacccgaattaaatcgattc

SEQ ID NO: 18923 - DNA, 661 bp, Artificial Sequence
  chemically treated genomic DNA (Homo sapiens) CpG-island No: 18923
atttcgttttcgttgtttatataaggaaaatgaggtttcgggagagcggattagtattaggttttttagagaagtttttttggggttttcgcgttggcggggttttttcgtcgtttttttcgtcgtcgggtttttgtttcgcggttattacggttgcgttttcgcgttttcgcggtcgtcggcggggtttttttcgggggagcgagggttaggttcggcgtgggtgggcgcggaggtaggggtcgcggtttggacgttaatgttagcgcgagggtcgttttcgggattcgtagggcgggatcggtttaggtttttcgtaggttttgtcgttatttttaggtcggagtacggggttttttttcggtaaatgggcgcggaggaaagcgaaacggtttcggcgtcgttttgttgttttttacggggcgggggtaggattcggaagtttggcgtttttcgtttttcgagtttgcggttttatcggtttttatcggtcgatcgttttggggggttcgagtttttttgttgcggtttcgtcgggtacgtggatgcgagtttacgcggttggggaggtcgttggaaacggggcgtagtaggtgttggttgtttgggagcgattgtcggtgttttgaatataacgtggcggttcgggttgagtcgattt

SEQ ID NO: 18924 - DNA, 661 bp, Artificial Sequence
  chemically treated genomic DNA (Homo sapiens) CpG-island No: 18924
aaatcgactcaacccgaaccgccacgttatattcaaaacaccgacaatcgctcccaaacaaccaacacctactacgccccgtttccaacgacctccccaaccgcgtaaactcgcatccacgtacccgacgaaaccgcaacaaaaaaactcgaaccccccaaaacgatcgaccgataaaaaccgataaaaccgcaaactcgaaaaacgaaaaacgccaaacttccgaatcctacccccgccccgtaaaaaacaacaaaacgacgccgaaaccgtttcgctttcctccgcgcccatttaccgaaaaaaaaccccgtactccgacctaaaaataacgacaaaacctacgaaaaacctaaaccgatcccgccctacgaatcccgaaaacgaccctcgcgctaacattaacgtccaaaccgcgacccctacctccgcgcccacccacgccgaacctaaccctcgctcccccgaaaaaaaccccgccgacgaccgcgaaaacgcgaaaacgcaaccgtaataaccgcgaaacaaaaacccgacgacgaaaaaaacgacgaaaaaaccccgccaacgcgaaaaccccaaaaaaacttctctaaaaaacctaatactaatccgctctcccgaaacctcattttccttatataaacaacgaaaacgaaat

SEQ ID NO: 18925 - DNA, 1727 bp, Artificial Sequence
  chemically treated genomic DNA (Homo sapiens) CpG-island No: 18925
gcgggtagtatcgtagattcgagtttttacgtagttcgcgttaggggaggcggtcgtttgggaagttcgtttttcgcgtcgcggttttcgttttcgttagtttcgcgttttttgggaaaggcgggggcgtagcgagttttttttaattagttttttttttgtatggagttttagcgcgttcgtattttttcgcgtagcggaaagtagtttcggtcgggcgtttcgcggttttttagcgttagatatattttattttgagaagtcgacgggatttttagcggggttttttagatggggggttagaggttgcgggaggcgtgcgcgggtagtaagggtaggggtcgcggttaagggtagggggcggggagggcggcgaatttttcgtcgttgtttggagagatggattatggggcgtagggagatggtaaattttaaattacgtacggcgggcgatacgcgttaatcgaatttcgttaacggaagttcggagtcgttttttttcgttttttcgtttcgtcgtttcggacggacgggcgcgcggagttaattttcgttgtcgttggttgtttaaattttattagagttaatgggagcgcgagggggggcggagtcgtttcgcgttagttgggtgcgcgtttttttttttcggcgtttttgtaggtttcgtttttgttttttttttttttcgttcgttgttttcggagtagttggtgttagtgaagtgagggcggcgatgagagcgaaagttgcgttcggttcgtcgttgggggtttgaagcggtttcgcgttttgttcgtttgggtttttttcgattcggattcgcgttcgtgggttttcgtcgcgttcgttcggtttcgcgtcggtttcgcgttttttttttcgtttcggcgttttttttttaggagtcgcgggttttcgttattttcgtacggtttcggttttcgtcgatgtcggttatggtggagaagggtttcgaggttttagggaagcggagagggaggaataacgcggtcgttttcgttttcgtcgtcgtcgttttcgtcgtcgtttcggtcgtttgcgtttcgttagtcgttattgtcgtttcgggcgtcgtcgtttttttagtttcggtcgtcgtcgttttagtcgtcgtcgtttttaataatggttagaataaaagtttggcggcggcggcgtttaatggtaatagtagtagtaatttttgggaggaaggtagttcgggttcgtttagcgacgaggagtacggtaggtggtagtcgttttcgcggtttcgggtttcgcgtttcgcgtcgcgttgatcgtcgtattttgtttttttcgtaggtggcggtggtatgagggtcggattttagtattaggcggtggtgttcgatttcgatttcggtgagtagcggtttcggtcggtcggcggcggggatgagcgggagtttcgggttttcggcgagttcgagggggcgggagttcgtcgataattttttttttgtgcgttcgttttgtcgttcgtggggagaatagtagggcgaggacgaggaggcgtatacgtatacgagtgttttgtaaacgtgtttttgtattcgggggaggttaggtcgtttttagtagggtcggcgtcgttgtttttttgcgttttcgaggattgcgggtggcgtcggaggtggttatatttggtttgggggcgttgggggtttttgcgtttaggtgagttgcgtttcggttaggggtaa

SEQ ID NO: 18926 - DNA, 1727 bp, Artificial Sequence
  chemically treated genomic DNA (Homo sapiens) CpG-island No: 18926
ttacccctaaccgaaacgcaactcacctaaacgcaaaaacccccaacgcccccaaaccaaatataaccacctccgacgccacccgcaatcctcgaaaacgcaaaaaaacaacgacgccgaccctactaaaaacgacctaacctcccccgaatacaaaaacacgtttacaaaacactcgtatacgtatacgcctcctcgtcctcgccctactattctccccacgaacgacaaaacgaacgcacaaaaaaaaaattatcgacgaactcccgccccctcgaactcgccgaaaacccgaaactcccgctcatccccgccgccgaccgaccgaaaccgctactcaccgaaatcgaaatcgaacaccaccgcctaatactaaaatccgaccctcataccaccgccacctacgaaaaaaacaaaatacgacgatcaacgcgacgcgaaacgcgaaacccgaaaccgcgaaaacgactaccacctaccgtactcctcgtcgctaaacgaacccgaactaccttcctcccaaaaattactactactattaccattaaacgccgccgccgccaaacttttattctaaccattattaaaaacgacgacgactaaaacgacgacgaccgaaactaaaaaaacgacgacgcccgaaacgacaataacgactaacgaaacgcaaacgaccgaaacgacgacgaaaacgacgacgacgaaaacgaaaacgaccgcgttattcctccctctccgcttccctaaaacctcgaaacccttctccaccataaccgacatcgacgaaaaccgaaaccgtacgaaaataacgaaaacccgcgactcctaaaaaaaaaacgccgaaacgaaaaaaaaaacgcgaaaccgacgcgaaaccgaacgaacgcgacgaaaacccacgaacgcgaatccgaatcgaaaaaaacccaaacgaacaaaacgcgaaaccgcttcaaacccccaacgacgaaccgaacgcaactttcgctctcatcgccgccctcacttcactaacaccaactactccgaaaacaacgaacgaaaaaaaaaaaaaacaaaaacgaaacctacaaaaacgccgaaaaaaaaaaacgcgcacccaactaacgcgaaacgactccgccccccctcgcgctcccattaactctaataaaatttaaacaaccaacgacaacgaaaattaactccgcgcgcccgtccgtccgaaacgacgaaacgaaaaaacgaaaaaaaacgactccgaacttccgttaacgaaattcgattaacgcgtatcgcccgccgtacgtaatttaaaatttaccatctccctacgccccataatccatctctccaaacaacgacgaaaaattcgccgccctccccgccccctacccttaaccgcgacccctacccttactacccgcgcacgcctcccgcaacctctaaccccccatctaaaaaaccccgctaaaaatcccgtcgacttctcaaaataaaatatatctaacgctaaaaaaccgcgaaacgcccgaccgaaactactttccgctacgcgaaaaaatacgaacgcgctaaaactccatacaaaaaaaaaactaattaaaaaaaactcgctacgcccccgcctttcccaaaaaacgcgaaactaacgaaaacgaaaaccgcgacgcgaaaaacgaacttcccaaacgaccgcctcccctaacgcgaactacgtaaaaactcgaatctacgatactacccgc

SEQ ID NO: 18927 - DNA, 1727 bp, Artificial Sequence
  chemically treated genomic DNA (Homo sapiens) CpG-island No: 18927
ttatttttggtcgaggcgtagtttatttggacgtagggatttttagcgtttttaggttaggtgtggttattttcgacgttattcgtagttttcggaggcgtaagggggtagcggcgtcggttttgttgggggcgatttggtttttttcgggtgtagaggtacgtttgtagaatattcgtgtgcgtgtgcgttttttcgttttcgttttgttgttttttttacggacggtagggcgaacgtataaaaagaaagttgtcggcgggttttcgttttttcgggttcgtcggggattcggggttttcgtttattttcgtcgtcggtcggtcggggtcgttatttatcggggtcgaagtcgggtattatcgtttggtattggggttcgatttttatgttatcgttatttgcgggggaagtagaatacggcggttagcgcggcgcggggcgcggggttcggggtcgcgggggcggttgttatttatcgtgtttttcgtcgttggacgagttcgagttgttttttttttaggagttgttgttgttgttgttattgggcgtcgtcgtcgttaaatttttattttggttattattgggggcggcggcggttgaggcggcggcggtcgaggttgaggaggcggcggcgttcgaggcggtagtggcggttggcgaggcgtaggcggtcgaggcggcggcggaggcggcggcggcggaggcggaggcggtcgcgttgttttttttttttcgtttttttgagatttcggggtttttttttattatggtcggtatcggcgggggtcggggtcgtgcgaaagtggcggggattcgcggtttttgaggagggggcgtcgagacgggggagggggcgcggggtcggcgcggggtcgggcgggcgcggcgggagtttacgggcgcgagttcgagtcgggggaggtttaaacgggtagagcgcggagtcgttttaagtttttagcgacgagtcgagcgtaattttcgtttttatcgtcgtttttattttattggtattaattatttcgggagtagcgagcggagaggggaggaggtaggggcggggtttgtaggggcgtcgggggaggggggcgcgtatttaattgacgcgagacggtttcgttttttttcgcgtttttattggttttggtgggatttggatagttagcggtagcgagggttggtttcgcgcgttcgttcgttcggggcggcggggcgggggagcggggaggggcggtttcgggttttcgttggcgaggttcggttgacgcgtatcgttcgtcgtacgtggtttgaggtttgttatttttttacgttttatgatttatttttttaggtagcggcgaggagttcgtcgtttttttcgttttttatttttggtcgcggtttttgtttttgttgttcgcgtacgtttttcgtagtttttggttttttatttgaaggatttcgttgagagtttcgtcgattttttaaagtaaaatgtgtttggcgttgggaagtcgcggagcgttcggtcgggattatttttcgttgcgcggaggagtacgggcgcgttaagattttatataaagaggaaattaattgggggaaattcgttgcgttttcgttttttttaggggacgcggggttggcgggggcgggggtcgcggcgcgggggacgggttttttaggcggtcgttttttttggcgcgagttgcgtggggattcgggtttgcggtgttgttcgt

SEQ ID NO: 18928 - DNA, 1727 bp, Artificial Sequence
  chemically treated genomic DNA (Homo sapiens) CpG-island No: 18928
acgaacaacaccgcaaacccgaatccccacgcaactcgcgccaaaaaaaacgaccgcctaaaaaacccgtcccccgcgccgcgacccccgcccccgccaaccccgcgtcccctaaaaaaaacgaaaacgcaacgaatttcccccaattaatttcctctttatataaaatcttaacgcgcccgtactcctccgcgcaacgaaaaataatcccgaccgaacgctccgcgacttcccaacgccaaacacattttactttaaaaaatcgacgaaactctcaacgaaatccttcaaataaaaaaccaaaaactacgaaaaacgtacgcgaacaacaaaaacaaaaaccgcgaccaaaaataaaaaacgaaaaaaacgacgaactcctcgccgctacctaaaaaaataaatcataaaacgtaaaaaaataacaaacctcaaaccacgtacgacgaacgatacgcgtcaaccgaacctcgccaacgaaaacccgaaaccgcccctccccgctcccccgccccgccgccccgaacgaacgaacgcgcgaaaccaaccctcgctaccgctaactatccaaatcccaccaaaaccaataaaaacgcgaaaaaaaacgaaaccgtctcgcgtcaattaaatacgcgcccccctcccccgacgcccctacaaaccccgcccctacctcctcccctctccgctcgctactcccgaaataattaataccaataaaataaaaacgacgataaaaacgaaaattacgctcgactcgtcgctaaaaacttaaaacgactccgcgctctacccgtttaaacctcccccgactcgaactcgcgcccgtaaactcccgccgcgcccgcccgaccccgcgccgaccccgcgccccctcccccgtctcgacgccccctcctcaaaaaccgcgaatccccgccactttcgcacgaccccgacccccgccgataccgaccataataaaaaaaaaccccgaaatctcaaaaaaacgaaaaaaaaaaaacaacgcgaccgcctccgcctccgccgccgccgcctccgccgccgcctcgaccgcctacgcctcgccaaccgccactaccgcctcgaacgccgccgcctcctcaacctcgaccgccgccgcctcaaccgccgccgcccccaataataaccaaaataaaaatttaacgacgacgacgcccaataacaacaacaacaacaactcctaaaaaaaaaacaactcgaactcgtccaacgacgaaaaacacgataaataacaaccgcccccgcgaccccgaaccccgcgccccgcgccgcgctaaccgccgtattctacttcccccgcaaataacgataacataaaaatcgaaccccaataccaaacgataatacccgacttcgaccccgataaataacgaccccgaccgaccgacgacgaaaataaacgaaaaccccgaatccccgacgaacccgaaaaaacgaaaacccgccgacaactttctttttatacgttcgccctaccgtccgtaaaaaaaacaacaaaacgaaaacgaaaaaacgcacacgcacacgaatattctacaaacgtacctctacacccgaaaaaaaccaaatcgcccccaacaaaaccgacgccgctacccccttacgcctccgaaaactacgaataacgtcgaaaataaccacacctaacctaaaaacgctaaaaatccctacgtccaaataaactacgcctcgaccaaaaataa

SEQ ID NO: 18929 - DNA, 595 bp, Artificial Sequence
  chemically treated genomic DNA (Homo sapiens) CpG-island No: 18929
ggaacgtttcgcgggagaatatttgcgttaggggtcgggggtcgggggtcgcggcgggcgaaattcgagaggttcgggttttttttgtgcgcggtcggggaggggggcgtttgtcgggtcggggttggaggatttgcgcgcggtttcgggaggtttcgtttcgttttttagtttgtgaaatggggcgacggtttgggcgtggcggcgagtttttgttcgttgtcggcgggcgcggtcgtcgaggatatagttaggggaggcgtagaaatattcggaggcggtatcgtcgtttttttttcgggattttatatttcgtaggtttaggaggaaggcgcggttcgaggttttcggggcggggtgttttcgagacgggaattcgaattcgacggttttcgtttcgtttgcgtttttttaaggttttcggacgggttttagtggttttttcgtttttttttatcgcgtttcggtttttcgggcggggggtggggggggtcgcgtgcggacggttttttatttcgcgcgtgcgtatttttttttttttaggagattaagtggggattttgaattttgtttttagttttgatggggaggagta

SEQ ID NO: 18930 - DNA, 595 bp, Artificial Sequence
  chemically treated genomic DNA (Homo sapiens) CpG-island No: 18930
tactcctccccatcaaaactaaaaacaaaattcaaaatccccacttaatctcctaaaaaaaaaaaaatacgcacgcgcgaaataaaaaaccgtccgcacgcgaccccccccaccccccgcccgaaaaaccgaaacgcgataaaaaaaaacgaaaaaaccactaaaacccgtccgaaaaccttaaaaaaacgcaaacgaaacgaaaaccgtcgaattcgaattcccgtctcgaaaacaccccgccccgaaaacctcgaaccgcgccttcctcctaaacctacgaaatataaaatcccgaaaaaaaaacgacgataccgcctccgaatatttctacgcctcccctaactatatcctcgacgaccgcgcccgccgacaacgaacaaaaactcgccgccacgcccaaaccgtcgccccatttcacaaactaaaaaacgaaacgaaacctcccgaaaccgcgcgcaaatcctccaaccccgacccgacaaacgcccccctccccgaccgcgcacaaaaaaaacccgaacctctcgaatttcgcccgccgcgacccccgacccccgacccctaacgcaaatattctcccgcgaaacgttcc

SEQ ID NO: 18931 - DNA, 595 bp, Artificial Sequence
  chemically treated genomic DNA (Homo sapiens) CpG-island No: 18931
tatttttttttattagggttggagatagggtttagagtttttatttaattttttgggggaggagaggtgcgtacgcgcggggtggggaatcgttcgtacgcgattttttttatttttcgttcggggagtcgggacgcggtggggaggggcggggaagttattgaggttcgttcgggagttttgaaggggcgtaggcggaacggaggtcgtcgggttcgggttttcgtttcggggatatttcgtttcggaggtttcgggtcgcgttttttttttgaatttgcggggtgtgggatttcggggaggagacggcggtgtcgttttcgggtgtttttgcgttttttttagttgtgttttcgacgatcgcgttcgtcggtagcggataagaattcgtcgttacgtttaggtcgtcgttttattttatagattggaaggcgaggcggggtttttcggggtcgcgcgtaggttttttagtttcgattcggtaggcgttttttttttcggtcgcgtataggaggagttcgggtttttcggatttcgttcgtcgcggttttcggttttcggtttttggcgtagatgttttttcgcggggcgtttt

SEQ ID NO: 18932 - DNA, 595 bp, Artificial Sequence
  chemically treated genomic DNA (Homo sapiens) CpG-island No: 18932
aaaacgccccgcgaaaaaacatctacgccaaaaaccgaaaaccgaaaaccgcgacgaacgaaatccgaaaaacccgaactcctcctatacgcgaccgaaaaaaaaaacgcctaccgaatcgaaactaaaaaacctacgcgcgaccccgaaaaaccccgcctcgccttccaatctataaaataaaacgacgacctaaacgtaacgacgaattcttatccgctaccgacgaacgcgatcgtcgaaaacacaactaaaaaaaacgcaaaaacacccgaaaacgacaccgccgtctcctccccgaaatcccacaccccgcaaattcaaaaaaaaaacgcgacccgaaacctccgaaacgaaatatccccgaaacgaaaacccgaacccgacgacctccgttccgcctacgccccttcaaaactcccgaacgaacctcaataacttccccgcccctccccaccgcgtcccgactccccgaacgaaaaataaaaaaaatcgcgtacgaacgattccccaccccgcgcgtacgcacctctcctcccccaaaaaattaaataaaaactctaaaccctatctccaaccctaataaaaaaaaata

SEQ ID NO: 18933 - DNA, 567 bp, Artificial Sequence
  chemically treated genomic DNA (Homo sapiens) CpG-island No: 18933
ttttcgggttttaagtttttttgagaggacgacgtggagagtggagataaagatgtttaaaagttaggaaatcgtaggttcggaagtttttacgtatgtttttgaacgtagcgttatttcggggttgcggcgggattaagcgggacgtttgtaggttgtcggcggcgggggtcgcgagtcgtcggcgtaggtcgttttagttggaagattttatcgttagggttttagggggttgcggacgttttcgaggggtttaaggcgaaagaacgtagttcgtttgtcggttacgtgatcgttttcgttcgcgttcgtagcgattacgtgattgtgcgttcgcggcgtcgattgattgggagttttttggttacgttttaagcgttagtttcgggtttcggggggcggtgttgttgcggttgttatggcgtttttcgagcgcgtaggcgtgggtttagagtagtttttcgggtatttgttatcggttttcggtagggttggttatttttgtttgttgagtttcgcgttttgcgttttttggtttttagtaatttgtagggtagtcgtttttta

SEQ ID NO: 18934 - DNA, 567 bp, Artificial Sequence
  chemically treated genomic DNA (Homo sapiens) CpG-island No: 18934
taaaaaacgactaccctacaaattactaaaaaccaaaaaacgcaaaacgcgaaactcaacaaacaaaaataaccaaccctaccgaaaaccgataacaaatacccgaaaaactactctaaacccacgcctacgcgctcgaaaaacgccataacaaccgcaacaacaccgccccccgaaacccgaaactaacgcttaaaacgtaaccaaaaaactcccaatcaatcgacgccgcgaacgcacaatcacgtaatcgctacgaacgcgaacgaaaacgatcacgtaaccgacaaacgaactacgttctttcgccttaaacccctcgaaaacgtccgcaaccccctaaaaccctaacgataaaatcttccaactaaaacgacctacgccgacgactcgcgacccccgccgccgacaacctacaaacgtcccgcttaatcccgccgcaaccccgaaataacgctacgttcaaaaacatacgtaaaaacttccgaacctacgatttcctaacttttaaacatctttatctccactctccacgtcgtcctctcaaaaaaacttaaaacccgaaaa

SEQ ID NO: 18935 - DNA, 567 bp, Artificial Sequence
  chemically treated genomic DNA (Homo sapiens) CpG-island No: 18935
tgagggacggttgttttgtaagttgttggggattaaaggacgtagggcgcgaagtttagtaagtaaaggtgattagttttatcgagagtcggtagtaaatattcgaaaagttattttgggtttacgtttgcgcgttcggaagacgttatggtaatcgtagtagtatcgtttttcgaagttcggggttggcgtttagggcgtggttagggagtttttagttaatcgacgtcgcggacgtatagttacgtggtcgttgcggacgcggacggggacggttacgtggtcgataagcgggttgcgttttttcgttttgggtttttcggaagcgttcgtagttttttggaattttagcggtggggttttttagttggagcggtttacgtcggcggttcgcggttttcgtcgtcgatagtttgtaagcgtttcgtttggtttcgtcgtagtttcgagatggcgttgcgtttagaggtatgcgtgggggttttcgagtttgcgattttttggtttttgagtatttttgtttttattttttacgtcgtttttttaggaaaatttgaggttcgagag

SEQ ID NO: 18936 - DNA, 567 bp, Artificial Sequence
  chemically treated genomic DNA (Homo sapiens) CpG-island No: 18936
ctctcgaacctcaaattttcctaaaaaaacgacgtaaaaaataaaaacaaaaatactcaaaaaccaaaaaatcgcaaactcgaaaacccccacgcatacctctaaacgcaacgccatctcgaaactacgacgaaaccaaacgaaacgcttacaaactatcgacgacgaaaaccgcgaaccgccgacgtaaaccgctccaactaaaaaaccccaccgctaaaattccaaaaaactacgaacgcttccgaaaaacccaaaacgaaaaaacgcaacccgcttatcgaccacgtaaccgtccccgtccgcgtccgcaacgaccacgtaactatacgtccgcgacgtcgattaactaaaaactccctaaccacgccctaaacgccaaccccgaacttcgaaaaacgatactactacgattaccataacgtcttccgaacgcgcaaacgtaaacccaaaataacttttcgaatatttactaccgactctcgataaaactaatcacctttacttactaaacttcgcgccctacgtcctttaatccccaacaacttacaaaacaaccgtccctca

SEQ ID NO: 18937 - DNA, 630 bp, Artificial Sequence
  chemically treated genomic DNA (Homo sapiens) CpG-island No: 18937
gtgcgcgacgggttcgtttgatcgtggtcggttttgtatcgtggggcgttcgtttgattggagtaacggttagttggggggttcggggagcgtcggggtttggggcgggttttggatcgaaatagattgcgtggaagggcgagtttttcggtgaaggtgggagtcggggcggggttgtttcggggcggagttaggtagcgtcgggtttttagggtagagtcgggtgcgatttggcgttgattcggtttttgtatttttttttcgtagttggtagagcggtttttcgacgcggcgttggtttcgatgtttgtgcgggagttaaatcggtagttgcggggttgcgggcgcgacgaggcgttgcggttgaagtagaggcgtcgtacgttgaagaatcgcggttacgcgtaggtttgtcgttttaagcggttgtagtagcggcgcgggttggaggtcgagcgcgttcgtttggtcgtttagttggacgcgttgcgggtcgaggtggttcgtttggttcgggagcgcgatttttataaggttcgttgtgatcggttaatttcgagcggtttcgggttcggggattttttttatttttttttttgagtcgtttagagtattttgtggtgtagtggg

SEQ ID NO: 18938 - DNA, 630 bp, Artificial Sequence
  chemically treated genomic DNA (Homo sapiens) CpG-island No: 18938
cccactacaccacaaaatactctaaacgactcaaaaaaaaaaataaaaaaaatccccgaacccgaaaccgctcgaaattaaccgatcacaacgaaccttataaaaatcgcgctcccgaaccaaacgaaccacctcgacccgcaacgcgtccaactaaacgaccaaacgaacgcgctcgacctccaacccgcgccgctactacaaccgcttaaaacgacaaacctacgcgtaaccgcgattcttcaacgtacgacgcctctacttcaaccgcaacgcctcgtcgcgcccgcaaccccgcaactaccgatttaactcccgcacaaacatcgaaaccaacgccgcgtcgaaaaaccgctctaccaactacgaaaaaaaaatacaaaaaccgaatcaacgccaaatcgcacccgactctaccctaaaaacccgacgctacctaactccgccccgaaacaaccccgccccgactcccaccttcaccgaaaaactcgcccttccacgcaatctatttcgatccaaaacccgccccaaaccccgacgctccccgaaccccccaactaaccgttactccaatcaaacgaacgccccacgatacaaaaccgaccacgatcaaacgaacccgtcgcgcac

SEQ ID NO: 18939 - DNA, 630 bp, Artificial Sequence
  chemically treated genomic DNA (Homo sapiens) CpG-island No: 18939
tttattatattataaggtgttttgaacggtttagaggaagaggtgggaggggttttcggattcggggtcgttcgaggttagtcggttatagcgagttttgtagagatcgcgttttcgggttaggcgggttatttcggttcgtagcgcgtttagttgggcggttaggcgggcgcgttcggtttttagttcgcgtcgttgttgtagtcgtttggagcgataggtttgcgcgtagtcgcggttttttagcgtgcggcgtttttgttttagtcgtagcgtttcgtcgcgttcgtagtttcgtagttgtcggtttagttttcgtatagatatcgagattagcgtcgcgtcggaaaatcgttttgttagttgcggagggagaatgtagaaatcgggttagcgttaggtcgtattcggttttgttttgagggttcgacgttatttggtttcgtttcgggatagtttcgtttcggtttttatttttatcggaaggttcgtttttttacgtagtttgtttcggtttagagttcgttttaggtttcgacgtttttcgggttttttagttgatcgttgttttagttaggcgggcgttttacggtgtagggtcggttacggttaggcgagttcgtcgcgtat

SEQ ID NO: 18940 - DNA, 630 bp, Artificial Sequence
  chemically treated genomic DNA (Homo sapiens) CpG-island No: 18940
atacgcgacgaactcgcctaaccgtaaccgaccctacaccgtaaaacgcccgcctaactaaaacaacgatcaactaaaaaacccgaaaaacgtcgaaacctaaaacgaactctaaaccgaaacaaactacgtaaaaaaacgaaccttccgataaaaataaaaaccgaaacgaaactatcccgaaacgaaaccaaataacgtcgaaccctcaaaacaaaaccgaatacgacctaacgctaacccgatttctacattctccctccgcaactaacaaaacgattttccgacgcgacgctaatctcgatatctatacgaaaactaaaccgacaactacgaaactacgaacgcgacgaaacgctacgactaaaacaaaaacgccgcacgctaaaaaaccgcgactacgcgcaaacctatcgctccaaacgactacaacaacgacgcgaactaaaaaccgaacgcgcccgcctaaccgcccaactaaacgcgctacgaaccgaaataacccgcctaacccgaaaacgcgatctctacaaaactcgctataaccgactaacctcgaacgaccccgaatccgaaaacccctcccacctcttcctctaaaccgttcaaaacaccttataatataataaa

SEQ ID NO: 18941 - DNA, 599 bp, Artificial Sequence
  chemically treated genomic DNA (Homo sapiens) CpG-island No: 18941
gaaggttttttgcgttttaggtaaggagtttttcgttaggttgaggtcgtcgtcggtgagggcggaagtggtaagattgacgtgttttgggtcgcgttgtcgatcgtcgggaggattttcgtttcgtcgaagacgggcggggtaagtcgagttttacggggttttcggagttgggtcgggtttttagatggagaaggcgtaacggggagtttttgagtaagttagagcggtgtttagcgcggtgtagtcgtagtcgtcgttgttaggcgtagtaacgggtaatttcgtagaagtcggtcggtaggttttttttaattcgtcgtagcgcgtcgttgtgggagagattttagtaggagtttaaaggtagttacgggggcgcgaagtggtcgtggcgtcgtttcggttagtttttttcgcgcggtgaggatttcggggttgtggcgggaagggattcgaggtgcgagatcgagcggcgttgttatggaaacgggttagggcgcgtagtagaggtttcgggttagacgggttgcgggtggggtgaattttaggttgggaggatgagagagtagaggtggagcggggtttttgggatagagaga

SEQ ID NO: 18942 - DNA, 599 bp, Artificial Sequence
  chemically treated genomic DNA (Homo sapiens) CpG-island No: 18942
tctctctatcccaaaaaccccgctccacctctactctctcatcctcccaacctaaaattcaccccacccgcaacccgtctaacccgaaacctctactacgcgccctaacccgtttccataacaacgccgctcgatctcgcacctcgaatcccttcccgccacaaccccgaaatcctcaccgcgcgaaaaaaactaaccgaaacgacgccacgaccacttcgcgcccccgtaactacctttaaactcctactaaaatctctcccacaacgacgcgctacgacgaattaaaaaaaacctaccgaccgacttctacgaaattacccgttactacgcctaacaacgacgactacgactacaccgcgctaaacaccgctctaacttactcaaaaactccccgttacgccttctccatctaaaaacccgacccaactccgaaaaccccgtaaaactcgacttaccccgcccgtcttcgacgaaacgaaaatcctcccgacgatcgacaacgcgacccaaaacacgtcaatcttaccacttccgccctcaccgacgacgacctcaacctaacgaaaaactccttacctaaaacgcaaaaaaccttc

SEQ ID NO: 18943 - DNA, 599 bp, Artificial Sequence
  chemically treated genomic DNA (Homo sapiens) CpG-island No: 18943
tttttttattttaaagatttcgttttatttttgtttttttatttttttaatttggggtttattttattcgtagttcgtttggttcggggtttttattacgcgttttggttcgtttttatggtaacgtcgttcggtttcgtatttcgggttttttttcgttatagtttcggggtttttatcgcgcgggaagggttggtcgaggcggcgttacggttatttcgcgttttcgtagttgtttttgggtttttgttggggttttttttatagcggcgcgttacggcgggttggagaggatttgtcgatcgatttttacggggttgttcgttgttgcgtttgatagcggcggttgcggttatatcgcgttggatatcgttttggtttatttaagaatttttcgttgcgttttttttatttggaggttcggtttagtttcggggatttcgtgaggttcggtttgtttcgttcgttttcggcgaggcgggggttttttcggcgatcggtagcgcggtttaggatacgttagttttattattttcgtttttatcggcggcgattttagtttggcggaaagttttttgtttggaacgtagagggttttt

SEQ ID NO: 18944 - DNA, 599 bp, Artificial Sequence
  chemically treated genomic DNA (Homo sapiens) CpG-island No: 18944
aaaaaccctctacgttccaaacaaaaaactttccgccaaactaaaatcgccgccgataaaaacgaaaataataaaactaacgtatcctaaaccgcgctaccgatcgccgaaaaaacccccgcctcgccgaaaacgaacgaaacaaaccgaacctcacgaaatccccgaaactaaaccgaacctccaaataaaaaaaacgcaacgaaaaattcttaaataaaccaaaacgatatccaacgcgatataaccgcaaccgccgctatcaaacgcaacaacgaacaaccccgtaaaaatcgatcgacaaatcctctccaacccgccgtaacgcgccgctataaaaaaaaccccaacaaaaacccaaaaacaactacgaaaacgcgaaataaccgtaacgccgcctcgaccaacccttcccgcgcgataaaaaccccgaaactataacgaaaaaaaacccgaaatacgaaaccgaacgacgttaccataaaaacgaaccaaaacgcgtaataaaaaccccgaaccaaacgaactacgaataaaataaaccccaaattaaaaaaataaaaaaacaaaaataaaacgaaatctttaaaataaaaaaa

SEQ ID NO: 18945 - DNA, 603 bp, Artificial Sequence
  chemically treated genomic DNA (Homo sapiens) CpG-island No: 18945
gcgaatttgcgggcggggtacgttaattagaataagattagtttattcggtatagtattagtagtgagttaggcggcgatcggtcgaaagtttttaaagtaaaaagtagttttaattttgtttaagagtacggagttcgtcgggttattatcgttggtcgattttttaagtattttttgttaaggcgtttgcgtcgtttttacggtttcggtatttttaaattgtcggttcgtagttgaggtttcgtatttttaaattgttcgttcgtttttgtcggagggatttcgatggtcgcgaggatttttagtcgattattttggtggttcggatgtgttttattacggggcgacgttcgtaggtagttggttttataagcgtattatcgggaaagaaacgaggcggtgatagttatcggtaggaatttttttaattcgttagcgttagttagttcgtcggcggttattattgcgtaggcgtcgtttgcgagcgtcgtcgtttagaaatattttcgtaaattttaattatcgagaggattttggttgcgagtagagagttttcgatagagattggtattggtagggtcgtatttagcgttttttttga

SEQ ID NO: 18946 - DNA, 603 bp, Artificial Sequence
  chemically treated genomic DNA (Homo sapiens) CpG-island No: 18946
tcaaaaaaaacgctaaatacgaccctaccaataccaatctctatcgaaaactctctactcgcaaccaaaatcctctcgataattaaaatttacgaaaatatttctaaacgacgacgctcgcaaacgacgcctacgcaataataaccgccgacgaactaactaacgctaacgaattaaaaaaattcctaccgataactatcaccgcctcgtttctttcccgataatacgcttataaaaccaactacctacgaacgtcgccccgtaataaaacacatccgaaccaccaaaataatcgactaaaaatcctcgcgaccatcgaaatccctccgacaaaaacgaacgaacaatttaaaaatacgaaacctcaactacgaaccgacaatttaaaaataccgaaaccgtaaaaacgacgcaaacgccttaacaaaaaatacttaaaaaatcgaccaacgataataacccgacgaactccgtactcttaaacaaaattaaaactactttttactttaaaaactttcgaccgatcgccgcctaactcactactaatactataccgaataaactaatcttattctaattaacgtaccccgcccgcaaattcgc

SEQ ID NO: 18947 - DNA, 603 bp, Artificial Sequence
  chemically treated genomic DNA (Homo sapiens) CpG-island No: 18947
ttagagagggcgttgggtgcgattttgttagtattaatttttgtcggagattttttgttcgtagttaggattttttcggtggttggggtttgcggaagtgtttttaggcgacggcgttcgtagacgacgtttgcgtagtggtagtcgtcggcgggttggttgacgttggcgggttgagggagtttttgtcggtggttgttatcgtttcgtttttttttcgatggtgcgtttgtaaggttagttgtttgcgggcgtcgtttcgtgatggagtatattcgaattattaaggtagtcggttggagattttcgcggttatcggggttttttcggtagaggcgggcgggtagtttgggggtgcggggttttagttgcgggtcggtagtttgggggtgtcgaggtcgtgaggacggcgtaggcgttttggtaggaggtgtttggggagtcgattaacggtggtagttcggcgagtttcgtgtttttgggtaagattgaggttgttttttattttgggggttttcggtcgatcgtcgtttggtttattgttggtattgtgtcgggtgagttagttttgttttaattaacgtgtttcgttcgtagattcgt

SEQ ID NO: 18948 - DNA, 603 bp, Artificial Sequence
  chemically treated genomic DNA (Homo sapiens) CpG-island No: 18948
acgaatctacgaacgaaacacgttaattaaaacaaaactaactcacccgacacaataccaacaataaaccaaacgacgatcgaccgaaaacccccaaaataaaaaacaacctcaatcttacccaaaaacacgaaactcgccgaactaccaccgttaatcgactccccaaacacctcctaccaaaacgcctacgccgtcctcacgacctcgacacccccaaactaccgacccgcaactaaaaccccgcacccccaaactacccgcccgcctctaccgaaaaaaccccgataaccgcgaaaatctccaaccgactaccttaataattcgaatatactccatcacgaaacgacgcccgcaaacaactaaccttacaaacgcaccatcgaaaaaaaaacgaaacgataacaaccaccgacaaaaactccctcaacccgccaacgtcaaccaacccgccgacgactaccactacgcaaacgtcgtctacgaacgccgtcgcctaaaaacacttccgcaaaccccaaccaccgaaaaaatcctaactacgaacaaaaaatctccgacaaaaattaatactaacaaaatcgcacccaacgccctctctaa

SEQ ID NO: 18949 - DNA, 525 bp, Artificial Sequence
  chemically treated genomic DNA (Homo sapiens) CpG-island No: 18949
ggcggggcgttagtatcgtttttatttcgattttaggggtttttgcgcgtcgggtgcgtttgttttcggtgcgttcggcgcgcgcgtagcgtcgcgcgtgcgttgacgtgcggtttcgttttttttattttcgtcgcgttgtttgttgttggggttgaatttttcgttttgttttttttgggttattgcgatgttgtacgttttatttcggtattgaggggatagaagcgttttaggtcgttttatttttgttgacggcgtcgcgtttacggtcgttatgtttatcgggtttttttttgggttcgggacgttgggttttattatcgtggttttcggagggatcggtataggcggcgggttttttttcgggatcggtacgtcgaggtaatcgtgtttataaggtttcgatggtttggtgttttttcgcgaggttcggtttgtcgaggtttgtttttaggttgtaaggttgtcgtgcgagtttcgtagtaggagggcgacggttgggtgggggatttttgttgttag

SEQ ID NO: 18950 - DNA, 525 bp, Artificial Sequence
  chemically treated genomic DNA (Homo sapiens) CpG-island No: 18950
ctaacaacaaaaatcccccacccaaccgtcgccctcctactacgaaactcgcacgacaaccttacaacctaaaaacaaacctcgacaaaccgaacctcgcgaaaaaacaccaaaccatcgaaaccttataaacacgattacctcgacgtaccgatcccgaaaaaaaacccgccgcctataccgatccctccgaaaaccacgataataaaacccaacgtcccgaacccaaaaaaaaacccgataaacataacgaccgtaaacgcgacgccgtcaacaaaaataaaacgacctaaaacgcttctatcccctcaataccgaaataaaacgtacaacatcgcaataacccaaaaaaaacaaaacgaaaaattcaaccccaacaacaaacaacgcgacgaaaataaaaaaaacgaaaccgcacgtcaacgcacgcgcgacgctacgcgcgcgccgaacgcaccgaaaacaaacgcacccgacgcgcaaaaacccctaaaatcgaaataaaaacgatactaacgccccgcc

SEQ ID NO: 18951 - DNA, 525 bp, Artificial Sequence
  chemically treated genomic DNA (Homo sapiens) CpG-island No: 18951
ttggtagtaggggttttttatttaatcgtcgtttttttgttgcggggttcgtacggtagttttgtaatttgaaggtagatttcgataagtcgagtttcgcggggaagtattaggttatcgaagttttgtaaatacggttatttcgacgtgtcggtttcgaaagagaattcgtcgtttgtgtcggttttttcgggagttacggtagtggagtttagcgtttcggatttaaaggagaattcggtggatatggcggtcgtgggcgcgacgtcgttagtaaggatggagcgatttgggacgtttttgtttttttagtgtcgaggtagaacgtgtaatatcgtagtggtttagaagagatagggcgggaagtttaattttagtagtaagtagcgcggcgaggatggaggaggcggggtcgtacgttaacgtacgcgcgacgttgcgcgcgcgtcgaacgtatcggaagtaagcgtattcgacgcgtaggggtttttgggatcggagtggaggcggtgttagcgtttcgtt

SEQ ID NO: 18952 - DNA, 525 bp, Artificial Sequence
  chemically treated genomic DNA (Homo sapiens) CpG-island No: 18952
aacgaaacgctaacaccgcctccactccgatcccaaaaacccctacgcgtcgaatacgcttacttccgatacgttcgacgcgcgcgcaacgtcgcgcgtacgttaacgtacgaccccgcctcctccatcctcgccgcgctacttactactaaaattaaacttcccgccctatctcttctaaaccactacgatattacacgttctacctcgacactaaaaaaacaaaaacgtcccaaatcgctccatccttactaacgacgtcgcgcccacgaccgccatatccaccgaattctcctttaaatccgaaacgctaaactccactaccgtaactcccgaaaaaaccgacacaaacgacgaattctctttcgaaaccgacacgtcgaaataaccgtatttacaaaacttcgataacctaatacttccccgcgaaactcgacttatcgaaatctaccttcaaattacaaaactaccgtacgaaccccgcaacaaaaaaacgacgattaaataaaaaacccctactaccaa

SEQ ID NO: 18953 - DNA, 1843 bp, Artificial Sequence
  chemically treated genomic DNA (Homo sapiens) CpG-island No: 18953
gttgttttgcggggtcgcgcgggtgttatcgaggcgggtatagattgtatagtgtttttaagggttcgcgtacgttttttaagatttgttagcgcgcgggaaaaggtaggtttcgagttaattagggttgattcgggggtaagattaggagacgcgacgattggaatcgggtgagtgtggtcgagtcggcgtttcgagggtcgttagtttggattttaggttgggatacgggcgttttcgggtgtaggggatttagaggcgtcgtgcgcggcgggggttgggcgcgaaggcgtcgagacggtattttttttttgtagtatttcgtttcgcggtcggggggagggggcgttatttgatagcgcgtaataatttttttaggtttcgagggggtaagcggtagtcgtcggggttggggggcgtacggcgcgttgttttcgtttaatggcgaggtttgtaaataaaagcgggttttacgcgggtttttagtcgggtggcgaggggcgcggcgtagtagtatcgtagcggtagagttggtgagagggcgaggcggggacgggatagggcgcggggatttagggtatagttttcgggattcgatcgttcggatgaggtattgtttgcgtattcgtaggatttcgtttttaatgttttttttcgggggttcgtcgcgggtttttagtttcgtgcgtcggttttcgggtttttcgttcggtgagttcggtttcgagggcggtacggatcgttaaggtgagcgtttaggacgcgtcgtcgaaaagttaggttcggaggtgtttaagttagggatcgagacgtaaatatagatataaggatgtataagtacgtttttttcgaagttgataaaaattagtcgataaaatataaagtgtcgcggtcgtcgtaggttagcgttgattttttgttgtcgagaggatcgaatgtcgacgttcggacgttgttatttttatttagcgaaggtatttgggttgtacggtttcgtttttttttttcgcgcgagggatgtttttttttgtttttttttttcgtatttttttattttttaagtgtgtgaatacgaaaataatacgtggaaagttcgatcggggggagttaggattcgtcgggagttttagtgtgcgggagacgggggttagaacgtgttcggtacgggtatcgaggtttcgggtattttcgtcgtcgtttttcggggcggtttcggtcggacgttcgcgtattttaggttcgcggtatttattcgcgacggtcgttcgggattttcgcgacggggtcgggtacgatgcggggtagtcgtgtttttggggttgcgggcgttaaggcgttcgcggagttgtagagttgcgcgttcgacggcggcggcgttgttttgtcggtcgcgttcgaattcgttcgtggtttgttaatcggagttgttagggttttttcgtttgcggtttcgggggtcgggtcgcgggagttcgtgggaaatcgagtttcgattgggtcgtttgataatcgtttcgttttcggttagttaattcgaggcggtggatgtaggagcggggcgttcggagttgggttgtagagcgattatgggcgtacgtcgggtattcgcgtcgtagttaggttcggagcgcgcggttggaggggcgcgggcggcgcgcgttttagagatgtttttttgcgaggtttcgttagcgcggttcggggagatcgttcgtaggtagcggaggcgcggcgggtcgggggacgattagggagtttttaataaagtagttttgggagggtcggaggtttttgtttttttcggcgataggttcgcgaagttgtttgttatttcgtataggtg

SEQ ID NO: 18954 - DNA, 1843 bp, Artificial Sequence
  chemically treated genomic DNA (Homo sapiens) CpG-island No: 18954
cacctatacgaaataacaaacaacttcgcgaacctatcgccgaaaaaaacaaaaacctccgaccctcccaaaactactttattaaaaactccctaatcgtcccccgacccgccgcgcctccgctacctacgaacgatctccccgaaccgcgctaacgaaacctcgcaaaaaaacatctctaaaacgcgcgccgcccgcgcccctccaaccgcgcgctccgaacctaactacgacgcgaatacccgacgtacgcccataatcgctctacaacccaactccgaacgccccgctcctacatccaccgcctcgaattaactaaccgaaaacgaaacgattatcaaacgacccaatcgaaactcgatttcccacgaactcccgcgacccgacccccgaaaccgcaaacgaaaaaaccctaacaactccgattaacaaaccacgaacgaattcgaacgcgaccgacaaaacaacgccgccgccgtcgaacgcgcaactctacaactccgcgaacgccttaacgcccgcaaccccaaaaacacgactaccccgcatcgtacccgaccccgtcgcgaaaatcccgaacgaccgtcgcgaataaataccgcgaacctaaaatacgcgaacgtccgaccgaaaccgccccgaaaaacgacgacgaaaatacccgaaacctcgatacccgtaccgaacacgttctaacccccgtctcccgcacactaaaactcccgacgaatcctaactccccccgatcgaactttccacgtattattttcgtattcacacacttaaaaaataaaaaaatacgaaaaaaaaaaacaaaaaaaaacatccctcgcgcgaaaaaaaaaaacgaaaccgtacaacccaaataccttcgctaaataaaaataacaacgtccgaacgtcgacattcgatcctctcgacaacaaaaaatcaacgctaacctacgacgaccgcgacactttatattttatcgactaatttttatcaacttcgaaaaaaacgtacttatacatccttatatctatatttacgtctcgatccctaacttaaacacctccgaacctaacttttcgacgacgcgtcctaaacgctcaccttaacgatccgtaccgccctcgaaaccgaactcaccgaacgaaaaacccgaaaaccgacgcacgaaactaaaaacccgcgacgaacccccgaaaaaaaacattaaaaacgaaatcctacgaatacgcaaacaatacctcatccgaacgatcgaatcccgaaaactataccctaaatccccgcgccctatcccgtccccgcctcgccctctcaccaactctaccgctacgatactactacgccgcgcccctcgccacccgactaaaaacccgcgtaaaacccgcttttatttacaaacctcgccattaaacgaaaacaacgcgccgtacgccccccaaccccgacgactaccgcttaccccctcgaaacctaaaaaaattattacgcgctatcaaataacgccccctccccccgaccgcgaaacgaaatactacaaaaaaaaaataccgtctcgacgccttcgcgcccaacccccgccgcgcacgacgcctctaaatcccctacacccgaaaacgcccgtatcccaacctaaaatccaaactaacgaccctcgaaacgccgactcgaccacactcacccgattccaatcgtcgcgtctcctaatcttacccccgaatcaaccctaattaactcgaaacctaccttttcccgcgcgctaacaaatcttaaaaaacgtacgcgaacccttaaaaacactatacaatctatacccgcctcgataacacccgcgcgaccccgcaaaacaac

SEQ ID NO: 18955 - DNA, 1843 bp, Artificial Sequence
  chemically treated genomic DNA (Homo sapiens) CpG-island No: 18955
tatttatgcgagatgataggtagtttcgcggatttatcgtcgagggaggtagaggttttcggtttttttaaagttgttttgttaggggttttttggtcgtttttcggttcgtcgcgttttcgttgtttgcgggcgattttttcgggtcgcgttgacggagtttcgtaggaaggtatttttggagcgcgcgtcgttcgcgtttttttagtcgcgcgtttcgagtttggttgcggcgcggatattcggcgtgcgtttatagtcgttttatagtttaatttcgaacgtttcgtttttgtatttatcgtttcggattggttggtcggaggcggagcgattgttaggcggtttaatcggagttcggttttttacgggttttcgcggttcggttttcgaggtcgtaggcggaggggttttgatagtttcgattggtagattacgagcgggttcgagcgcggtcggtagagtagcgtcgtcgtcgtcgggcgcgtagttttgtagtttcgcggacgttttggcgttcgtagttttaggggtacggttgtttcgtatcgtgttcggtttcgtcgcggagatttcggacgatcgtcgcgggtgagtatcgcgggtttggggtgcgcgggcgttcggtcggagtcgtttcgggagacggcggcgaggatgttcggagtttcggtgttcgtgtcgggtacgttttgattttcgtttttcgtatattggggttttcggcgggttttagtttttttcgatcgggttttttacgtattgttttcgtgtttatatatttgggaggtggggagatgcggggaggagaggtaggaggaggtatttttcgcgcgaaggagggagacgagatcgtgtagtttaggtgttttcgttggatggaaatgatagcgttcggacgtcggtattcggttttttcggtagtaggaggttagcgttgatttgcggcggtcgcggtattttgtattttatcggttgatttttgttaatttcggggagggcgtgtttgtgtatttttgtgtttatgtttgcgtttcggtttttgatttaggtattttcgggtttggtttttcggcgacgcgttttgggcgtttattttggcgattcgtgtcgttttcggggtcgggtttatcgggcggaaagttcgggggtcggcgtacggagttggggattcgcgacgaattttcggaggggggtattaaaagcggaattttgcgggtgcgtagataatgttttattcgggcggtcgggtttcggggattgtgttttgggttttcgcgttttatttcgttttcgtttcgtttttttattagttttgtcgttgcgatgttgttgcgtcgcgtttttcgttattcggttggggattcgcgtggggttcgtttttgtttatagatttcgttattgggcgagagtagcgcgtcgtgcgttttttagtttcggcggttgtcgtttgttttttcgaaatttggagaagttgttgcgcgttgttaggtgacgtttttttttttcggtcgcggggcgggatgttgtaggggaaagatgtcgtttcggcgttttcgcgtttagttttcgtcgcgtacggcgtttttaggttttttgtattcgggggcgttcgtgttttagtttggggtttaggttggcggttttcggggcgtcgattcggttatatttattcggttttagtcgtcgcgttttttggttttgttttcgggttagttttggttgattcggagtttgttttttttcgcgcgttggtaggttttgaaggacgtgcgcgagtttttggggatattgtgtagtttgtgttcgtttcggtgatattcgcgcggtttcgtagggtagt

SEQ ID NO: 18956 - DNA, 1843 bp, Artificial Sequence
  chemically treated genomic DNA (Homo sapiens) CpG-island No: 18956
actaccctacgaaaccgcgcgaatatcaccgaaacgaacacaaactacacaatatccccaaaaactcgcgcacgtccttcaaaacctaccaacgcgcgaaaaaaaacaaactccgaatcaaccaaaactaacccgaaaacaaaaccaaaaaacgcgacgactaaaaccgaataaatataaccgaatcgacgccccgaaaaccgccaacctaaaccccaaactaaaacacgaacgcccccgaatacaaaaaacctaaaaacgccgtacgcgacgaaaactaaacgcgaaaacgccgaaacgacatctttcccctacaacatcccgccccgcgaccgaaaaaaaaaaacgtcacctaacaacgcgcaacaacttctccaaatttcgaaaaaacaaacgacaaccgccgaaactaaaaaacgcacgacgcgctactctcgcccaataacgaaatctataaacaaaaacgaaccccacgcgaatccccaaccgaataacgaaaaacgcgacgcaacaacatcgcaacgacaaaactaataaaaaaacgaaacgaaaacgaaataaaacgcgaaaacccaaaacacaatccccgaaacccgaccgcccgaataaaacattatctacgcacccgcaaaattccgcttttaatacccccctccgaaaattcgtcgcgaatccccaactccgtacgccgacccccgaactttccgcccgataaacccgaccccgaaaacgacacgaatcgccaaaataaacgcccaaaacgcgtcgccgaaaaaccaaacccgaaaatacctaaatcaaaaaccgaaacgcaaacataaacacaaaaatacacaaacacgccctccccgaaattaacaaaaatcaaccgataaaatacaaaataccgcgaccgccgcaaatcaacgctaacctcctactaccgaaaaaaccgaataccgacgtccgaacgctatcatttccatccaacgaaaacacctaaactacacgatctcgtctccctccttcgcgcgaaaaatacctcctcctacctctcctccccgcatctccccacctcccaaatatataaacacgaaaacaatacgtaaaaaacccgatcgaaaaaaactaaaacccgccgaaaaccccaatatacgaaaaacgaaaatcaaaacgtacccgacacgaacaccgaaactccgaacatcctcgccgccgtctcccgaaacgactccgaccgaacgcccgcgcaccccaaacccgcgatactcacccgcgacgatcgtccgaaatctccgcgacgaaaccgaacacgatacgaaacaaccgtacccctaaaactacgaacgccaaaacgtccgcgaaactacaaaactacgcgcccgacgacgacgacgctactctaccgaccgcgctcgaacccgctcgtaatctaccaatcgaaactatcaaaacccctccgcctacgacctcgaaaaccgaaccgcgaaaacccgtaaaaaaccgaactccgattaaaccgcctaacaatcgctccgcctccgaccaaccaatccgaaacgataaatacaaaaacgaaacgttcgaaattaaactataaaacgactataaacgcacgccgaatatccgcgccgcaaccaaactcgaaacgcgcgactaaaaaaacgcgaacgacgcgcgctccaaaaataccttcctacgaaactccgtcaacgcgacccgaaaaaatcgcccgcaaacaacgaaaacgcgacgaaccgaaaaacgaccaaaaaacccctaacaaaacaactttaaaaaaaccgaaaacctctacctccctcgacgataaatccgcgaaactacctatcatctcgcataaata

SEQ ID NO: 18957 - DNA, 921 bp, Artificial Sequence
  chemically treated genomic DNA (Homo sapiens) CpG-island No: 18957
tcggggttttggacgtttttcggttgcggggcggggggagttttcggcgtacgcggttttttggtttcgtttttagttattttcggttattcgcgattcgaggttgtcgtagggggcgggttgagcgcgtgcgaggcgattggtttggggttagagtgggcgaggcgcggaggtttggtttataaagtagtcgcggagacggggtgttggtttgcgtcgtagttttttgtagcgtttggggttttcgttgtagttttcggaattaggatttcggcgtggtttagcgagttatggcgacgaaggtcgtgtgcgtgttgaagggcgacggtttagtgtagggtattattaatttcgagtagaaggtaagggttgggacggaggtttgtttgcgaggtcgtttttattcgttcgttttttcgcgtatttttgttaggagcgggtcgttcgttaggtttcggggtcgttttggtttagcgttcggtttcggttcgtgtcgttcggtcggtgttttcgtttttagcggtgcggtgtttaagtgttgagttatcgggcgggttcgggcgcggggcgtgggatcgaggtcgtcgcggggttgggtttgcgcgtggcgggagcgcggggagggattgtcgcgggtcggggaggggcgggggcgggcgtgttgttttttgtggtttttgggtcgtcgtcgcgggtttgtcgtggtgtttggagcggttgtgttcgttttttgtttggtcgtgttttcgtttttgagggtttcgcggatatcgagtggcgtagtgttaggtttagttcggggatggcgattgcgtttgggttcgtttggtgttttcgtattttttttcgtttttcggttttagcgttttaggttagggagttttcgtttttgtatagttttaaggttaggaatggttttta

SEQ ID NO: 18958 - DNA, 921 bp, Artificial Sequence
  chemically treated genomic DNA (Homo sapiens) CpG-island No: 18958
taaaaaccattcctaaccttaaaactatacaaaaacgaaaactccctaacctaaaacgctaaaaccgaaaaacgaaaaaaaatacgaaaacaccaaacgaacccaaacgcaatcgccatccccgaactaaacctaacactacgccactcgatatccgcgaaaccctcaaaaacgaaaacacgaccaaacaaaaaacgaacacaaccgctccaaacaccacgacaaacccgcgacgacgacccaaaaaccacaaaaaacaacacgcccgcccccgcccctccccgacccgcgacaatccctccccgcgctcccgccacgcgcaaacccaaccccgcgacgacctcgatcccacgccccgcgcccgaacccgcccgataactcaacacttaaacaccgcaccgctaaaaacgaaaacaccgaccgaacgacacgaaccgaaaccgaacgctaaaccaaaacgaccccgaaacctaacgaacgacccgctcctaacaaaaatacgcgaaaaaacgaacgaataaaaacgacctcgcaaacaaacctccgtcccaacccttaccttctactcgaaattaataataccctacactaaaccgtcgcccttcaacacgcacacgaccttcgtcgccataactcgctaaaccacgccgaaatcctaattccgaaaactacaacgaaaaccccaaacgctacaaaaaactacgacgcaaaccaacaccccgtctccgcgactactttataaaccaaacctccgcgcctcgcccactctaaccccaaaccaatcgcctcgcacgcgctcaacccgccccctacgacaacctcgaatcgcgaataaccgaaaataactaaaaacgaaaccaaaaaaccgcgtacgccgaaaactccccccgccccgcaaccgaaaaacgtccaaaaccccga

SEQ ID NO: 18959 - DNA, 921 bp, Artificial Sequence
  chemically treated genomic DNA (Homo sapiens) CpG-island No: 18959
taaaaattatttttagttttagagttgtataaaagcgaagattttttgatttagagcgttgaagtcggaaagcggagagggatgcgaagatattaggcgggtttaggcgtagtcgttattttcgggttgggtttggtattgcgttattcggtgttcgcgggatttttaggaacgagaatacggttaagtaagggacgagtatagtcgttttaggtattacgatagattcgcggcggcggtttaaggattatagagggtagtacgttcgttttcgttttttttcggttcgcggtaattttttttcgcgttttcgttacgcgtaggtttagtttcgcggcggtttcggttttacgtttcgcgttcgggttcgttcggtgatttagtatttgggtatcgtatcgttgggggcgaaggtatcgatcgggcggtacgggtcgggatcgggcgttggattagggcggtttcgaggtttggcgggcgattcgtttttagtaaaggtgcgcggggggacgagcgggtgggagcggtttcgtaaataagttttcgttttagtttttgttttttgttcgaaattgatgatgttttgtattgggtcgtcgttttttagtacgtatacggttttcgtcgttataattcgttaggttacgtcgaggttttggtttcgaggattgtaacggaaattttagacgttgtaggagattacgacgtaaattagtatttcgttttcgcgattattttataggttagattttcgcgtttcgtttattttggttttaaattaatcgtttcgtacgcgtttagttcgttttttgcggtagtttcgggtcgcgagtggtcgggaatgattgggggcggggttaaggggtcgcgtgcgtcggagatttttttcgtttcgtagtcgggaaacgtttagaatttcga

SEQ ID NO: 18960 - DNA, 921 bp, Artificial Sequence
  chemically treated genomic DNA (Homo sapiens) CpG-island No: 18960
tcgaaattctaaacgtttcccgactacgaaacgaaaaaaatctccgacgcacgcgaccccttaaccccgcccccaatcattcccgaccactcgcgacccgaaactaccgcaaaaaacgaactaaacgcgtacgaaacgattaatttaaaaccaaaataaacgaaacgcgaaaatctaacctataaaataatcgcgaaaacgaaatactaatttacgtcgtaatctcctacaacgtctaaaatttccgttacaatcctcgaaaccaaaacctcgacgtaacctaacgaattataacgacgaaaaccgtatacgtactaaaaaacgacgacccaatacaaaacatcatcaatttcgaacaaaaaacaaaaactaaaacgaaaacttatttacgaaaccgctcccacccgctcgtccccccgcgcacctttactaaaaacgaatcgcccgccaaacctcgaaaccgccctaatccaacgcccgatcccgacccgtaccgcccgatcgataccttcgcccccaacgatacgatacccaaatactaaatcaccgaacgaacccgaacgcgaaacgtaaaaccgaaaccgccgcgaaactaaacctacgcgtaacgaaaacgcgaaaaaaaattaccgcgaaccgaaaaaaaacgaaaacgaacgtactaccctctataatccttaaaccgccgccgcgaatctatcgtaatacctaaaacgactatactcgtcccttacttaaccgtattctcgttcctaaaaatcccgcgaacaccgaataacgcaataccaaacccaacccgaaaataacgactacgcctaaacccgcctaatatcttcgcatccctctccgctttccgacttcaacgctctaaatcaaaaaatcttcgcttttatacaactctaaaactaaaaataattttta

SEQ ID NO: 18961 - DNA, 1442 bp, Artificial Sequence
  chemically treated genomic DNA (Homo sapiens) CpG-island No: 18961
ttagtcgtcgacgcgtcgcggtttgagtaataggagagttgaagttattttttcgttagttttacgatcggtagatgttttcgttttttcgtttttaattttatacgttcgttcgcgttttttttttagttttttgcgggttttcggtattgcgaattcgataacggggttcgcggagtagagagcgagggcgtttagattcgaaaaagggttaagttagaggaataggtatagatttgggttatgggaggtcgtaagggggcgaggggagaagttcgaggtcgcggttcgggggtgggtagtggggggaggggtgcggggttagttttcgtggtcgtcgcgatttttttcgggttataggtttcgtttcgcgtaggtttcgtcgtttcggaatcggggtaggaagcgtttttattcggattaaagttttaaattttcggcggcgggagaaacgagtttcggttttcgtagtaggttcggtatttttttgttttaaatattttttattttttggttgaaggcgttgacggcgtttatgttcgcgttgcggcggcggttgtttcgggttcgtcggttatatagatttcgcgtcgcggcggagcggggttgggaaattagtcgggtttggtggtcggggggaggcgacgagcggcggagttcgaggttcgggtaggaagaggttgcgttcgaagcggcgaggcgggcggtcgaggtagaggcggagaggtggcgggtttttttttagtttcgttcgtaggatgaggaaaaggaggcggcggtagcgttggtttttaatatgttcgtttggtggtggcggttgcgttttgcgtttcgttgatacggtttttcgcgtttttacgtattggtttatattggttcggtcggcgagcgggcgggtttttttttttttttttttagcgggatggcggtagcggttcgagtttacgtcgcgcggggtattttgggacggtttaggtttttcggcgttttttgtgttcggcgttcgtttcgtttcgtcgcgttggtttcgtttttttttcgtttcgtttcgttttgcgtcgttttgtatcgtttcgcgtgtagggttgttggcgcgtgacgtcgggacgttgggcgttttttcgtcggcggcggcggcggtcgcggtcgcgggtcggggagacggttttgtagagcgcgggattttagggttgcgagggtgatttagagtaagttttggcgtacgcgcgtttcgttcgacgcggtgttttcggggtgcgtttttgcgaaacgttcggttttaatcggttttgtattcggcgggggcggcgggtattgagtcgttggttttcggttgtcgcgaataaagggcgtaggatttaatttcggttttttgggcgtgtttttgtaggttttcgtgcgttttgttggggaaaagaaaaaaagtttttgttaatgttagt

SEQ ID NO: 18962 - DNA, 1442 bp, Artificial Sequence
  chemically treated genomic DNA (Homo sapiens) CpG-island No: 18962
actaacattaacaaaaactttttttcttttccccaacaaaacgcacgaaaacctacaaaaacacgcccaaaaaaccgaaattaaatcctacgccctttattcgcgacaaccgaaaaccaacgactcaatacccgccgcccccgccgaatacaaaaccgattaaaaccgaacgtttcgcaaaaacgcaccccgaaaacaccgcgtcgaacgaaacgcgcgtacgccaaaacttactctaaatcaccctcgcaaccctaaaatcccgcgctctacaaaaccgtctccccgacccgcgaccgcgaccgccgccgccgccgacgaaaaaacgcccaacgtcccgacgtcacgcgccaacaaccctacacgcgaaacgatacaaaacgacgcaaaacgaaacgaaacgaaaaaaaaacgaaaccaacgcgacgaaacgaaacgaacgccgaacacaaaaaacgccgaaaaacctaaaccgtcccaaaataccccgcgcgacgtaaactcgaaccgctaccgccatcccgctaaaaaaaaaaaaaaaaaaacccgcccgctcgccgaccgaaccaatataaaccaatacgtaaaaacgcgaaaaaccgtatcaacgaaacgcaaaacgcaaccgccaccaccaaacgaacatattaaaaaccaacgctaccgccgcctccttttcctcatcctacgaacgaaactaaaaaaaaacccgccacctctccgcctctacctcgaccgcccgcctcgccgcttcgaacgcaacctcttcctacccgaacctcgaactccgccgctcgtcgcctccccccgaccaccaaacccgactaatttcccaaccccgctccgccgcgacgcgaaatctatataaccgacgaacccgaaacaaccgccgccgcaacgcgaacataaacgccgtcaacgccttcaaccaaaaaataaaaaatatttaaaacaaaaaaataccgaacctactacgaaaaccgaaactcgtttctcccgccgccgaaaatttaaaactttaatccgaataaaaacgcttcctaccccgattccgaaacgacgaaacctacgcgaaacgaaacctataacccgaaaaaaatcgcgacgaccacgaaaactaaccccgcacccctccccccactacccacccccgaaccgcgacctcgaacttctcccctcgcccccttacgacctcccataacccaaatctatacctattcctctaacttaaccctttttcgaatctaaacgccctcgctctctactccgcgaaccccgttatcgaattcgcaataccgaaaacccgcaaaaaactaaaaaaaaaacgcgaacgaacgtataaaattaaaaacgaaaaaacgaaaacatctaccgatcgtaaaactaacgaaaaaataacttcaactctcctattactcaaaccgcgacgcgtcgacgactaa

SEQ ID NO: 18963 - DNA, 1442 bp, Artificial Sequence
  chemically treated genomic DNA (Homo sapiens) CpG-island No: 18963
attggtattggtagaagtttttttttttttttttagtagagcgtacgagggtttgtaaaggtacgtttagagagtcgaggttaaattttgcgttttttgttcgcggtagtcgagagttagcggtttagtgttcgtcgttttcgtcgggtgtagggtcggttagggtcgagcgtttcgtagagacgtatttcgggagtatcgcgtcgagcggagcgcgcgtgcgttagggtttgttttgggttattttcgtagttttgggatttcgcgttttgtaaggtcgttttttcggttcgcggtcgcggtcgtcgtcgtcgtcggcgggaaagcgtttagcgtttcggcgttacgcgttagtagttttgtacgcggggcggtgtagggcggcgtagggcgggacgaggcggggagggggcggggttagcgcgacggggcggggcgaacgtcgggtataggaagcgtcgggaggtttgagtcgttttagggtgtttcgcgcggcgtggattcgggtcgttgtcgttatttcgttggagagagggagagagaggttcgttcgttcgtcggtcgggttagtgtgagttagtgcgtgagggcgcggggggtcgtgttagcgagacgtagagcgtagtcgttattattaaacggatatgttgaagattagcgttgtcgtcgtttttttttttttattttgcgaacgggattgagagggggttcgttattttttcgtttttgtttcggtcgttcgtttcgtcgtttcgggcgtagtttttttttgttcgggtttcggatttcgtcgttcgtcgttttttttcggttattaggttcggttggttttttagtttcgtttcgtcgcggcgcgaggtttatgtgatcggcgggttcggagtagtcgtcgtcgtagcgcgaatatggacgtcgttaacgtttttaattaggaggtaaggggtgtttggggtaggggggtgtcgggtttgttgcgggagtcggggttcgtttttttcgtcgtcggaggtttaaagttttggttcgggtggggacgttttttgtttcggtttcggggcggcggggtttgcgcggagcggggtttgtggttcgggagaggtcgcggcgattacgggaattgatttcgtatttttttttttattgtttattttcggatcgcgatttcgggttttttttttcgtttttttgcggttttttatagtttaagtttgtgtttgtttttttaatttggttttttttcgggtttgggcgttttcgttttttgtttcgcgagtttcgttgtcgggttcgtagtgtcgggagttcgtaaagggttaagaaagaagcgcgggcgggcgtgtggggttgggggcgggggagcgggagtatttgtcggtcgtggggttggcggagaggtggttttagtttttttgttgtttaggtcgcggcgcgtcgacggttgg

SEQ ID NO: 18964 - DNA, 1442 bp, Artificial Sequence
  chemically treated genomic DNA (Homo sapiens) CpG-island No: 18964
ccaaccgtcgacgcgccgcgacctaaacaacaaaaaaactaaaaccacctctccgccaaccccacgaccgacaaatactcccgctcccccgcccccaaccccacacgcccgcccgcgcttctttcttaaccctttacgaactcccgacactacgaacccgacaacgaaactcgcgaaacaaaaaacgaaaacgcccaaacccgaaaaaaaaccaaattaaaaaaacaaacacaaacttaaactataaaaaaccgcaaaaaaacgaaaaaaaaaacccgaaatcgcgatccgaaaataaacaataaaaaaaaaaatacgaaatcaattcccgtaatcgccgcgacctctcccgaaccacaaaccccgctccgcgcaaaccccgccgccccgaaaccgaaacaaaaaacgtccccacccgaaccaaaactttaaacctccgacgacgaaaaaaacgaaccccgactcccgcaacaaacccgacacccccctaccccaaacaccccttacctcctaattaaaaacgttaacgacgtccatattcgcgctacgacgacgactactccgaacccgccgatcacataaacctcgcgccgcgacgaaacgaaactaaaaaaccaaccgaacctaataaccgaaaaaaaacgacgaacgacgaaatccgaaacccgaacaaaaaaaaactacgcccgaaacgacgaaacgaacgaccgaaacaaaaacgaaaaaataacgaaccccctctcaatcccgttcgcaaaataaaaaaaaaaaaacgacgacaacgctaatcttcaacatatccgtttaataataacgactacgctctacgtctcgctaacacgaccccccgcgccctcacgcactaactcacactaacccgaccgacgaacgaacgaacctctctctccctctctccaacgaaataacgacaacgacccgaatccacgccgcgcgaaacaccctaaaacgactcaaacctcccgacgcttcctatacccgacgttcgccccgccccgtcgcgctaaccccgccccctccccgcctcgtcccgccctacgccgccctacaccgccccgcgtacaaaactactaacgcgtaacgccgaaacgctaaacgctttcccgccgacgacgacgacgaccgcgaccgcgaaccgaaaaaacgaccttacaaaacgcgaaatcccaaaactacgaaaataacccaaaacaaaccctaacgcacgcgcgctccgctcgacgcgatactcccgaaatacgtctctacgaaacgctcgaccctaaccgaccctacacccgacgaaaacgacgaacactaaaccgctaactctcgactaccgcgaacaaaaaacgcaaaatttaacctcgactctctaaacgtacctttacaaaccctcgtacgctctactaaaaaaaaaaaaaaaaacttctaccaataccaat

SEQ ID NO: 18965 - DNA, 557 bp, Artificial Sequence
  chemically treated genomic DNA (Homo sapiens) CpG-island No: 18965
gggcgtatgatatattcgatataggatatatgacgtttttgatataggatgtatgatatattcgatataggaggtatgacgtttttgatataggacgtacgatatattgatataggacgaatgacgtttcgatataggacgtatgacgtttttgatataggacgcgtgatatattcgatataggacgtgtgacgttttcggtataggacgtgtgacgtatttgatatacgacgcgtgatatattcgatataggacgtgtgacgtttttgatatgacgtgtgaaatatttgatataggatacgtgacgtatttgatatgcgacgtatgacgtgatataggatgcgtgatatattcgatataggacgtatggcgtttttgatataagacgtgtgaaatatttgatataggacgtatgacgtattcgacgtaggacgcgtgatgtattcgatataggatgcgtgacgtttttgatataggatgtgtgatatttgatataggacgcgtgacgtttttgatataggatgtatgatatatgacgtatttgatatacgacgtaa

SEQ ID NO: 18966 - DNA, 557 bp, Artificial Sequence
  chemically treated genomic DNA (Homo sapiens) CpG-island No: 18966
ttacgtcgtatatcaaatacgtcatatatcatacatcctatatcaaaaacgtcacgcgtcctatatcaaatatcacacatcctatatcaaaaacgtcacgcatcctatatcgaatacatcacgcgtcctacgtcgaatacgtcatacgtcctatatcaaatatttcacacgtcttatatcaaaaacgccatacgtcctatatcgaatatatcacgcatcctatatcacgtcatacgtcgcatatcaaatacgtcacgtatcctatatcaaatatttcacacgtcatatcaaaaacgtcacacgtcctatatcgaatatatcacgcgtcgtatatcaaatacgtcacacgtcctataccgaaaacgtcacacgtcctatatcgaatatatcacgcgtcctatatcaaaaacgtcatacgtcctatatcgaaacgtcattcgtcctatatcaatatatcgtacgtcctatatcaaaaacgtcatacctcctatatcgaatatatcatacatcctatatcaaaaacgtcatatatcctatatcgaatatatcatacgccc

SEQ ID NO: 18967 - DNA, 557 bp, Artificial Sequence
  chemically treated genomic DNA (Homo sapiens) CpG-island No: 18967
ttacgtcgtatgttagatgcgttatgtgttatgtattttatgttaggggcgttacgcgttttatgttagatgttatatattttatgttaggggcgttacgtattttatgtcggatgtattacgcgttttgcgtcggatgcgttatgcgttttatgttagatgttttatacgttttatgttaggggcgttatgcgttttatgtcggatgtgttacgtattttatgttacgttatgcgtcgtatgttagatgcgttacgtgttttatgttagatgttttatacgttatgttaggggcgttatacgttttatgtcggatatgttacgcgtcgtatgttagatgcgttatacgttttatgtcgggggcgttatacgttttatgtcggatgtgttacgcgttttatgttaggggcgttatgcgttttatgtcggggcgttattcgttttatgttagtgtgtcgtgcgttttatgttaggggcgttatgttttttatgtcggatgtgttatgtattttatgttaggggcgttatgtgttttatgtcggatatgttatgcgttt

SEQ ID NO: 18968 - DNA, 557 bp, Artificial Sequence
  chemically treated genomic DNA (Homo sapiens) CpG-island No: 18968
aaacgcataacatatccgacataaaacacataacgcccctaacataaaatacataacacatccgacataaaaaacataacgcccctaacataaaacgcacgacacactaacataaaacgaataacgccccgacataaaacgcataacgcccctaacataaaacgcgtaacacatccgacataaaacgtataacgcccccgacataaaacgtataacgcatctaacatacgacgcgtaacatatccgacataaaacgtataacgcccctaacataacgtataaaacatctaacataaaacacgtaacgcatctaacatacgacgcataacgtaacataaaatacgtaacacatccgacataaaacgcataacgcccctaacataaaacgtataaaacatctaacataaaacgcataacgcatccgacgcaaaacgcgtaatacatccgacataaaatacgtaacgcccctaacataaaatatataacatctaacataaaacgcgtaacgcccctaacataaaatacataacacataacgcatctaacatacgacgtaa

SEQ ID NO: 18969 - DNA, 523 bp, Artificial Sequence
  chemically treated genomic DNA (Homo sapiens) CpG-island No: 18969
gtcgtacggcgcgtatgcgtattagaggtcgttcgtcgtttcgttttttttaggtttttgttttttttcggttttcgttatcgtttttcgtttcgcgtatgagtagcggcggtttttttttttatggcgttttggggcgcgggcgatttgtaggtaatggtaggcgttcggttattgaggtgtagtagaggatgcgttggcggttgtgagtgcggcgataagggtaaatgtagcgatttttcgttgttgggtaagagatttttcgaagattcgagtcgttattagttgttgtagaagtgggcgagtatgtggagttttatgagcgaagacgcgtcggtggtcgatatggagagggcgtagttggaggaggaggcggcggttgcggaggagaggtcgttggtgtttttgtgtttcggttgtcggcggtcgttgggcgattcgttgagttgggtggttagttaggaggatattaattgtattttgtttcgttgttagttgggtcgagtcgggtagggggggcgtg

SEQ ID NO: 18970 - DNA, 523 bp, Artificial Sequence
  chemically treated genomic DNA (Homo sapiens) CpG-island No: 18970
cacgccccccctacccgactcgacccaactaacaacgaaacaaaatacaattaatatcctcctaactaaccacccaactcaacgaatcgcccaacgaccgccgacaaccgaaacacaaaaacaccaacgacctctcctccgcaaccgccgcctcctcctccaactacgccctctccatatcgaccaccgacgcgtcttcgctcataaaactccacatactcgcccacttctacaacaactaataacgactcgaatcttcgaaaaatctcttacccaacaacgaaaaatcgctacatttacccttatcgccgcactcacaaccgccaacgcatcctctactacacctcaataaccgaacgcctaccattacctacaaatcgcccgcgccccaaaacgccataaaaaaaaaaaccgccgctactcatacgcgaaacgaaaaacgataacgaaaaccgaaaaaaaacaaaaacctaaaaaaaacgaaacgacgaacgacctctaatacgcatacgcgccgtacgac

SEQ ID NO: 18971 - DNA, 523 bp, Artificial Sequence
  chemically treated genomic DNA (Homo sapiens) CpG-island No: 18971
tacgttttttttgttcggttcgatttaattgatagcgaagtaggatgtagttggtgtttttttggttggttatttagtttagcgagtcgtttagcggtcgtcggtagtcggagtataggaatattagcggtttttttttcgtagtcgtcgtttttttttttagttgcgttttttttatgtcggttatcgacgcgttttcgtttatggagttttatatgttcgtttatttttgtaatagttggtggcggttcgagttttcggagagttttttgtttaatagcgaggagtcgttgtatttgtttttgtcgtcgtatttatagtcgttagcgtattttttgttatattttagtgatcgaacgtttgttattatttataaatcgttcgcgttttagagcgttatgggaaaaaaaatcgtcgttgtttatgcgcggggcggggagcggtggcggaggtcgagaaggggtaaaagtttgaagggggcgggacggcgggcggtttttagtgcgtatgcgcgtcgtgcggt

SEQ ID NO: 18972 - DNA, 523 bp, Artificial Sequence
  chemically treated genomic DNA (Homo sapiens) CpG-island No: 18972
accgcacgacgcgcatacgcactaaaaaccgcccgccgtcccgcccccttcaaacttttaccccttctcgacctccgccaccgctccccgccccgcgcataaacaacgacgattttttttcccataacgctctaaaacgcgaacgatttataaataataacaaacgttcgatcactaaaatataacaaaaaatacgctaacgactataaatacgacgacaaaaacaaatacaacgactcctcgctattaaacaaaaaactctccgaaaactcgaaccgccaccaactattacaaaaataaacgaacatataaaactccataaacgaaaacgcgtcgataaccgacataaaaaaaacgcaactaaaaaaaaaaacgacgactacgaaaaaaaaaccgctaatattcctatactccgactaccgacgaccgctaaacgactcgctaaactaaataaccaaccaaaaaaacaccaactacatcctacttcgctatcaattaaatcgaaccgaacaaaaaaaacgta

SEQ ID NO: 18973 - DNA, 716 bp, Artificial Sequence
  chemically treated genomic DNA (Homo sapiens) CpG-island No: 18973
tatcgtcgttttttttgtttcgggttatcgtcggttggggggacggtaggcggggtcgataaatacgaatggttattcgggaagagttacgattcggggtatcgattcgattggggtttttcgggggtttcgggtagtcgattgttcgggaaagcggttttttttcggagagacggaagagtcgagtagtttaaattttttatttatgcgttagaagagatatttcggcgtttaggcggattcggttcgttttcgcgggcgggttgatagtcgttgttattatagtttttagtttgacgcggtatttcgtataattagtggtttgtttataatttcgttcgttttttcgtatttcggttgttcgcggtcgttttttatcgttttcgttgacgttgcggaggtagagattggttttggaggcgttcgttcgttcggttgttcgtgggtttggtcgtagtagtttttcgtttttcgtcggtttgtttattttttttttcggtttttttttttttttttttcgtagtcgtcgttatagtcgtcgggagcgttattttcgttttagtaggtttatttttttcgtattgcgtcgcggtcgggggcggaagattcgtttcgcgcgagggaaggggcggggtattaggagggagattacgtttattttgcgtcgatcggttgggtttggtattcgcgggcggttttagttttagtttttagtt

SEQ ID NO: 18974 - DNA, 716 bp, Artificial Sequence
  chemically treated genomic DNA (Homo sapiens) CpG-island No: 18974
aactaaaaactaaaactaaaaccgcccgcgaataccaaacccaaccgatcgacgcaaaataaacgtaatctccctcctaataccccgccccttccctcgcgcgaaacgaatcttccgcccccgaccgcgacgcaatacgaaaaaaataaacctactaaaacgaaaataacgctcccgacgactataacgacgactacgaaaaaaaaaaaaaaaaaaaccgaaaaaaaaaataaacaaaccgacgaaaaacgaaaaactactacgaccaaacccacgaacaaccgaacgaacgaacgcctccaaaaccaatctctacctccgcaacgtcaacgaaaacgataaaaaacgaccgcgaacaaccgaaatacgaaaaaacgaacgaaattataaacaaaccactaattatacgaaataccgcgtcaaactaaaaactataataacaacgactatcaacccgcccgcgaaaacgaaccgaatccgcctaaacgccgaaatatctcttctaacgcataaataaaaaatttaaactactcgactcttccgtctctccgaaaaaaaaccgctttcccgaacaatcgactacccgaaacccccgaaaaaccccaatcgaatcgataccccgaatcgtaactcttcccgaataaccattcgtatttatcgaccccgcctaccgtccccccaaccgacgataacccgaaacaaaaaaaacgacgata

SEQ ID NO: 18975 - DNA, 716 bp, Artificial Sequence
  chemically treated genomic DNA (Homo sapiens) CpG-island No: 18975
agttggagattgaggttggggtcgttcgcgggtgttaggtttagtcggtcggcgtagagtgggcgtggttttttttttgatgtttcgttttttttttcgcgcggggcggatttttcgttttcggtcgcggcgtaatgcggaagagatgggtttgttggagcggaagtgacgttttcggcggttgtggcggcggttgcgggagaaggaggaggaggagtcggaggaagaggtgagtaagtcggcggggggcggggagttgttgcggttagatttacgggtagtcgggcgggcggacgtttttaagattagtttttgttttcgtagcgttagcgggagcggtgaggggcgatcgcgagtagtcggggtgcgggaggacgggcggggttgtgagtagattattggttgtgcggggtgtcgcgttaggttgggggttgtggtgatagcggttgttagttcgttcgcgggaacgaatcgaattcgtttgggcgtcggggtattttttttggcgtataaatggagggtttgggttgttcggttttttcgttttttcgagaaggagtcgttttttcgggtagtcgattgttcgggattttcgaggagttttagtcgggtcggtgtttcgagtcgtgatttttttcgggtggttattcgtatttatcggtttcgtttgtcgtttttttagtcggcggtagttcggggtaggagaggcggcggta

SEQ ID NO: 18976 - DNA, 716 bp, Artificial Sequence
  chemically treated genomic DNA (Homo sapiens) CpG-island No: 18976
taccgccgcctctcctaccccgaactaccgccgactaaaaaaacgacaaacgaaaccgataaatacgaataaccacccgaaaaaaatcacgactcgaaacaccgacccgactaaaactcctcgaaaatcccgaacaatcgactacccgaaaaaacgactccttctcgaaaaaacgaaaaaaccgaacaacccaaaccctccatttatacgccaaaaaaaataccccgacgcccaaacgaattcgattcgttcccgcgaacgaactaacaaccgctatcaccacaacccccaacctaacgcgacaccccgcacaaccaataatctactcacaaccccgcccgtcctcccgcaccccgactactcgcgatcgcccctcaccgctcccgctaacgctacgaaaacaaaaactaatcttaaaaacgtccgcccgcccgactacccgtaaatctaaccgcaacaactccccgccccccgccgacttactcacctcttcctccgactcctcctcctccttctcccgcaaccgccgccacaaccgccgaaaacgtcacttccgctccaacaaacccatctcttccgcattacgccgcgaccgaaaacgaaaaatccgccccgcgcgaaaaaaaaaacgaaacatcaaaaaaaaaaccacgcccactctacgccgaccgactaaacctaacacccgcgaacgaccccaacctcaatctccaact

SEQ ID NO: 18977 - DNA, 761 bp, Artificial Sequence
  chemically treated genomic DNA (Homo sapiens) CpG-island No: 18977
cgggaacgcgttttttgttcgagtagaaggtcggaggttggggaagattcgtagtcggtcggacggtaggggatttcgttttagggtttcggggttgggcgtttagagaatacgggggcgggggacgggggtttgcgtcggggatgcggtcgtttaagggcgttcgaagcgcgtattttattttttttttcgttttggaagttgagtaggttggttcggggtatttttttgttttcgcgaggttttttgcgcggttttagttcgttgtcgggtttcgcgtcgtcggggaagtcgttttcggttttagtttcgaggttcggggttagcgcggaaggcggcgacggtttcgggtttagtagcgatttttcgttaggggttttgtcgtcgttatcggggttcgttttttcgttcgtgttcggcggcggtaataacggcggcggtttttgttttttatcgcgttttcgtttttttttttcggagtcgtttcgtttgcgtacgtttattcgtcgggtttttcggaatattttcgcggttcgtacggcggtcgaatattcgtttttatatcgcggtttcggtagcgtcgagttcgtgacggcgtacgcgcgtttttcggagttttagtcgggtcgagttttttgttgttatcgcgtattttacgagcgcgtatgcgtttatgtttttacgcgtttttaatatttggagaaagagagagagtgagagagagagagagagagagagagagagagagagagagagagaga

SEQ ID NO: 18978 - DNA, 761 bp, Artificial Sequence
  chemically treated genomic DNA (Homo sapiens) CpG-island No: 18978
tctctctctctctctctctctctctctctctctctctctctctctcactctctctctttctccaaatattaaaaacgcgtaaaaacataaacgcatacgcgctcgtaaaatacgcgataacaacaaaaaactcgacccgactaaaactccgaaaaacgcgcgtacgccgtcacgaactcgacgctaccgaaaccgcgatataaaaacgaatattcgaccgccgtacgaaccgcgaaaatattccgaaaaacccgacgaataaacgtacgcaaacgaaacgactccgaaaaaaaaaaacgaaaacgcgataaaaaacaaaaaccgccgccgttattaccgccgccgaacacgaacgaaaaaacgaaccccgataacgacgacaaaacccctaacgaaaaatcgctactaaacccgaaaccgtcgccgccttccgcgctaaccccgaacctcgaaactaaaaccgaaaacgacttccccgacgacgcgaaacccgacaacgaactaaaaccgcgcaaaaaacctcgcgaaaacaaaaaaataccccgaaccaacctactcaacttccaaaacgaaaaaaaaaataaaatacgcgcttcgaacgcccttaaacgaccgcatccccgacgcaaacccccgtcccccgcccccgtattctctaaacgcccaaccccgaaaccctaaaacgaaatcccctaccgtccgaccgactacgaatcttccccaacctccgaccttctactcgaacaaaaaacgcgttcccg

SEQ ID NO: 18979 - DNA, 761 bp, Artificial Sequence
  chemically treated genomic DNA (Homo sapiens) CpG-island No: 18979
ttttttttttttttttttttttttttttttttttttttttttttttattttttttttttttttaagtattgagagcgcgtgggagtataggcgtatgcgcgttcgtggggtgcgcggtagtaatagaggattcgattcggttggagtttcggagagcgcgcgtgcgtcgttacgagttcggcgttgtcggggtcgcggtgtggaagcgagtattcgatcgtcgtgcgggtcgcggggatgtttcgaaaggttcggcgggtgaacgtgcgtaagcggaacgatttcgaagaggaagagcgggaacgcgatgaggagtaggagtcgtcgtcgttgttgtcgtcgtcgggtacgggcgaagaggcgggtttcggtggcggcgatagggtttttggcggggagtcgttgttgggttcggggtcgtcgtcgtttttcgcgttgatttcgggtttcggggttgaggtcgggggcggttttttcggcggcgcggagttcggtaacgggttgaagtcgcgtaagaggtttcgcgagaataaagaggtgtttcgggttagtttgtttagtttttaggacgaggaggaaggtaaagtgcgcgtttcggacgtttttagacggtcgtattttcgacgtaggttttcgtttttcgttttcgtattttttggacgtttagtttcggagttttggaacggagttttttgtcgttcgatcggttgcgaattttttttagttttcggttttttgttcgggtaagggacgcgttttcg

SEQ ID NO: 18980 - DNA, 761 bp, Artificial Sequence
  chemically treated genomic DNA (Homo sapiens) CpG-island No: 18980
cgaaaacgcgtcccttacccgaacaaaaaaccgaaaactaaaaaaaattcgcaaccgatcgaacgacaaaaaactccgttccaaaactccgaaactaaacgtccaaaaaatacgaaaacgaaaaacgaaaacctacgtcgaaaatacgaccgtctaaaaacgtccgaaacgcgcactttaccttcctcctcgtcctaaaaactaaacaaactaacccgaaacacctctttattctcgcgaaacctcttacgcgacttcaacccgttaccgaactccgcgccgccgaaaaaaccgcccccgacctcaaccccgaaacccgaaatcaacgcgaaaaacgacgacgaccccgaacccaacaacgactccccgccaaaaaccctatcgccgccaccgaaacccgcctcttcgcccgtacccgacgacgacaacaacgacgacgactcctactcctcatcgcgttcccgctcttcctcttcgaaatcgttccgcttacgcacgttcacccgccgaacctttcgaaacatccccgcgacccgcacgacgatcgaatactcgcttccacaccgcgaccccgacaacgccgaactcgtaacgacgcacgcgcgctctccgaaactccaaccgaatcgaatcctctattactaccgcgcaccccacgaacgcgcatacgcctatactcccacgcgctctcaatacttaaaaaaaaaaaaaaaataaaaaaaaaaaaaaaaaaaaaaaaaaaaaaaaaaaaaaaaaaaaaa

SEQ ID NO: 18981 - DNA, 1199 bp, Artificial Sequence
  chemically treated genomic DNA (Homo sapiens) CpG-island No: 18981
cgtattttcgtgcgcgaggagggaagatcgtggttgagtgcgggtggtttgggcggaaggtttagcggggataggttgggtcgtagttttgttgtgttgtgtcgtgcgacgtttttcgtaggagcgcgtaaagtgttagttacggcgttaagtaagttggacgtgcgtgtatgagcgcgttcggattgatagggaagcgaaaagggggttagggcgtattatagaaaagtcgcggtagaaacgtacgatatagttcgaggcggcgggggcgagagtttcggggtagggacggcgacgcggcgtattcggtttggcgtttttgcgcggcggtcggtcgtttcgtagcgttttaggtggtcgtcggcggggtcgtcgtcgggggagtggattttttcgttttcgtcgggttcggttgttttcggtagttttttcgtttggttttttttcgattttttttttttttttttttcggttcgcgatggattgggttttttcgtcgcgtcgtcgtcgtcgtcgttcgtagtatcgcgcgggtttttgagttgtagggtttgaggagtcgcgtgttggggattggacgttcgttggttttgtcgtacgcgagaatttttcgtttttttgttattaggttttcgcggaggaaggggagggacgaggcgcggttttttttgtgtcgtttgttcggttcgatttgcgcgcgtgcggttttttgggaattttagggtcgcggtcgggtttggttttgtcggcggtttgttgggagttggatcggagcggtttggaacgataagttcgagtaagagtttgcgggaaggggaggcgggagcgtttcggatcgtcggaagggttttgcgtgggggcgcggatttcggacgttcggcgagtggcggaaagcgagatttcggcgtcgagtgaggtcggttaggttgttgtcgattttttcgttggtttttttgtttttttttcggggttttgtcggcggcggggttcggttgttcgcgttagagttttaggtcggttttttttgtttttgagaagggttcgttgttaggttttcgagtttcgggcgtagttttcgggagagtcggcgttttgtttggttcggcggttttttttcgggtacgaaggtttgttgttgtttttttagaatttttttttttcgtagatataggtagttaatttagcggggtttggtgttg

SEQ ID NO: 18982 - DNA, 1199 bp, Artificial Sequence
  chemically treated genomic DNA (Homo sapiens) CpG-island No: 18982
caacaccaaaccccgctaaattaactacctatatctacgaaaaaaaaaaattctaaaaaaacaacaacaaaccttcgtacccgaaaaaaaaccgccgaaccaaacaaaacgccgactctcccgaaaactacgcccgaaactcgaaaacctaacaacgaacccttctcaaaaacaaaaaaaaccgacctaaaactctaacgcgaacaaccgaaccccgccgccgacaaaaccccgaaaaaaaaacaaaaaaaccaacgaaaaaatcgacaacaacctaaccgacctcactcgacgccgaaatctcgctttccgccactcgccgaacgtccgaaatccgcgcccccacgcaaaacccttccgacgatccgaaacgctcccgcctccccttcccgcaaactcttactcgaacttatcgttccaaaccgctccgatccaactcccaacaaaccgccgacaaaaccaaacccgaccgcgaccctaaaattcccaaaaaaccgcacgcgcgcaaatcgaaccgaacaaacgacacaaaaaaaaccgcgcctcgtccctccccttcctccgcgaaaacctaataacaaaaaaacgaaaaattctcgcgtacgacaaaaccaacgaacgtccaatccccaacacgcgactcctcaaaccctacaactcaaaaacccgcgcgatactacgaacgacgacgacgacgacgcgacgaaaaaacccaatccatcgcgaaccgaaaaaaaaaaaaaaaaaaaatcgaaaaaaaaccaaacgaaaaaactaccgaaaacaaccgaacccgacgaaaacgaaaaaatccactcccccgacgacgaccccgccgacgaccacctaaaacgctacgaaacgaccgaccgccgcgcaaaaacgccaaaccgaatacgccgcgtcgccgtccctaccccgaaactctcgcccccgccgcctcgaactatatcgtacgtttctaccgcgacttttctataatacgccctaacccccttttcgcttccctatcaatccgaacgcgctcatacacgcacgtccaacttacttaacgccgtaactaacactttacgcgctcctacgaaaaacgtcgcacgacacaacacaacaaaactacgacccaacctatccccgctaaaccttccgcccaaaccacccgcactcaaccacgatcttccctcctcgcgcacgaaaatacg

SEQ ID NO: 18983 - DNA, 1199 bp, Artificial Sequence
  chemically treated genomic DNA (Homo sapiens) CpG-island No: 18983
tagtattaaatttcgttaagttaattatttgtgtttacgaggaagggaagttttggagaagtagtagtaagttttcgtgttcgagaggaggtcgtcgggttaggtagggcgtcggttttttcgggagttgcgttcggaattcgaaggtttggtagcgaattttttttaagggtaaaaggagtcggtttgaggttttggcgcgggtaatcgggtttcgtcgtcggtagggtttcgggaggggaataaaggggttagcggggaagtcggtagtagtttggtcgattttattcggcgtcggggtttcgtttttcgttattcgtcgggcgttcgggattcgcgtttttacgtagggttttttcgacggttcgaggcgttttcgtttttttttttcgtaggtttttattcgggtttgtcgttttaaatcgtttcgatttagtttttaataggtcgtcggtagagttaggttcggtcgcggttttagagtttttaagaagtcgtacgcgcgtaggtcgaatcgggtaggcggtataggaaaagtcgcgtttcgtttttttttttttttcgcgaggatttggtgatagggaagcgagaggttttcgcgtgcggtagagttagcggacgtttagtttttagtacgcggttttttaggttttgtaatttagaggttcgcgcggtgttgcgggcgacggcggcggcggcgcggcggggaggtttagtttatcgcgaatcgggagggggaggggaggagggtcgagggagagttaggcggggaagttgtcgagggtagtcgagttcggcggaggcggagaaatttattttttcggcggcgatttcgtcggcggttatttggggcgttgcgggacggtcgatcgtcgcgtaggggcgttaaatcgggtacgtcgcgtcgtcgtttttgtttcggagttttcgttttcgtcgtttcgggttgtgtcgtacgtttttgtcgcggtttttttatggtgcgttttggtttttttttcgtttttttgttagttcgagcgcgtttatgtacgtacgtttagtttgtttggcgtcgtggttaatattttgcgcgtttttgcggagggcgtcgtacggtatagtatagtaaagttgcggtttaatttgttttcgttgagtttttcgtttaggttattcgtatttagttacgatttttttttttcgcgtacggaagtgcg

SEQ ID NO: 18984 - DNA, 1199 bp, Artificial Sequence
  chemically treated genomic DNA (Homo sapiens) CpG-island No: 18984
cgcacttccgtacgcgaaaaaaaaaaatcgtaactaaatacgaataacctaaacgaaaaactcaacgaaaacaaattaaaccgcaactttactatactataccgtacgacgccctccgcaaaaacgcgcaaaatattaaccacgacgccaaacaaactaaacgtacgtacataaacgcgctcgaactaacaaaaaaacgaaaaaaaaaccaaaacgcaccataaaaaaaccgcgacaaaaacgtacgacacaacccgaaacgacgaaaacgaaaactccgaaacaaaaacgacgacgcgacgtacccgatttaacgcccctacgcgacgatcgaccgtcccgcaacgccccaaataaccgccgacgaaatcgccgccgaaaaaataaatttctccgcctccgccgaactcgactaccctcgacaacttccccgcctaactctccctcgaccctcctcccctccccctcccgattcgcgataaactaaacctccccgccgcgccgccgccgccgtcgcccgcaacaccgcgcgaacctctaaattacaaaacctaaaaaaccgcgtactaaaaactaaacgtccgctaactctaccgcacgcgaaaacctctcgcttccctatcaccaaatcctcgcgaaaaaaaaaaaaaaacgaaacgcgacttttcctataccgcctacccgattcgacctacgcgcgtacgacttcttaaaaactctaaaaccgcgaccgaacctaactctaccgacgacctattaaaaactaaatcgaaacgatttaaaacgacaaacccgaataaaaacctacgaaaaaaaaaaacgaaaacgcctcgaaccgtcgaaaaaaccctacgtaaaaacgcgaatcccgaacgcccgacgaataacgaaaaacgaaaccccgacgccgaataaaatcgaccaaactactaccgacttccccgctaacccctttattcccctcccgaaaccctaccgacgacgaaacccgattacccgcgccaaaacctcaaaccgactccttttacccttaaaaaaaattcgctaccaaaccttcgaattccgaacgcaactcccgaaaaaaccgacgccctacctaacccgacgacctcctctcgaacacgaaaacttactactacttctccaaaacttcccttcctcgtaaacacaaataattaacttaacgaaatttaatacta

SEQ ID NO: 18985 - DNA, 933 bp, Artificial Sequence
  chemically treated genomic DNA (Homo sapiens) CpG-island No: 18985
tgcgacgattatttttttttggggttatggattcggacgttagtttggtgtttagtcgttcgtcgtcgttagagttcgatgatttttttttgtcggttcggagtaagggtagtagcggtagcgtttttattgggggtatcgtgttttcgtttatttcgagtgattgttcgtcggagttgagcgtcgagttgcgcggcgttatgggttttgcgggcgcgtattttggggataagttaggaggtagtggttttaagttattttcgtttagtatttcgtcgtttacgtcgtcggcggttgcgtcgtttattaagaaggataagaagtaaatgatagagtcggagttgtagtagttgcgttttaagattaatagtcgcgagcgtaagcgtatgtacgattttaatatcgttatggatggttttcgcgaggttatgtcgtacgtatacggtttttcggtgcgtaagttttttaagatcgttacgttgttgttggcgcgtaattatatttttatgtttattaattcgttggaggagatgaagcgattggtgagcgagatttacgggggttattacgttggtttttattcgtcggtttgcggcggtttggcgtatttcgcgtttttgttcgtcgttatcgcgtattcggtagtagtagcgtacgtcgtatattatttcgcggtgtattattttattttgtcgttcgtcgtcgtagcggttgttgtcgtcgttgtagtcgcggttgtgtttagcgtttttttgttcggattcgggttgtcgtcggtcggttttattcgtttatcgtacggtttatttaagttttcgtttgttgtcgcggtcgtttcgttggggggcgggggcggcggtagtggggcgagcgggggtttttagtattggggcggtatgttttgtttttgtagtatgtgttaggtgtcgtcgt

SEQ ID NO: 18986 - DNA, 933 bp, Artificial Sequence
  chemically treated genomic DNA (Homo sapiens) CpG-island No: 18986
acgacgacacctaacacatactacaaaaacaaaacataccgccccaatactaaaaacccccgctcgccccactaccgccgcccccgccccccaacgaaacgaccgcgacaacaaacgaaaacttaaataaaccgtacgataaacgaataaaaccgaccgacgacaacccgaatccgaacaaaaaaacgctaaacacaaccgcgactacaacgacgacaacaaccgctacgacgacgaacgacaaaataaaataatacaccgcgaaataatatacgacgtacgctactactaccgaatacgcgataacgacgaacaaaaacgcgaaatacgccaaaccgccgcaaaccgacgaataaaaaccaacgtaataacccccgtaaatctcgctcaccaatcgcttcatctcctccaacgaattaataaacataaaaatataattacgcgccaacaacaacgtaacgatcttaaaaaacttacgcaccgaaaaaccgtatacgtacgacataacctcgcgaaaaccatccataacgatattaaaatcgtacatacgcttacgctcgcgactattaatcttaaaacgcaactactacaactccgactctatcatttacttcttatccttcttaataaacgacgcaaccgccgacgacgtaaacgacgaaatactaaacgaaaataacttaaaaccactacctcctaacttatccccaaaatacgcgcccgcaaaacccataacgccgcgcaactcgacgctcaactccgacgaacaatcactcgaaataaacgaaaacacgatacccccaataaaaacgctaccgctactacccttactccgaaccgacaaaaaaaaatcatcgaactctaacgacgacgaacgactaaacaccaaactaacgtccgaatccataaccccaaaaaaaaataatcgtcgca

SEQ ID NO: 18987 - DNA, 933 bp, Artificial Sequence
  chemically treated genomic DNA (Homo sapiens) CpG-island No: 18987
gcggcggtatttggtatatgttgtaggggtagggtatgtcgttttagtgttggaagttttcgttcgttttattgtcgtcgttttcgttttttagcggggcggtcgcggtagtagacggagatttgagtaggtcgtgcggtggacggatggagtcgatcgacggtagttcggattcgggtagagaggcgttggatatagtcgcggttgtagcggcggtagtagtcgttgcggcggcgggcggtaggatggggtggtgtatcgcggggtgatgtgcggcgtgcgttgttgttgtcgggtgcgcggtggcggcgggtaggggcgcggagtgcgttaggtcgtcgtaggtcgacgggtggaagttagcgtggtggttttcgtagatttcgtttattagtcgttttattttttttagcgagttggtgagtatgaggatgtagttgcgcgttagtagtagcgtggcgattttggaaagtttgcgtatcgaagggtcgtgtgcgtacggtatgatttcgcggaggttatttatggcgatgttgaggtcgtgtatgcgtttgcgttcgcggttgttgattttgagacgtagttgttgtagtttcggttttgttatttgttttttgttttttttggtggacgacgtagtcgtcgacgacgtagacgacgaggtgttggacgaggatgatttgaagttattgttttttagtttgtttttaggatgcgcgttcgtagagtttatagcgtcgcgtagttcggcgtttagtttcggcgggtagttattcggggtggacgaggatacggtgtttttagtgaaggcgttgtcgttgttgtttttatttcgggtcggtagaaaaaggttatcgggttttggcgacgacgggcggttggatattaggttggcgttcgagtttatggttttaggggaagatagtcgtcgta

SEQ ID NO: 18988 - DNA, 933 bp, Artificial Sequence
  chemically treated genomic DNA (Homo sapiens) CpG-island No: 18988
tacgacgactatcttcccctaaaaccataaactcgaacgccaacctaatatccaaccgcccgtcgtcgccaaaacccgataacctttttctaccgacccgaaataaaaacaacaacgacaacgccttcactaaaaacaccgtatcctcgtccaccccgaataactacccgccgaaactaaacgccgaactacgcgacgctataaactctacgaacgcgcatcctaaaaacaaactaaaaaacaataacttcaaatcatcctcgtccaacacctcgtcgtctacgtcgtcgacgactacgtcgtccaccaaaaaaaacaaaaaacaaataacaaaaccgaaactacaacaactacgtctcaaaatcaacaaccgcgaacgcaaacgcatacacgacctcaacatcgccataaataacctccgcgaaatcataccgtacgcacacgacccttcgatacgcaaactttccaaaatcgccacgctactactaacgcgcaactacatcctcatactcaccaactcgctaaaaaaaataaaacgactaataaacgaaatctacgaaaaccaccacgctaacttccacccgtcgacctacgacgacctaacgcactccgcgcccctacccgccgccaccgcgcacccgacaacaacaacgcacgccgcacatcaccccgcgatacaccaccccatcctaccgcccgccgccgcaacgactactaccgccgctacaaccgcgactatatccaacgcctctctacccgaatccgaactaccgtcgatcgactccatccgtccaccgcacgacctactcaaatctccgtctactaccgcgaccgccccgctaaaaaacgaaaacgacgacaataaaacgaacgaaaacttccaacactaaaacgacataccctacccctacaacatataccaaataccgccgc

SEQ ID NO: 18989 - DNA, 769 bp, Artificial Sequence
  chemically treated genomic DNA (Homo sapiens) CpG-island No: 18989
gcgcgcgagaagtcggaggcgtcggtcgagtttttaggtttcgggttcgggttaggcgcgtattcgggcggtagcgttcggtcggacgttaaggaggagtagtagtagtagttgcggcgtaagattaatagtcgcgagcggaagcgtatgtaggatttgaatttggttatggacgttttgcgcgaggttattttgttttatttagcggcgtattgttagggcgcgttcggtcgtaagttttttaagatagttacgttgttgttcgttcgtaattatattttattgttgggtagttcgttgtaggagttgcgtcgcgcgttgggcgagggcgtcgggttcgtcgcgtcgcgtttgttgttggtcgggttgtttttgttcgtcgtcgcgttcggtttcgtgttgttggcgttcggcgtcgtaggatttttcgacgcgttgcgtttcgttaagtatttgtcgttggcgttggacgagtcgtcgtgcggttagttcgtttttttcggcggcggcgtaggcggtttcggtttttgtatttgcgtcgtgtgtaagttttcgtatttggtttcggttagtttgggtttggtcgtcgtgtaggcgtaattttttaagtgagggcgggtttgggtttggggcgcgatttcggttcggttttttttcgtttagttttttcgcgtttttgttttttgcgtttgggagagcgaggtcgagtaaggaaagtatttcgaattttttagtttagaggaagggattgtcgggtattttttttttt

SEQ ID NO: 18990 - DNA, 769 bp, Artificial Sequence
  chemically treated genomic DNA (Homo sapiens) CpG-island No: 18990
aaaaaaaaaaatacccgacaatcccttcctctaaactaaaaaattcgaaatactttccttactcgacctcgctctcccaaacgcaaaaaacaaaaacgcgaaaaaactaaacgaaaaaaaaccgaaccgaaatcgcgccccaaacccaaacccgccctcacttaaaaaattacgcctacacgacgaccaaacccaaactaaccgaaaccaaatacgaaaacttacacacgacgcaaatacaaaaaccgaaaccgcctacgccgccgccgaaaaaaacgaactaaccgcacgacgactcgtccaacgccaacgacaaatacttaacgaaacgcaacgcgtcgaaaaatcctacgacgccgaacgccaacaacacgaaaccgaacgcgacgacgaacaaaaacaacccgaccaacaacaaacgcgacgcgacgaacccgacgccctcgcccaacgcgcgacgcaactcctacaacgaactacccaacaataaaatataattacgaacgaacaacaacgtaactatcttaaaaaacttacgaccgaacgcgccctaacaatacgccgctaaataaaacaaaataacctcgcgcaaaacgtccataaccaaattcaaatcctacatacgcttccgctcgcgactattaatcttacgccgcaactactactactactcctccttaacgtccgaccgaacgctaccgcccgaatacgcgcctaacccgaacccgaaacctaaaaactcgaccgacgcctccgacttctcgcgcgc

SEQ ID NO: 18991 - DNA, 769 bp, Artificial Sequence
  chemically treated genomic DNA (Homo sapiens) CpG-island No: 18991
ggggaagggggtgttcgatagtttttttttttggattggaaggttcgaaatgttttttttgttcggtttcgtttttttagacgtagggagtaggggcgcggagaagttgagcgaagggaggtcgggtcgaggtcgcgttttaggtttaggttcgtttttatttggagaattgcgtttgtacggcggttaggtttaggttggtcgggattaggtgcgggaatttgtatacggcgtaggtgtagaggtcggggtcgtttgcgtcgtcgtcggggagagcgaattggtcgtacggcggttcgtttagcgttagcgataggtatttggcggggcgtagcgcgtcggggggttttacggcgtcgggcgttagtagtacggagtcgggcgcggcggcgagtaggggtagttcggttagtagtaggcgcggcgcggcgggttcggcgttttcgtttagcgcgcggcgtagtttttgtagcgagttgtttagtagtaggatgtagttgcgggcgagtagtagcgtggttattttggagagtttgcggtcgggcgcgttttggtagtgcgtcgttgagtagggtaggatgatttcgcgtagggcgtttatggttaggtttaggttttgtatgcgttttcgttcgcggttgttgattttgcgtcgtagttgttgttgttgtttttttttggcgttcggtcgggcgttgtcgttcgggtgcgcgtttgattcgggttcggggtttggaggttcggtcggcgttttcggtttttcgcgcgt

SEQ ID NO: 18992 - DNA, 769 bp, Artificial Sequence
  chemically treated genomic DNA (Homo sapiens) CpG-island No: 18992
acgcgcgaaaaaccgaaaacgccgaccgaacctccaaaccccgaacccgaatcaaacgcgcacccgaacgacaacgcccgaccgaacgccaaaaaaaaacaacaacaacaactacgacgcaaaatcaacaaccgcgaacgaaaacgcatacaaaacctaaacctaaccataaacgccctacgcgaaatcatcctaccctactcaacgacgcactaccaaaacgcgcccgaccgcaaactctccaaaataaccacgctactactcgcccgcaactacatcctactactaaacaactcgctacaaaaactacgccgcgcgctaaacgaaaacgccgaacccgccgcgccgcgcctactactaaccgaactacccctactcgccgccgcgcccgactccgtactactaacgcccgacgccgtaaaaccccccgacgcgctacgccccgccaaatacctatcgctaacgctaaacgaaccgccgtacgaccaattcgctctccccgacgacgacgcaaacgaccccgacctctacacctacgccgtatacaaattcccgcacctaatcccgaccaacctaaacctaaccgccgtacaaacgcaattctccaaataaaaacgaacctaaacctaaaacgcgacctcgacccgacctcccttcgctcaacttctccgcgcccctactccctacgtctaaaaaaacgaaaccgaacaaaaaaaacatttcgaaccttccaatccaaaaaaaaaaactatcgaacacccccttcccc

SEQ ID NO: 18993 - DNA, 753 bp, Artificial Sequence
  chemically treated genomic DNA (Homo sapiens) CpG-island No: 18993
ttttcggttcggttttcgttttcggttttgttttagtttcgttagcggtttaggattcgtttttggtttcggtttcgtttttggtttcgttttcgttttcgcgtcggcggcggcgcggcgttcgcgttttcgtatcgtttttcgtaggtcggggttcggcgcgcgtattcgtattaaagacgttttttttcggcgggtaggaatttcgtcggcgagtcgaatagtttttcgagcgtagttcgcggattattattcggtcgtacgggtcgtttttgtttttcgttcgtcgtttttgttcgagaggtcgttcgcgaggcgtattttgatcgcgagcgtcgggttttagagtcgggcgcggttggggttcgaggttagtatttttcgggagtcgtaaggcgagagttgtaaaggtaacgtagcgtggcggggtcgcgggagcggagcgcgtggttagttgattggagggaaaacgtcgtttttttgtagcggttttcggaatttttttcggttttttttcgtttttttcgatttttttttttttttttgttttttttttgcgttttgagtatgcggttagtgcgttttttttttttttcggggtcgtatttgcgattttaggatttttttcgggttttgttttgcgttttttacgcgtcgtttttgttgggagttcgttttcgttgtattttttcgcgttttattttattttattaaggatgtttaggatatcgggtatttgttattgtaagatgt

SEQ ID NO: 18994 - DNA, 753 bp, Artificial Sequence
  chemically treated genomic DNA (Homo sapiens) CpG-island No: 18994
acatcttacaataacaaatacccgatatcctaaacatccttaataaaataaaataaaacgcgaaaaaatacaacgaaaacgaactcccaacaaaaacgacgcgtaaaaaacgcaaaacaaaacccgaaaaaaatcctaaaatcgcaaatacgaccccgaaaaaaaaaaaaaacgcactaaccgcatactcaaaacgcaaaaaaaaaacaaaaaaaaaaaaaaaaatcgaaaaaaacgaaaaaaaaccgaaaaaaattccgaaaaccgctacaaaaaaacgacgttttccctccaatcaactaaccacgcgctccgctcccgcgaccccgccacgctacgttacctttacaactctcgccttacgactcccgaaaaatactaacctcgaaccccaaccgcgcccgactctaaaacccgacgctcgcgatcaaaatacgcctcgcgaacgacctctcgaacaaaaacgacgaacgaaaaacaaaaacgacccgtacgaccgaataataatccgcgaactacgctcgaaaaactattcgactcgccgacgaaattcctacccgccgaaaaaaaacgtctttaatacgaatacgcgcgccgaaccccgacctacgaaaaacgatacgaaaacgcgaacgccgcgccgccgccgacgcgaaaacgaaaacgaaaccaaaaacgaaaccgaaaccaaaaacgaatcctaaaccgctaacgaaactaaaacaaaaccgaaaacgaaaaccgaaccgaaaa

SEQ ID NO: 18995 - DNA, 753 bp, Artificial Sequence
  chemically treated genomic DNA (Homo sapiens) CpG-island No: 18995
atattttgtagtggtaaatgttcggtattttgggtatttttggtggggtggggtgggacgcggaggggtgtaacgaaagcggatttttagtaggggcgacgcgtggagggcgtaggatagggttcgggaggggttttggggtcgtaggtgcggtttcgggagagaggaagggcgtattagtcgtatatttaagacgtagagggagggtaggaggaggaggaggagtcggggagagcgagagggaatcggaggggatttcgggaatcgttgtagggaggcggcgttttttttttagttagttggttacgcgtttcgttttcgcgatttcgttacgttgcgttatttttgtagttttcgttttgcggttttcgagagatgttagtttcgggttttagtcgcgttcggttttgggattcgacgttcgcggttaggatgcgtttcgcgggcggtttttcggatagaagcggcgggcgggggataaaagcggttcgtgcggtcgggtggtggttcgcgggttgcgttcggggaattgttcggttcgtcggcgggatttttattcgtcgggaagaagcgtttttagtgcgggtgcgcgcgtcgagtttcggtttacgaggagcgatacggaagcgcgggcgtcgcgtcgtcgtcggcgcgggggcgggggcggagttaggggcggggtcggagttaggggcgggttttgggtcgttggcggggttggagtagggtcggaggcggaggtcgggtcggggg

SEQ ID NO: 18996 - DNA, 753 bp, Artificial Sequence
  chemically treated genomic DNA (Homo sapiens) CpG-island No: 18996
cccccgacccgacctccgcctccgaccctactccaaccccgccaacgacccaaaacccgcccctaactccgaccccgcccctaactccgcccccgcccccgcgccgacgacgacgcgacgcccgcgcttccgtatcgctcctcgtaaaccgaaactcgacgcgcgcacccgcactaaaaacgcttcttcccgacgaataaaaatcccgccgacgaaccgaacaattccccgaacgcaacccgcgaaccaccacccgaccgcacgaaccgcttttatcccccgcccgccgcttctatccgaaaaaccgcccgcgaaacgcatcctaaccgcgaacgtcgaatcccaaaaccgaacgcgactaaaacccgaaactaacatctctcgaaaaccgcaaaacgaaaactacaaaaataacgcaacgtaacgaaatcgcgaaaacgaaacgcgtaaccaactaactaaaaaaaaaacgccgcctccctacaacgattcccgaaatcccctccgattccctctcgctctccccgactcctcctcctcctcctaccctccctctacgtcttaaatatacgactaatacgcccttcctctctcccgaaaccgcacctacgaccccaaaacccctcccgaaccctatcctacgccctccacgcgtcgcccctactaaaaatccgctttcgttacacccctccgcgtcccaccccaccccaccaaaaatacccaaaataccgaacatttaccactacaaaatat

SEQ ID NO: 18997 - DNA, 706 bp, Artificial Sequence
  chemically treated genomic DNA (Homo sapiens) CpG-island No: 18997
ttgcgatttttaaggcgcgcgcgtataggggtgttgtaattaggatggggtaatgggagtttggagaaggggtgttagttaggaggaaaggcgcgtgcgtggaggaacggcgcgtgcgcggaggggcggtgtgtgtgttagaagaggcggcgcgtgcgtagaggggcggtgagagttaagaggggtagcgcgtgtgtagaggggcggtgtgatttaggacggggcgatggcggttgagaggagttgcgcgtgcgcgaatatgtaattggtgggatttgcggcggtttttagatgatggtcgtttttttgggcgcgacgattttagtgttcgtcgtcgtggcgttatgggtgttgttcgtagtcgtaggtgagaggcggggaggagagttttggcgtagggcgggaggtagggtacgtagttgggttacgggggcggcgatgttgttgggggcgatagacgtttagtttgggaaattttcggtttattttgtcgcgttaaagattaaattcgatttgggttcgtaaattaattaggagaaagtggtgttttgggtttttttttgtcgtttgtttgtggtcgtgtacgggttttcgggagcgttcgggttttattttcgtgaaatggcggtgttagagttttgtgtcgagtttgatttttttcgggaaagtatcgcggtttcgttggtttgtttgataataaataaaa

SEQ ID NO: 18998 - DNA, 706 bp, Artificial Sequence
  chemically treated genomic DNA (Homo sapiens) CpG-island No: 18998
ttttatttattatcaaacaaaccaacgaaaccgcgatactttcccgaaaaaaatcaaactcgacacaaaactctaacaccgccatttcacgaaaataaaacccgaacgctcccgaaaacccgtacacgaccacaaacaaacgacaaaaaaaaacccaaaacaccactttctcctaattaatttacgaacccaaatcgaatttaatctttaacgcgacaaaataaaccgaaaatttcccaaactaaacgtctatcgcccccaacaacatcgccgcccccgtaacccaactacgtaccctacctcccgccctacgccaaaactctcctccccgcctctcacctacgactacgaacaacacccataacgccacgacgacgaacactaaaatcgtcgcgcccaaaaaaacgaccatcatctaaaaaccgccgcaaatcccaccaattacatattcgcgcacgcgcaactcctctcaaccgccatcgccccgtcctaaatcacaccgcccctctacacacgcgctacccctcttaactctcaccgcccctctacgcacgcgccgcctcttctaacacacacaccgcccctccgcgcacgcgccgttcctccacgcacgcgcctttcctcctaactaacaccccttctccaaactcccattaccccatcctaattacaacacccctatacgcgcgcgccttaaaaatcgcaa

SEQ ID NO: 18999 - DNA, 706 bp, Artificial Sequence
  chemically treated genomic DNA (Homo sapiens) CpG-island No: 18999
ttttgtttattattaaatagattagcggagtcgcggtattttttcggaaagaattaaattcgatataaagttttggtatcgttattttacgggggtgggattcgggcgttttcgaggattcgtatacggttataggtaagcggtaagagaggatttagaatattatttttttttggttgatttgcgagtttaggtcgggtttaatttttggcgcggtaaagtggatcgaaggttttttagattgggcgtttgtcgtttttaatagtatcgtcgttttcgtagtttagttgcgtgttttatttttcgttttgcgttaagattttttttttcgttttttatttgcggttgcggataatatttatggcgttacggcgacgagtattagggtcgtcgcgtttaggaggacgattattatttgggagtcgtcgtagattttattagttatatgttcgcgtacgcgtagttttttttagtcgttatcgtttcgttttaagttatatcgtttttttgtatacgcgttgttttttttagtttttatcgtttttttacgtacgcgtcgttttttttgatatatatatcgttttttcgcgtacgcgtcgtttttttacgtacgcgtttttttttttagttagtattttttttttaagtttttattgttttattttaattgtagtatttttgtgcgcgcgcgttttagaaatcgtag

SEQ ID NO: 19000 - DNA, 706 bp, Artificial Sequence
  chemically treated genomic DNA (Homo sapiens) CpG-island No: 19000
ctacgatttctaaaacgcgcgcgcacaaaaatactacaattaaaataaaacaataaaaacttaaaaaaaaaatactaactaaaaaaaaaaacgcgtacgtaaaaaaacgacgcgtacgcgaaaaaacgatatatatatcaaaaaaaacgacgcgtacgtaaaaaaacgataaaaactaaaaaaaacaacgcgtatacaaaaaaacgatataacttaaaacgaaacgataacgactaaaaaaaactacgcgtacgcgaacatataactaataaaatctacgacgactcccaaataataatcgtcctcctaaacgcgacgaccctaatactcgtcgccgtaacgccataaatattatccgcaaccgcaaataaaaaacgaaaaaaaaaatcttaacgcaaaacgaaaaataaaacacgcaactaaactacgaaaacgacgatactattaaaaacgacaaacgcccaatctaaaaaaccttcgatccactttaccgcgccaaaaattaaacccgacctaaactcgcaaatcaaccaaaaaaaaataatattctaaatcctctcttaccgcttacctataaccgtatacgaatcctcgaaaacgcccgaatcccacccccgtaaaataacgataccaaaactttatatcgaatttaattctttccgaaaaaataccgcgactccgctaatctatttaataataaacaaaa

SEQ ID NO: 19001 - DNA, 574 bp, Artificial Sequence
  chemically treated genomic DNA (Homo sapiens) CpG-island No: 19001
gatcgcggttttcgaaggtgggcgtttcgcggggttttagtttttaggacgtttcgggaggtttcgcgttttgggaggtcggttgcgtggggttttcgcgttgtagtcgtagaggttttttagggtcgcggttttcggagcgggaaagtttcgcgcgggggcggtggtttcgggggcgggacggggcgggggcgggggcgcgggcggtcgagtcgaattttttttatcgggacgtttcgttgttgttcgggaagaggcgggttttgcgcgttttgcgttcgttatggcggtttgggcggcgacgtgagcggtttcgcggatttcgagcggggtttcggtcgcgatttgagtcgtcgtcgagcgttcggggttatgcgatcgacgttgttgtggtcgttgttgttgttgttcggagttttcgtcgtcgtcgtcgcggtttcgttaggtgagtcgggtttgggttttcgcggcgggacgcgggcgtagtcgtagtatgtgggggttgggggattttcggatcgtggggtggggggaatttgtcgggtgtttagagtgggtgggaatttgcggggtg

SEQ ID NO: 19002 - DNA, 574 bp, Artificial Sequence
  chemically treated genomic DNA (Homo sapiens) CpG-island No: 19002
caccccgcaaattcccacccactctaaacacccgacaaattccccccaccccacgatccgaaaatcccccaacccccacatactacgactacgcccgcgtcccgccgcgaaaacccaaacccgactcacctaacgaaaccgcgacgacgacgacgaaaactccgaacaacaacaacaacgaccacaacaacgtcgatcgcataaccccgaacgctcgacgacgactcaaatcgcgaccgaaaccccgctcgaaatccgcgaaaccgctcacgtcgccgcccaaaccgccataacgaacgcaaaacgcgcaaaacccgcctcttcccgaacaacaacgaaacgtcccgataaaaaaaattcgactcgaccgcccgcgcccccgcccccgccccgtcccgcccccgaaaccaccgcccccgcgcgaaactttcccgctccgaaaaccgcgaccctaaaaaacctctacgactacaacgcgaaaaccccacgcaaccgacctcccaaaacgcgaaacctcccgaaacgtcctaaaaactaaaaccccgcgaaacgcccaccttcgaaaaccgcgatc

SEQ ID NO: 19003 - DNA, 574 bp, Artificial Sequence
  chemically treated genomic DNA (Homo sapiens) CpG-island No: 19003
tatttcgtagatttttatttattttgagtattcggtagattttttttattttacgattcgggagttttttagtttttatatgttgcggttgcgttcgcgtttcgtcgcggaggtttaggttcggtttatttggcggggtcgcggcggcggcggcgaagatttcgagtagtagtagtagcgattatagtagcgtcggtcgtatggtttcgggcgttcggcggcggtttaggtcgcggtcggggtttcgttcggggttcgcggagtcgtttacgtcgtcgtttaaatcgttatggcgagcgtagggcgcgtagggttcgttttttttcgagtagtagcggggcgtttcggtggaggggattcggttcggtcgttcgcgttttcgttttcgtttcgtttcgttttcgaggttatcgttttcgcgcgggattttttcgtttcgggaatcgcggttttggggggtttttgcggttgtagcgcggggattttacgtagtcggttttttagagcgcggagtttttcggaacgttttggagattggagtttcgcgggacgtttattttcgggggtcgcgatt

SEQ ID NO: 19004 - DNA, 574 bp, Artificial Sequence
  chemically treated genomic DNA (Homo sapiens) CpG-island No: 19004
aatcgcgacccccgaaaataaacgtcccgcgaaactccaatctccaaaacgttccgaaaaactccgcgctctaaaaaaccgactacgtaaaatccccgcgctacaaccgcaaaaaccccccaaaaccgcgattcccgaaacgaaaaaatcccgcgcgaaaacgataacctcgaaaacgaaacgaaacgaaaacgaaaacgcgaacgaccgaaccgaatcccctccaccgaaacgccccgctactactcgaaaaaaaacgaaccctacgcgccctacgctcgccataacgatttaaacgacgacgtaaacgactccgcgaaccccgaacgaaaccccgaccgcgacctaaaccgccgccgaacgcccgaaaccatacgaccgacgctactataatcgctactactactactcgaaatcttcgccgccgccgccgcgaccccgccaaataaaccgaacctaaacctccgcgacgaaacgcgaacgcaaccgcaacatataaaaactaaaaaactcccgaatcgtaaaataaaaaaaatctaccgaatactcaaaataaataaaaatctacgaaata

SEQ ID NO: 19005 - DNA, 890 bp, Artificial Sequence
  chemically treated genomic DNA (Homo sapiens) CpG-island No: 19005
acgggaggggcgaagaagggttggagtcgtttcggggttttcgtttcggtttcgggagggcgtcgcggtcgtagtagggcgtttcgaaaatcgtcgttttcgtgttcgtcgcgcgagaaggtgaaaggtacgagatggagtttttttagttttttttaggaacgtaatttgacggcgtgatagcgcggtagggtagttttttcgggttgtttgcgggtcgcggcggcgttacggttacggtcggttcgaagggacgcgggtaggggtaagaaggggcggcgggggtttcgcgggttcgagtttgtaggtcggcgtcgaacgtagggaaaattcggttggacggttttatagtttttagaaggtcgggtcggatagggttcgacgagggagtttttttacgcgcgggcggcgggcgcgagttttttacggttgtttggcgtcggagatttatagataggatttatttagtttttttaaacgtttacgtcgattttaggcgcgcgcgtaggaaggagattgttgcgttataattttgtcggcgtttcgcggttttattttagtttcgggagttcggagttgggagtagacgcgaggatagagcgtcggtgaggcggggcgaggcgtcgtgtgtatcgtagcgattaatcggagcgtagtaagtggtcggtcgggggcggggcgggacgcgagggggcggggagagggcgttggttgggcgtagcgggacgtcgggcgtttttcgcgattaatcggcgtgtagtaagtggtcggtcgggggtagggcgagtttcgagggacggggtgggttgttttgtaggtttttcggagtcggagtttagatttagttatttacggtttcgggtagagcgggacgggttttttttgttttt

SEQ ID NO: 19006 - DNA, 890 bp, Artificial Sequence
  chemically treated genomic DNA (Homo sapiens) CpG-island No: 19006
aaaaacaaaaaaaacccgtcccgctctacccgaaaccgtaaataactaaatctaaactccgactccgaaaaacctacaaaacaacccaccccgtccctcgaaactcgccctacccccgaccgaccacttactacacgccgattaatcgcgaaaaacgcccgacgtcccgctacgcccaaccaacgccctctccccgccccctcgcgtcccgccccgcccccgaccgaccacttactacgctccgattaatcgctacgatacacacgacgcctcgccccgcctcaccgacgctctatcctcgcgtctactcccaactccgaactcccgaaactaaaataaaaccgcgaaacgccgacaaaattataacgcaacaatctccttcctacgcgcgcgcctaaaatcgacgtaaacgtttaaaaaaactaaataaatcctatctataaatctccgacgccaaacaaccgtaaaaaactcgcgcccgccgcccgcgcgtaaaaaaactccctcgtcgaaccctatccgacccgaccttctaaaaactataaaaccgtccaaccgaattttccctacgttcgacgccgacctacaaactcgaacccgcgaaacccccgccgccccttcttacccctacccgcgtcccttcgaaccgaccgtaaccgtaacgccgccgcgacccgcaaacaacccgaaaaaactaccctaccgcgctatcacgccgtcaaattacgttcctaaaaaaaactaaaaaaactccatctcgtacctttcaccttctcgcgcgacgaacacgaaaacgacgattttcgaaacgccctactacgaccgcgacgccctcccgaaaccgaaacgaaaaccccgaaacgactccaacccttcttcgcccctcccgt

SEQ ID NO: 19007 - DNA, 890 bp, Artificial Sequence
  chemically treated genomic DNA (Homo sapiens) CpG-island No: 19007
ggggataggagaggttcgtttcgttttgttcggaatcgtagatagttgggtttgaatttcggtttcgggaggtttgtagagtagtttatttcgtttttcggagttcgttttgttttcggtcggttatttgttgtacgtcgattggtcgcgaggagcgttcggcgtttcgttgcgtttagttaacgtttttttttcgttttttcgcgtttcgtttcgttttcggtcggttatttgttgcgtttcgattggtcgttgcggtgtatacggcgtttcgtttcgttttatcggcgttttattttcgcgtttgtttttagtttcgggttttcggggttgaggtggagtcgcgggacgtcggtagggttgtggcgtagtagttttttttttgcgcgcgcgtttgaagtcggcgtgggcgtttgaggaagttgggtgagttttgtttgtgggttttcggcgttaggtaatcgtagagggttcgcgttcgtcgttcgcgcgtaaggaggttttttcgtcgggttttgttcggttcggttttttgggggttgtggggtcgtttagtcgggttttttttgcgttcggcgtcggtttgtagattcgggttcgcggagttttcgtcgtttttttttgtttttgttcgcgttttttcgggtcgatcgtgatcgtggcgtcgtcgcgattcgtaagtagttcggggaggttgttttgtcgcgttgttacgtcgttaggttgcgtttttggggagggttggagaggttttatttcgtgttttttattttttcgcgcggcgggtacggaggcgacggttttcgggacgttttgttgcggtcgcgacgttttttcgaggtcggagcgagggtttcggggcggttttagttttttttcgtttttttcgt

SEQ ID NO: 19008 - DNA, 890 bp, Artificial Sequence
  chemically treated genomic DNA (Homo sapiens) CpG-island No: 19008
acgaaaaaaacgaaaaaaaactaaaaccgccccgaaaccctcgctccgacctcgaaaaaacgtcgcgaccgcaacaaaacgtcccgaaaaccgtcgcctccgtacccgccgcgcgaaaaaataaaaaacacgaaataaaacctctccaaccctccccaaaaacgcaacctaacgacgtaacaacgcgacaaaacaacctccccgaactacttacgaatcgcgacgacgccacgatcacgatcgacccgaaaaaacgcgaacaaaaacaaaaaaaaacgacgaaaactccgcgaacccgaatctacaaaccgacgccgaacgcaaaaaaaacccgactaaacgaccccacaacccccaaaaaaccgaaccgaacaaaacccgacgaaaaaacctccttacgcgcgaacgacgaacgcgaaccctctacgattacctaacgccgaaaacccacaaacaaaactcacccaacttcctcaaacgcccacgccgacttcaaacgcgcgcgcaaaaaaaaaactactacgccacaaccctaccgacgtcccgcgactccacctcaaccccgaaaacccgaaactaaaaacaaacgcgaaaataaaacgccgataaaacgaaacgaaacgccgtatacaccgcaacgaccaatcgaaacgcaacaaataaccgaccgaaaacgaaacgaaacgcgaaaaaacgaaaaaaaaacgttaactaaacgcaacgaaacgccgaacgctcctcgcgaccaatcgacgtacaacaaataaccgaccgaaaacaaaacgaactccgaaaaacgaaataaactactctacaaacctcccgaaaccgaaattcaaacccaactatctacgattccgaacaaaacgaaacgaacctctcctatcccc

SEQ ID NO: 19009 - DNA, 529 bp, Artificial Sequence
  chemically treated genomic DNA (Homo sapiens) CpG-island No: 19009
tataaattagtttttttaagttgtgtaagagcgatcgtcgcggagggattaagaaattttttttttttttttgtttcgcgggattttttcggtttcgttttagatttaatttagatagatattattatttaggtttcgttttttgtttttacggtttttgaaatttattttatttgatttcgttatcgggtgcgattagttagagtcgtagcgttcgggaatttatggttagcgtttttatagtagcggtgagaatcgtcgcgcgtaagttttttttcgtttttttttttcggaaatcgaacgcgtattcggagtttcgtaggataggtttgtttcggatttagtatttagattgttcgtttttatcggggggcgttaggtttcgttggggatttagtggttgagatttcgagattcggagtcggggcgcgttatttgtgttcgatatttgggcgcggttatttatttagaggtgtagggtttttagggcggtcggtttgtcgtttattacgtaggttttgtagggaaa

SEQ ID NO: 19010 - DNA, 529 bp, Artificial Sequence
  chemically treated genomic DNA (Homo sapiens) CpG-island No: 19010
tttccctacaaaacctacgtaataaacgacaaaccgaccgccctaaaaaccctacacctctaaataaataaccgcgcccaaatatcgaacacaaataacgcgccccgactccgaatctcgaaatctcaaccactaaatccccaacgaaacctaacgccccccgataaaaacgaacaatctaaatactaaatccgaaacaaacctatcctacgaaactccgaatacgcgttcgatttccgaaaaaaaaaaacgaaaaaaaacttacgcgcgacgattctcaccgctactataaaaacgctaaccataaattcccgaacgctacgactctaactaatcgcacccgataacgaaatcaaataaaataaatttcaaaaaccgtaaaaacaaaaaacgaaacctaaataataatatctatctaaattaaatctaaaacgaaaccgaaaaaatcccgcgaaacaaaaaaaaaaaaaaaatttcttaatccctccgcgacgatcgctcttacacaacttaaaaaaactaatttata

SEQ ID NO: 19011 - DNA, 529 bp, Artificial Sequence
  chemically treated genomic DNA (Homo sapiens) CpG-island No: 19011
tttttttgtagagtttacgtggtgggcggtaggtcgatcgttttgggggttttgtatttttgggtaggtgatcgcgtttaggtatcgagtataggtaacgcgtttcggtttcgagtttcggggttttagttattgaatttttagcgaggtttgacgtttttcggtggaggcgagtagtttgagtgttgggttcggaatagatttgttttgcggaatttcgagtgcgcgttcggttttcgggggaggagggcggagaaggatttgcgcgcgacggtttttatcgttgttatggaggcgttggttatgggttttcgggcgttgcggttttggttggtcgtattcggtggcgggattaaatggagtgagttttagaggtcgtagggatagggagcgaggtttagatagtggtgtttgtttagattgggtttgaggcggggtcggggaggtttcgcggggtagaggaaggaggagggttttttagttttttcgcggcggtcgtttttgtatagtttgggaggattaatttatg

SEQ ID NO: 19012 - DNA, 529 bp, Artificial Sequence
  chemically treated genomic DNA (Homo sapiens) CpG-island No: 19012
cataaattaatcctcccaaactatacaaaaacgaccgccgcgaaaaaactaaaaaaccctcctccttcctctaccccgcgaaacctccccgaccccgcctcaaacccaatctaaacaaacaccactatctaaacctcgctccctatccctacgacctctaaaactcactccatttaatcccgccaccgaatacgaccaaccaaaaccgcaacgcccgaaaacccataaccaacgcctccataacaacgataaaaaccgtcgcgcgcaaatccttctccgccctcctcccccgaaaaccgaacgcgcactcgaaattccgcaaaacaaatctattccgaacccaacactcaaactactcgcctccaccgaaaaacgtcaaacctcgctaaaaattcaataactaaaaccccgaaactcgaaaccgaaacgcgttacctatactcgatacctaaacgcgatcacctacccaaaaatacaaaacccccaaaacgatcgacctaccgcccaccacgtaaactctacaaaaaaa

SEQ ID NO: 19013 - DNA, 519 bp, Artificial Sequence
  chemically treated genomic DNA (Homo sapiens) CpG-island No: 19013
tttagtcgcgggagttgtaggttttattcggagagacgttgtacgtggagttttcgtcgttgtcgtttttagtcggttttggagtgcgggcgggggcgatagggtcgatttcggagtgggtgagtgcggtcgtcggggaggaggggagcgcgggttttcgcgggtcggtttcgtttcggggtttttttttttataagggttttttcgcggtcgtttttgtgttttgttttcgttggttttcggcgttgtgatttttattttcgttcgtggagatttgagggagtcgggtggggaggggcgggagagttgtgcggggagcgaaggggaggggcggggggcgagcggtttggagttcggggggatcgggtatcgtcgggattcgtgtcggacgggtcgtttgtcgtcgttttttttttttcgcgtttttttttcgttcgttcgtattttttagtagttttagtttgtttagttgggatgtggttttgacgttttcgagattttaagagtaaaatgtagatt

SEQ ID NO: 19014 - DNA, 519 bp, Artificial Sequence
  chemically treated genomic DNA (Homo sapiens) CpG-island No: 19014
aatctacattttactcttaaaatctcgaaaacgtcaaaaccacatcccaactaaacaaactaaaactactaaaaaatacgaacgaacgaaaaaaaaacgcgaaaaaaaaaaaacgacgacaaacgacccgtccgacacgaatcccgacgatacccgatccccccgaactccaaaccgctcgccccccgcccctccccttcgctccccgcacaactctcccgcccctccccacccgactccctcaaatctccacgaacgaaaataaaaatcacaacgccgaaaaccaacgaaaacaaaacacaaaaacgaccgcgaaaaaacccttataaaaaaaaaaaccccgaaacgaaaccgacccgcgaaaacccgcgctcccctcctccccgacgaccgcactcacccactccgaaatcgaccctatcgcccccgcccgcactccaaaaccgactaaaaacgacaacgacgaaaactccacgtacaacgtctctccgaataaaacctacaactcccgcgactaaa

SEQ ID NO: 19015 - DNA, 519 bp, Artificial Sequence
  chemically treated genomic DNA (Homo sapiens) CpG-island No: 19015
ggtttgtattttgtttttaaaatttcgggggcgttaggattatattttagttgagtaggttgagattgttgaggagtgcggacgggcgaggaggggacgcggaaaggagggagcggcgataggcgattcgttcggtacgggtttcggcggtgttcggttttttcgggttttaggtcgttcgtttttcgtttttttttttcgtttttcgtatagttttttcgtttttttttattcggtttttttaagtttttacgaacggaaatgggagttatagcgtcggggattagcggaaataaaatatagaggcggtcgcgggggggtttttgtgggggaaaaggtttcggaacgaggtcggttcgcgagggttcgcgtttttttttttttcggcggtcgtatttatttatttcggaatcggttttgtcgttttcgttcgtattttagagtcggttgagaacggtagcggcgagggttttacgtgtagcgttttttcgggtaagatttgtagttttcgcgattaga

SEQ ID NO: 19016 - DNA, 519 bp, Artificial Sequence
  chemically treated genomic DNA (Homo sapiens) CpG-island No: 19016
tctaatcgcgaaaactacaaatcttacccgaaaaaacgctacacgtaaaaccctcgccgctaccgttctcaaccgactctaaaatacgaacgaaaacgacaaaaccgattccgaaataaataaatacgaccgccgaaaaaaaaaaaaacgcgaaccctcgcgaaccgacctcgttccgaaaccttttcccccacaaaaacccccccgcgaccgcctctatattttatttccgctaatccccgacgctataactcccatttccgttcgtaaaaacttaaaaaaaccgaataaaaaaaaacgaaaaaactatacgaaaaacgaaaaaaaaaaacgaaaaacgaacgacctaaaacccgaaaaaaccgaacaccgccgaaacccgtaccgaacgaatcgcctatcgccgctccctcctttccgcgtcccctcctcgcccgtccgcactcctcaacaatctcaacctactcaactaaaatataatcctaacgcccccgaaattttaaaaacaaaatacaaacc

SEQ ID NO: 19017 - DNA, 697 bp, Artificial Sequence
  chemically treated genomic DNA (Homo sapiens) CpG-island No: 19017
gttcgcgggtcggttcgtcggggggtttcgcggcgattcgcggtcggttgtttaggcgggcgaaggggttttttcgagtagcggtcgggtcgtcgtcgttgttatcgtttttgtttttcgtagtagggaaagggcgaagaggtagtttcgttattagggcggttcggcgggtcgtcggtttcgttagtttacggggcggggaggcggtagttttacggtttcgggttttttttcgtcggagtcgtattatttcgggcggttttcggaagttcggtgagtagtcgggtatcgaaagggttatgacgcgcggcggttgagggtagtcggtcgttttatagagatttttcgcgcgcgtcgggttcgtttttgacgtggcgtttcgtcgagttttcgttttcgacgcggtttcgttttcgttttcgtcggtttcgagcggagtatgcgtagtgggtagttcgcgagacgtagttcgtagcggcgatttcgggtggtcgttaacgtttattgttttagcggtgattttgttttggcgtttttgttaggttttcggttagagtttagtcgttaggtttagcgacgtttttggaaagtatgcgatttagggcgttgatgtgtattattttgtggggtatcgaaatagtttaattttatttaagttcgtagtagggatgtgattagttcggggtttggcgtttgg

SEQ ID NO: 19018 - DNA, 697 bp, Artificial Sequence
  chemically treated genomic DNA (Homo sapiens) CpG-island No: 19018
ccaaacgccaaaccccgaactaatcacatccctactacgaacttaaataaaattaaactatttcgataccccacaaaataatacacatcaacgccctaaatcgcatactttccaaaaacgtcgctaaacctaacgactaaactctaaccgaaaacctaacaaaaacgccaaaacaaaatcaccgctaaaacaataaacgttaacgaccacccgaaatcgccgctacgaactacgtctcgcgaactacccactacgcatactccgctcgaaaccgacgaaaacgaaaacgaaaccgcgtcgaaaacgaaaactcgacgaaacgccacgtcaaaaacgaacccgacgcgcgcgaaaaatctctataaaacgaccgactaccctcaaccgccgcgcgtcataaccctttcgatacccgactactcaccgaacttccgaaaaccgcccgaaataatacgactccgacgaaaaaaaacccgaaaccgtaaaactaccgcctccccgccccgtaaactaacgaaaccgacgacccgccgaaccgccctaataacgaaactacctcttcgccctttccctactacgaaaaacaaaaacgataacaacgacgacgacccgaccgctactcgaaaaaaccccttcgcccgcctaaacaaccgaccgcgaatcgccgcgaaaccccccgacgaaccgacccgcgaac

SEQ ID NO: 19019 - DNA, 697 bp, Artificial Sequence
  chemically treated genomic DNA (Homo sapiens) CpG-island No: 19019
ttaggcgttaaatttcgggttgattatatttttgttgcgggtttaaatagagttaagttatttcggtgttttatagggtagtgtatattagcgttttggatcgtatattttttagaagcgtcgttgaatttggcgattggattttggtcgaggatttggtagaagcgttagggtagggttatcgttgggatagtgggcgttgacggttattcgggatcgtcgttgcgggttgcgtttcgcgggttgtttattgcgtatgtttcgttcggaatcggcgggggcggaggcggggtcgcgtcgggggcgggagttcggcgaggcgttacgttaggggcgggttcggcgcgcgcgggaagtttttgtagggcggtcggttatttttagtcgtcgcgcgttatggttttttcggtgttcggttatttatcgggttttcgaaagtcgttcgaggtagtgcggtttcgacggaaaagggttcggagtcgtggagttgtcgttttttcgtttcgtgagttgacggagtcggcggttcgtcgagtcgttttggtggcggggttgttttttcgttttttttttgttgcggggggtagaggcggtggtagcggcggcggttcggtcgttgttcggaggaattttttcgttcgtttggataatcgatcgcgggtcgtcgcggagtttttcgacgggtcggttcgcgagt

SEQ ID NO: 19020 - DNA, 697 bp, Artificial Sequence
  chemically treated genomic DNA (Homo sapiens) CpG-island No: 19020
actcgcgaaccgacccgtcgaaaaactccgcgacgacccgcgatcgattatccaaacgaacgaaaaaattcctccgaacaacgaccgaaccgccgccgctaccaccgcctctaccccccgcaacaaaaaaaaaacgaaaaaacaaccccgccaccaaaacgactcgacgaaccgccgactccgtcaactcacgaaacgaaaaaacgacaactccacgactccgaacccttttccgtcgaaaccgcactacctcgaacgactttcgaaaacccgataaataaccgaacaccgaaaaaaccataacgcgcgacgactaaaaataaccgaccgccctacaaaaacttcccgcgcgcgccgaacccgcccctaacgtaacgcctcgccgaactcccgcccccgacgcgaccccgcctccgcccccgccgattccgaacgaaacatacgcaataaacaacccgcgaaacgcaacccgcaacgacgatcccgaataaccgtcaacgcccactatcccaacgataaccctaccctaacgcttctaccaaatcctcgaccaaaatccaatcgccaaattcaacgacgcttctaaaaaatatacgatccaaaacgctaatatacactaccctataaaacaccgaaataacttaactctatttaaacccgcaacaaaaatataatcaacccgaaatttaacgcctaa

SEQ ID NO: 19021 - DNA, 982 bp, Artificial Sequence
  chemically treated genomic DNA (Homo sapiens) CpG-island No: 19021
gcgggagcgagggagcgagggagggagcgaaggaggtagagaagagtggaggcgttaggggagggagcgtagtttggttgtttcgtagtacggcggttcgcgaggaagaatttcgagcgggtttcgggacggatagagaggcgggcggggatggtgtgcggggttgcggtttttgcgttttttttagcggcgcgtgagcggtattgatttgtttttggggcggtagcgcggattcgttcggagatgaggtgaggagagggttgtaaggcggcggtttggattacgggcggttgtagcgggggcgggggtcggcgcgggggtttgcgcgatggttgttcggggtattcgtttcgcgttcggcgtttgttttttcggtcgtttttagtttttcgtcgcgcgttcgagagacggtagcggttgtttttttgttttgtttttttcgttttcgggggtggcggcggagtggcgggcggattcgtattgggaggtcgggggtcgcggtgggtcgtggggtggcggtcgcgggacgggcgtggggatgaatgggcgtcgcggtttcgtcgtcgagcgggtttttttttttcgcggggatttcgggcggtcgttttttttcgggttgatttcgttgttttcggtcgtcggcgaggggcggttcggtttcgtttttcgtcggtttttcggggattcgcgttggcgggagcggcgtcgtttttgtttggagtttcggtttttttttcggtttttcgttcgtaagtttgtagaattttgggttagtgaagggtaggtaatgtcgttcggttttagggcgcgtcgcggggtcgtttttgaaggtatttaaaggggagcgtttttcgcgttttgtgagcgcgttttcgggttcgtcgcgttttttttttttttacgtatcgatacggttttgtggtgtggatttaagatataattgtagttttttgtttgtacgaatgtaattcgaatttttaaa

SEQ ID NO: 19022 - DNA, 982 bp, Artificial Sequence
  chemically treated genomic DNA (Homo sapiens) CpG-island No: 19022
tttaaaaattcgaattacattcgtacaaacaaaaaactacaattatatcttaaatccacaccacaaaaccgtatcgatacgtaaaaaaaaaaaaaacgcgacgaacccgaaaacgcgctcacaaaacgcgaaaaacgctcccctttaaataccttcaaaaacgaccccgcgacgcgccctaaaaccgaacgacattacctacccttcactaacccaaaattctacaaacttacgaacgaaaaaccgaaaaaaaaaccgaaactccaaacaaaaacgacgccgctcccgccaacgcgaatccccgaaaaaccgacgaaaaacgaaaccgaaccgcccctcgccgacgaccgaaaacaacgaaatcaacccgaaaaaaaacgaccgcccgaaatccccgcgaaaaaaaaaaacccgctcgacgacgaaaccgcgacgcccattcatccccacgcccgtcccgcgaccgccaccccacgacccaccgcgacccccgacctcccaatacgaatccgcccgccactccgccgccacccccgaaaacgaaaaaaacaaaacaaaaaaacaaccgctaccgtctctcgaacgcgcgacgaaaaactaaaaacgaccgaaaaaacaaacgccgaacgcgaaacgaataccccgaacaaccatcgcgcaaacccccgcgccgacccccgcccccgctacaaccgcccgtaatccaaaccgccgccttacaaccctctcctcacctcatctccgaacgaatccgcgctaccgccccaaaaacaaatcaataccgctcacgcgccgctaaaaaaaacgcaaaaaccgcaaccccgcacaccatccccgcccgcctctctatccgtcccgaaacccgctcgaaattcttcctcgcgaaccgccgtactacgaaacaaccaaactacgctccctcccctaacgcctccactcttctctacctccttcgctccctccctcgctccctcgctcccgc

SEQ ID NO: 19023 - DNA, 982 bp, Artificial Sequence
  chemically treated genomic DNA (Homo sapiens) CpG-island No: 19023
tttgggaattcggattgtattcgtgtaagtaagggattgtaattgtgttttgggtttatattataaaatcgtgtcggtgcgtaagaagggaagggacgcggcggattcggggacgcgtttatagggcgcggaagacgtttttttttaaatgtttttaggggcggtttcgcggcgcgttttggggtcgaacggtattgtttgttttttattgatttaggattttgtaggtttgcgagcgaggggtcgaggaaggagtcggggttttaggtagaggcggcgtcgttttcgttaacgcgggttttcgggaggtcggcgggaggcgaggtcgggtcgtttttcgtcggcggtcgagggtagcgaggttagttcgggaaggagcggtcgttcggggttttcgcgagaggagggagttcgttcggcggcggggtcgcggcgtttatttatttttacgttcgtttcgcggtcgttattttacggtttatcgcggttttcggttttttagtgcgggttcgttcgttatttcgtcgttattttcgaggacgggaaggataaggtagaggggtagtcgttgtcgtttttcgggcgcgcggcgaggggttaagggcggtcggggagataagcgtcgggcgcgggacggatgtttcgggtagttatcgcgtagattttcgcgtcgattttcgttttcgttgtagtcgttcgtggtttaggtcgtcgttttgtagttttttttttattttattttcgggcgggttcgcgttgtcgttttagggataaattagtgtcgtttacgcgtcgttgggagggacgtaggagtcgtagtttcgtatattattttcgttcgtttttttgttcgtttcggagttcgttcgggattttttttcgcgagtcgtcgtattacggagtaattaagttacgtttttttttttggcgtttttatttttttttatttttttcgttttttttttcgttttttcgttttcgt

SEQ ID NO: 19024 - DNA, 982 bp, Artificial Sequence
  chemically treated genomic DNA (Homo sapiens) CpG-island No: 19024
acgaaaacgaaaaaacgaaaaaaaaaacgaaaaaaataaaaaaaaataaaaacgccaaaaaaaaaaacgtaacttaattactccgtaatacgacgactcgcgaaaaaaaatcccgaacgaactccgaaacgaacaaaaaaacgaacgaaaataatatacgaaactacgactcctacgtccctcccaacgacgcgtaaacgacactaatttatccctaaaacgacaacgcgaacccgcccgaaaataaaataaaaaaaaaactacaaaacgacgacctaaaccacgaacgactacaacgaaaacgaaaatcgacgcgaaaatctacgcgataactacccgaaacatccgtcccgcgcccgacgcttatctccccgaccgcccttaacccctcgccgcgcgcccgaaaaacgacaacgactacccctctaccttatccttcccgtcctcgaaaataacgacgaaataacgaacgaacccgcactaaaaaaccgaaaaccgcgataaaccgtaaaataacgaccgcgaaacgaacgtaaaaataaataaacgccgcgaccccgccgccgaacgaactccctcctctcgcgaaaaccccgaacgaccgctccttcccgaactaacctcgctaccctcgaccgccgacgaaaaacgacccgacctcgcctcccgccgacctcccgaaaacccgcgttaacgaaaacgacgccgcctctacctaaaaccccgactccttcctcgacccctcgctcgcaaacctacaaaatcctaaatcaataaaaaacaaacaataccgttcgaccccaaaacgcgccgcgaaaccgcccctaaaaacatttaaaaaaaaacgtcttccgcgccctataaacgcgtccccgaatccgccgcgtcccttcccttcttacgcaccgacacgattttataatataaacccaaaacacaattacaatcccttacttacacgaatacaatccgaattcccaaa

SEQ ID NO: 19025 - DNA, 500 bp, Artificial Sequence
  chemically treated genomic DNA (Homo sapiens) CpG-island No: 19025
cgtttttcgaggcgcggtatttatttttagcgttcgagtcgtttaggcggttagtaggagtagtgttaaatcgggtagtatcgcgattttgcgcggggtatcgagtgcgttgttgtgcgagtgggattcgtcgcgtttttgttttgttcgcgtcgttatcgtcgtcgtttttcggggttttcgcgtacgttttttcgcgtgttttcgtttatcgttgtcgaggaaattgacggagttcgagcgcggcggcggggtttagagttaggcgagttagttgattcggtttatttcgttcggtattcgagagagatttttagcggcgtcgtcggggaattgcgttcgttcgcgtcgggaggggttttcgcgtttcgcgtttataggtgtacgcgtttttggcgtcgtttgtattttacgcgtttttttcgtttttcggtcgacggtttatttgggtttcgtgaatagtgggagggagagtttggggttaggagagggacggtgta

SEQ ID NO: 19026 - DNA, 500 bp, Artificial Sequence
  chemically treated genomic DNA (Homo sapiens) CpG-island No: 19026
tacaccgtccctctcctaaccccaaactctccctcccactattcacgaaacccaaataaaccgtcgaccgaaaaacgaaaaaaacgcgtaaaatacaaacgacgccaaaaacgcgtacacctataaacgcgaaacgcgaaaacccctcccgacgcgaacgaacgcaattccccgacgacgccgctaaaaatctctctcgaataccgaacgaaataaaccgaatcaactaactcgcctaactctaaaccccgccgccgcgctcgaactccgtcaatttcctcgacaacgataaacgaaaacacgcgaaaaaacgtacgcgaaaaccccgaaaaacgacgacgataacgacgcgaacaaaacaaaaacgcgacgaatcccactcgcacaacaacgcactcgataccccgcgcaaaatcgcgatactacccgatttaacactactcctactaaccgcctaaacgactcgaacgctaaaaataaataccgcgcctcgaaaaacg

SEQ ID NO: 19027 - DNA, 500 bp, Artificial Sequence
  chemically treated genomic DNA (Homo sapiens) CpG-island No: 19027
tgtatcgttttttttttggttttagatttttttttttattgtttacgaagtttaggtgggtcgtcggtcggggagcggagggggcgcgtggggtgtaggcggcgttaagggcgcgtgtatttgtgggcgcggggcgcgagggtttttttcggcgcgagcgggcgtagtttttcggcggcgtcgttaggggtttttttcgggtgtcgagcggggtgggtcggattagttgattcgtttggttttgagtttcgtcgtcgcgttcgggtttcgttagttttttcggtagcggtaggcgagagtacgcggaggagcgtgcgcgggggtttcgggagacggcggcggtggcggcgcgggtagagtaaggacgcggcggattttattcgtatagtagcgtattcggtgtttcgcgtagggtcgcgatgttgttcggtttggtattgtttttgttggtcgtttggacggttcgggcgttggaggtgggtgtcgcgtttcggaaggcg

SEQ ID NO: 19028 - DNA, 500 bp, Artificial Sequence
  chemically treated genomic DNA (Homo sapiens) CpG-island No: 19028
cgccttccgaaacgcgacacccacctccaacgcccgaaccgtccaaacgaccaacaaaaacaataccaaaccgaacaacatcgcgaccctacgcgaaacaccgaatacgctactatacgaataaaatccgccgcgtccttactctacccgcgccgccaccgccgccgtctcccgaaacccccgcgcacgctcctccgcgtactctcgcctaccgctaccgaaaaaactaacgaaacccgaacgcgacgacgaaactcaaaaccaaacgaatcaactaatccgacccaccccgctcgacacccgaaaaaaacccctaacgacgccgccgaaaaactacgcccgctcgcgccgaaaaaaaccctcgcgccccgcgcccacaaatacacgcgcccttaacgccgcctacaccccacgcgccccctccgctccccgaccgacgacccacctaaacttcgtaaacaataaaaaaaaaaatctaaaaccaaaaaaaaaacgataca

SEQ ID NO: 19029 - DNA, 1099 bp, Artificial Sequence
  chemically treated genomic DNA (Homo sapiens) CpG-island No: 19029
aggtgatttttttttttagcgagtaaatgcggggcgatggcgagagcgtagggggcggcggcgttgttttattttggggagcgaatttatttttttagtcgtattagtttgggcgtatacgggggtcggggcgagtttgtgggattttgtagtgagtttcgcgcgtttcgggggtgttaggggatcgggattttcggggcgtcgtttttacgttttagttttgacgggttcgcggtcgagtagttcgggggacgtcgttgttttttcgtttcgcgcgcggtcgggattgggcgttgcgattcgcgtcgttttttcgggtaataagtgttcgtttttcgtttcgacggttcgttcggcgcggtttttattcggtataggtcgtttacgaatacgcgcgggtttaggtgataggcgatggtggcgttgggtaggttttgtaggtttattttttttatttcgtagttaatgaagttttagtcgtcgtcgttttcgttcgtttcggtcgttttcgagaggggcgcgaagggtcgtagcgttatttcgggtcgcgttcgcgtttcggtcgttttcgtcgttttcgtcgcggtttcgagttggggatcggttacgtcgttttttattttcgcgttcgcgcgattttgtgcgttttagcgggttgtttcgggtttgcgcgtcggagttttacgcgtttcggttcgcgttcggtcggcggtttcgtcgttaattttttcggaatcgcgcggcggtaggcggcgggttgttagtagttttttagcgatacggttttttagcgttagtttcgttcgttatcgtttcgcgcgggaggggtagaagttcggcgcggcgatcgtttttttagtttttagggtcggttatcggtagatttaacggtggtttttttaaggtcggcgtcggttgggttattgtatttcgtttttttaggagacggggttaataaaggaacggaattttttttacgtgattttttttttgtcgttcgaagttcgaagttttagggcggttatgttggttaggggtaaagttttcgtttttagtttcgtttttttgatagttggtgttagttgaaggacgtcgggta

SEQ ID NO: 19030 - DNA, 1099 bp, Artificial Sequence
  chemically treated genomic DNA (Homo sapiens) CpG-island No: 19030
tacccgacgtccttcaactaacaccaactatcaaaaaaacgaaactaaaaacgaaaactttacccctaaccaacataaccgccctaaaacttcgaacttcgaacgacaaaaaaaaaatcacgtaaaaaaaattccgttcctttattaaccccgtctcctaaaaaaacgaaatacaataacccaaccgacgccgaccttaaaaaaaccaccgttaaatctaccgataaccgaccctaaaaactaaaaaaacgatcgccgcgccgaacttctacccctcccgcgcgaaacgataacgaacgaaactaacgctaaaaaaccgtatcgctaaaaaactactaacaacccgccgcctaccgccgcgcgattccgaaaaaattaacgacgaaaccgccgaccgaacgcgaaccgaaacgcgtaaaactccgacgcgcaaacccgaaacaacccgctaaaacgcacaaaatcgcgcgaacgcgaaaataaaaaacgacgtaaccgatccccaactcgaaaccgcgacgaaaacgacgaaaacgaccgaaacgcgaacgcgacccgaaataacgctacgacccttcgcgcccctctcgaaaacgaccgaaacgaacgaaaacgacgacgactaaaacttcattaactacgaaataaaaaaaataaacctacaaaacctacccaacgccaccatcgcctatcacctaaacccgcgcgtattcgtaaacgacctataccgaataaaaaccgcgccgaacgaaccgtcgaaacgaaaaacgaacacttattacccgaaaaaacgacgcgaatcgcaacgcccaatcccgaccgcgcgcgaaacgaaaaaacaacgacgtcccccgaactactcgaccgcgaacccgtcaaaactaaaacgtaaaaacgacgccccgaaaatcccgatcccctaacacccccgaaacgcgcgaaactcactacaaaatcccacaaactcgccccgacccccgtatacgcccaaactaatacgactaaaaaaataaattcgctccccaaaataaaacaacgccgccgccccctacgctctcgccatcgccccgcatttactcgctaaaaaaaaaaatcacct

SEQ ID NO: 19031 - DNA, 1099 bp, Artificial Sequence
  chemically treated genomic DNA (Homo sapiens) CpG-island No: 19031
tgttcggcgttttttagttggtattagttgttagaaaagcggaattggggacgaggattttgtttttaattaatatggtcgttttgaggtttcgggtttcgggcggtagaaggaaggttacgtgaagagaatttcgtttttttattggtttcgttttttggaagggcggggtataataatttaatcggcgtcggttttaaaggggttatcgttggatttgtcggtggtcggttttaggggttgggggggcggtcgtcgcgtcgggtttttgtttttttcgcgcggaacggtgacgggcggggttggcgttgggaggtcgtgtcgttgggagattgttgatagttcgtcgtttgtcgtcgcgcgatttcgagggggttaacggcggagtcgtcggtcgggcgcggatcggagcgcgtgaggtttcggcgcgtaagttcggagtagttcgttggggcgtatagggtcgcgcgggcgcggggatggaggacggcgtggtcggtttttagttcggggtcgcggcggaggcggcggaggcggtcgaggcgcgagcgcggttcggggtgacgttgcggtttttcgcgtttttttcgggggcggtcgaggcggacgagggcggcggcgattggagttttattgattgcgagatggaggaggtggatttgtaggatttgtttagcgttattatcgtttgttatttggattcgcgcgtgttcgtggacggtttgtgtcgggtgaggatcgcgtcgggcgggtcgtcggggcggagggcggatatttgttgttcgaggaggcggcgcgggtcgtagcgtttagtttcggtcgcgcgcggggcggggaggtagcgacgtttttcgggttgttcggtcgcggattcgttagggttggggcgtggggacggcgtttcgagggtttcggttttttagtattttcggggcgcgcggagtttattgtagagttttataggttcgtttcggttttcgtgtgcgtttaggttggtgcgattaggggggtgaattcgttttttaaggtggggtagcgtcgtcgttttttgcgttttcgttatcgtttcgtatttattcgttggaggagggggttattt

SEQ ID NO: 19032 - DNA, 1099 bp, Artificial Sequence
  chemically treated genomic DNA (Homo sapiens) CpG-island No: 19032
aaataaccccctcctccaacgaataaatacgaaacgataacgaaaacgcaaaaaacgacgacgctaccccaccttaaaaaacgaattcacccccctaatcgcaccaacctaaacgcacacgaaaaccgaaacgaacctataaaactctacaataaactccgcgcgccccgaaaatactaaaaaaccgaaaccctcgaaacgccgtccccacgccccaaccctaacgaatccgcgaccgaacaacccgaaaaacgtcgctacctccccgccccgcgcgcgaccgaaactaaacgctacgacccgcgccgcctcctcgaacaacaaatatccgccctccgccccgacgacccgcccgacgcgatcctcacccgacacaaaccgtccacgaacacgcgcgaatccaaataacaaacgataataacgctaaacaaatcctacaaatccacctcctccatctcgcaatcaataaaactccaatcgccgccgccctcgtccgcctcgaccgcccccgaaaaaaacgcgaaaaaccgcaacgtcaccccgaaccgcgctcgcgcctcgaccgcctccgccgcctccgccgcgaccccgaactaaaaaccgaccacgccgtcctccatccccgcgcccgcgcgaccctatacgccccaacgaactactccgaacttacgcgccgaaacctcacgcgctccgatccgcgcccgaccgacgactccgccgttaaccccctcgaaatcgcgcgacgacaaacgacgaactatcaacaatctcccaacgacacgacctcccaacgccaaccccgcccgtcaccgttccgcgcgaaaaaaacaaaaacccgacgcgacgaccgcccccccaacccctaaaaccgaccaccgacaaatccaacgataacccctttaaaaccgacgccgattaaattattataccccgcccttccaaaaaacgaaaccaataaaaaaacgaaattctcttcacgtaaccttccttctaccgcccgaaacccgaaacctcaaaacgaccatattaattaaaaacaaaatcctcgtccccaattccgcttttctaacaactaataccaactaaaaaacgccgaaca

SEQ ID NO: 19033 - DNA, 1322 bp, Artificial Sequence
  chemically treated genomic DNA (Homo sapiens) CpG-island No: 19033
ggagtcggcgttttttaaggagtatagagggtttcgtagtacgttttttgtttagcgttatcgatttttaagtagcgttaaggaaggagtttcgattaaggatagggatttgcggttatggtcgaggtcgcggagtcggagggggttgtttcgggtttttaggggtcgtcggaggttttcgcgtttttggttgagagattcggagagttaggagtcgcgggcggggaggtagaagggtcggaggggagcgagggcgtagaggaggcgtcgaggggcgtcgtcgttgtgaaggaggtaggaggcggcgggttagataggggttcggaggtcgaggcgcggggtacgaggggggcgtacggcgagattgaggtcgaggagggagtttcggagggtgtcgaggtgttttaaggaggggaggagataagcggcgcgtagtaggtggagggggcgagttcgggacgcggcgcgtagggcgagtttcgcggggaggtttagagggagttcgaggattttgcggttttcgagaggtaggaggaggcggagtagaggtttgaggtttcggaaggtagcgcgttcggggaggcgggggatagcgtagacgcggagggttcgttgggggataatatagaagcggagggttcggcgggcgatagcgtagaggcggagggtcgggtgggggatagcgtagacgcggaaggttcggcgggggatagcgtagacgcggagggttcgttgggggataatatataagtcgagggttcggcgggggatagcgtagacgcggagggtcgggtgggggatagcgtagacgcggaaggttcggcgggggatagcgtagacgcggagggtcgggtgggggatagcgtagaggcgggggattcggcgggggacggcgtagaagcgggggtttcggcgggggatagcgtagaagtcgaaggttcggcgggggatagtatggacgtcgagggttcggtaggaagggcgcgtcgggtttcgggtgagtcgtagtaatcgggggacggtagtttttcgttttaggtcgaggtaattgaggtcgtagtcggggagagtgcggggcgtagtttcggtgagttcgtttgggacgtagcggaggaggcggaggtttcgggggtaaaggggttcgaagaagcggttttcggggacgtaagggtagacgttggcgaggatagggtaggggatgggttatagtaggagtcgggggaggacgaagagagacgagagcggagttcggaggggttaagggaggaggaagtagcggggggcgaagaggaatttttcgatagtagtttatatggggaggt

SEQ ID NO: 19034 - DNA, 1322 bp, Artificial Sequence
  chemically treated genomic DNA (Homo sapiens) CpG-island No: 19034
acctccccatataaactactatcgaaaaattcctcttcgccccccgctacttcctcctcccttaacccctccgaactccgctctcgtctctcttcgtcctcccccgactcctactataacccatcccctaccctatcctcgccaacgtctacccttacgtccccgaaaaccgcttcttcgaacccctttacccccgaaacctccgcctcctccgctacgtcccaaacgaactcaccgaaactacgccccgcactctccccgactacgacctcaattacctcgacctaaaacgaaaaactaccgtcccccgattactacgactcacccgaaacccgacgcgcccttcctaccgaaccctcgacgtccatactatcccccgccgaaccttcgacttctacgctatcccccgccgaaacccccgcttctacgccgtcccccgccgaatcccccgcctctacgctatcccccacccgaccctccgcgtctacgctatcccccgccgaaccttccgcgtctacgctatcccccacccgaccctccgcgtctacgctatcccccgccgaaccctcgacttatatattatcccccaacgaaccctccgcgtctacgctatcccccgccgaaccttccgcgtctacgctatcccccacccgaccctccgcctctacgctatcgcccgccgaaccctccgcttctatattatcccccaacgaaccctccgcgtctacgctatcccccgcctccccgaacgcgctaccttccgaaacctcaaacctctactccgcctcctcctacctctcgaaaaccgcaaaatcctcgaactccctctaaacctccccgcgaaactcgccctacgcgccgcgtcccgaactcgccccctccacctactacgcgccgcttatctcctcccctccttaaaacacctcgacaccctccgaaactccctcctcgacctcaatctcgccgtacgcccccctcgtaccccgcgcctcgacctccgaacccctatctaacccgccgcctcctacctccttcacaacgacgacgcccctcgacgcctcctctacgccctcgctcccctccgacccttctacctccccgcccgcgactcctaactctccgaatctctcaaccaaaaacgcgaaaacctccgacgacccctaaaaacccgaaacaaccccctccgactccgcgacctcgaccataaccgcaaatccctatccttaatcgaaactccttccttaacgctacttaaaaatcgataacgctaaacaaaaaacgtactacgaaaccctctatactccttaaaaaacgccgactcc

SEQ ID NO: 19035 - DNA, 1322 bp, Artificial Sequence
  chemically treated genomic DNA (Homo sapiens) CpG-island No: 19035
gtttttttatgtgggttgttgtcgggggattttttttcgtttttcgttgttttttttttttttggttttttcgggtttcgttttcgttttttttcgttttttttcggtttttgttgtggtttattttttattttgttttcgttagcgtttgtttttgcgttttcgggggtcgttttttcggatttttttattttcgggattttcgtttttttcgttgcgttttaggcgagtttatcggggttgcgtttcgtatttttttcggttgcgattttaattgtttcggtttggggcgagaggttgtcgtttttcgattgttgcggtttattcgagattcggcgcgttttttttgtcggattttcggcgtttatgttgtttttcgtcgggttttcggtttttacgttgtttttcgtcgggattttcgtttttacgtcgtttttcgtcgggtttttcgtttttacgttgttttttattcggtttttcgcgtttacgttgtttttcgtcggatttttcgcgtttacgttgttttttattcggtttttcgcgtttacgttgtttttcgtcgggttttcggtttgtatgttgttttttagcgggtttttcgcgtttacgttgtttttcgtcggatttttcgcgtttacgttgttttttattcggtttttcgtttttacgttgtcgttcgtcgggtttttcgtttttatgttgttttttagcgggtttttcgcgtttacgttgtttttcgttttttcggacgcgttatttttcgggattttaggtttttgtttcgtttttttttgtttttcgggggtcgtagagttttcgggttttttttgagttttttcgcggggttcgttttgcgcgtcgcgtttcgggttcgttttttttatttgttgcgcgtcgtttgtttttttttttttttggggtatttcggtatttttcggggtttttttttcggttttagtttcgtcgtgcgtttttttcgtgtttcgcgtttcggttttcgggtttttgtttggttcgtcgttttttgttttttttatagcggcggcgtttttcggcgttttttttgcgttttcgttttttttcggtttttttgttttttcgttcgcggtttttggtttttcgggttttttagttagaggcgcggggattttcggcggtttttggggattcggggtaatttttttcggtttcgcggtttcggttatggtcgtagatttttgtttttgatcgggattttttttttgacgttgtttaagggtcggtggcgttgggtaaggggcgtgttacggggttttttgtgttttttgaaggacgtcggtttt

SEQ ID NO: 19036 - DNA, 1322 bp, Artificial Sequence
  chemically treated genomic DNA (Homo sapiens) CpG-island No: 19036
aaaaccgacgtccttcaaaaaacacaaaaaaccccgtaacacgccccttacccaacgccaccgacccttaaacaacgtcaaaaaaaaaatcccgatcaaaaacaaaaatctacgaccataaccgaaaccgcgaaaccgaaaaaaattaccccgaatccccaaaaaccgccgaaaatccccgcgcctctaactaaaaaacccgaaaaaccaaaaaccgcgaacgaaaaaacaaaaaaaccgaaaaaaaacgaaaacgcaaaaaaaacgccgaaaaacgccgccgctataaaaaaaacaaaaaacgacgaaccaaacaaaaacccgaaaaccgaaacgcgaaacacgaaaaaaacgcacgacgaaactaaaaccgaaaaaaaaaccccgaaaaataccgaaataccccaaaaaaaaaaaaaaacaaacgacgcgcaacaaataaaaaaaacgaacccgaaacgcgacgcgcaaaacgaaccccgcgaaaaaactcaaaaaaaacccgaaaactctacgacccccgaaaaacaaaaaaaaacgaaacaaaaacctaaaatcccgaaaaataacgcgtccgaaaaaacgaaaaacaacgtaaacgcgaaaaacccgctaaaaaacaacataaaaacgaaaaacccgacgaacgacaacgtaaaaacgaaaaaccgaataaaaaacaacgtaaacgcgaaaaatccgacgaaaaacaacgtaaacgcgaaaaacccgctaaaaaacaacatacaaaccgaaaacccgacgaaaaacaacgtaaacgcgaaaaaccgaataaaaaacaacgtaaacgcgaaaaatccgacgaaaaacaacgtaaacgcgaaaaaccgaataaaaaacaacgtaaaaacgaaaaacccgacgaaaaacgacgtaaaaacgaaaatcccgacgaaaaacaacgtaaaaaccgaaaacccgacgaaaaacaacataaacgccgaaaatccgacaaaaaaaacgcgccgaatctcgaataaaccgcaacaatcgaaaaacgacaacctctcgccccaaaccgaaacaattaaaatcgcaaccgaaaaaaatacgaaacgcaaccccgataaactcgcctaaaacgcaacgaaaaaaacgaaaatcccgaaaataaaaaaatccgaaaaaacgacccccgaaaacgcaaaaacaaacgctaacgaaaacaaaataaaaaataaaccacaacaaaaaccgaaaaaaaacgaaaaaaaacgaaaacgaaacccgaaaaaaccaaaaaaaaaaaaaacaacgaaaaacgaaaaaaaatcccccgacaacaacccacataaaaaaac

SEQ ID NO: 19037 - DNA, 1243 bp, Artificial Sequence
  chemically treated genomic DNA (Homo sapiens) CpG-island No: 19037
ttcggtcgcggggcgttcgtttcgttcgcgttcgttggttttatgaatgagagtgtttggaaatgaacgtgtttttattgtaagttcggtcggaggaattttatttttttagttcgtttgtataggggcggtcggcggttaattataggttttttcggtattagttagggcgcggttcgtcgtcgtcggtttttggaattggttcgcgcgttttcgtcgtcgcgtcgcgcgttattgtacgtagttcgggcggggagtcggaggttattttcgcgtttcgtatttaagtttgtatgttggttcggggtttcgttcgcgtgcggattttttttcgtagttatacgtaggtttgtgcggtttcgcgagtggttacggttcggagatttggaaaaagaaagtaggtttcgtcggttcgaggaggattcggtcggcgcgtcgtattcggagaggttcggtttcgcgagtcgttgtaggtaggcgtagtggtcgttacgaggttttcgaatcgggttgtagttcgcggacggttttagattttgcgcggtcgtttagggttaggttttcgtttttagggcgggggtgcgatttggtcgcggggttcgggggagttatttcgcgtttttgtatcgttcggttggtagttgcggcgaagcggcgttgattttttgtatgaggtcggacggcgttcgcgcgtgtcgtttgtttttagcgtttttttttgggtcggtttttgtaatgggtgttttttatcgttgcgttcgggtcgcggttcgattttttcgcgcgttttatttgttgcgtgcgttagcggttagcgaagagttttttagttaggaaagattttaagaacgcgcggttggaaggaaagttgaaagtagttacgcggtttgttttcgggttttgtagcgtcggtattcgtagtagtcggatagtttgttcgggtttcgcgtttttttttcggtttttcggaagcggttttcgttttttttttcgttttcgtgcgttcgagcggttttaggtgcggaatttatttcggtttcgcgtgcgggcggtcgtttttttttgcgtcggttttcgcggtgttgcgggtattttcgcggagttcggagggtttcgttttcggttcggcgtgcgttgttaatttcgatttcgttcggcggggtttttttttagcggaggttgttttcgttattatgagtttttttacgttttttttgtcgggttttgtatttttcggggtttt

SEQ ID NO: 19038 - DNA, 1243 bp, Artificial Sequence
  chemically treated genomic DNA (Homo sapiens) CpG-island No: 19038
aaaaccccgaaaaatacaaaacccgacaaaaaaaacgtaaaaaaactcataataacgaaaacaacctccgctaaaaaaaaaccccgccgaacgaaatcgaaattaacaacgcacgccgaaccgaaaacgaaaccctccgaactccgcgaaaatacccgcaacaccgcgaaaaccgacgcaaaaaaaaacgaccgcccgcacgcgaaaccgaaataaattccgcacctaaaaccgctcgaacgcacgaaaacgaaaaaaaaaacgaaaaccgcttccgaaaaaccgaaaaaaaaacgcgaaacccgaacaaactatccgactactacgaataccgacgctacaaaacccgaaaacaaaccgcgtaactactttcaactttccttccaaccgcgcgttcttaaaatctttcctaactaaaaaactcttcgctaaccgctaacgcacgcaacaaataaaacgcgcgaaaaaatcgaaccgcgacccgaacgcaacgataaaaaacacccattacaaaaaccgacccaaaaaaaaacgctaaaaacaaacgacacgcgcgaacgccgtccgacctcatacaaaaaatcaacgccgcttcgccgcaactaccaaccgaacgatacaaaaacgcgaaataactcccccgaaccccgcgaccaaatcgcacccccgccctaaaaacgaaaacctaaccctaaacgaccgcgcaaaatctaaaaccgtccgcgaactacaacccgattcgaaaacctcgtaacgaccactacgcctacctacaacgactcgcgaaaccgaacctctccgaatacgacgcgccgaccgaatcctcctcgaaccgacgaaacctactttctttttccaaatctccgaaccgtaaccactcgcgaaaccgcacaaacctacgtataactacgaaaaaaaatccgcacgcgaacgaaaccccgaaccaacatacaaacttaaatacgaaacgcgaaaataacctccgactccccgcccgaactacgtacaataacgcgcgacgcgacgacgaaaacgcgcgaaccaattccaaaaaccgacgacgacgaaccgcgccctaactaataccgaaaaaacctataattaaccgccgaccgcccctatacaaacgaactaaaaaaataaaattcctccgaccgaacttacaataaaaacacgttcatttccaaacactctcattcataaaaccaacgaacgcgaacgaaacgaacgccccgcgaccgaa

SEQ ID NO: 19039 - DNA, 1243 bp, Artificial Sequence
  chemically treated genomic DNA (Homo sapiens) CpG-island No: 19039
gaggtttcgggaggtgtagggttcggtagggagggcgtggagggatttatggtgacgggagtagttttcgttgggagggagtttcgtcgggcggggtcggagttggtagcgtacgtcggatcgggggcggggtttttcgagtttcgcgaaaatgttcgtagtatcgcggggatcggcgtagggggaagcggtcgttcgtacgcgaagtcggggtgggtttcgtatttggggtcgttcgagcgtacgggggcggggagaggagcgggggtcgttttcggggagtcggaggggagacgcggggttcgggtaggttgttcggttgttgcgggtgtcggcgttataaggttcgggagtaagtcgcgtggttgtttttaattttttttttagtcgcgcgtttttggggttttttttgattaggaaatttttcgttggtcgttgacgtacgtagtaagtgagacgcgcggagggatcgagtcgcggttcgggcgtagcggtaaaaaatatttattatagaaatcgatttaagggaagacgttgagagtaaacggtacgcgcggacgtcgttcggttttatgtaaggaattagcgtcgtttcgtcgtagttgttagtcggacggtgtaggagcgcggagtggttttttcgggtttcgcggttaaatcgtattttcgttttggaagcggaggtttggttttgggcggtcgcgtaggatttggggtcgttcgcgggttgtagttcggttcgggagtttcgtggcggttattgcgtttgtttgtagcggttcgcggggtcgggttttttcgggtgcggcgcgtcggtcgggtttttttcgggtcggcggggtttgttttttttttttaggttttcggatcgtggttattcgcggagtcgtataagtttgcgtgtggttgcggaaaggggttcgtacgcgggcggggtttcgggttagtatgtaggtttggatgcggggcgcgggggtggttttcgatttttcgttcgggttgcgtatagtagcgcgcggcgcggcggcgggggcgcgcgggttaattttaggagtcggcggcggcgagtcgcgttttggttgatatcggaaaggtttgtgattggtcgtcggtcgtttttatgtaaacgagttgagggaatggaattttttcggtcgggtttatagtaaaagtacgtttatttttaggtatttttatttatagagttagcgggcgcgggcgggacgggcgtttcgcggtcgga

SEQ ID NO: 19040 - DNA, 1243 bp, Artificial Sequence
  chemically treated genomic DNA (Homo sapiens) CpG-island No: 19040
tccgaccgcgaaacgcccgtcccgcccgcgcccgctaactctataaataaaaatacctaaaaataaacgtacttttactataaacccgaccgaaaaaattccattccctcaactcgtttacataaaaacgaccgacgaccaatcacaaacctttccgatatcaaccaaaacgcgactcgccgccgccgactcctaaaattaacccgcgcgcccccgccgccgcgccgcgcgctactatacgcaacccgaacgaaaaatcgaaaaccacccccgcgccccgcatccaaacctacatactaacccgaaaccccgcccgcgtacgaacccctttccgcaaccacacgcaaacttatacgactccgcgaataaccacgatccgaaaacctaaaaaaaaaaaacaaaccccgccgacccgaaaaaaacccgaccgacgcgccgcacccgaaaaaacccgaccccgcgaaccgctacaaacaaacgcaataaccgccacgaaactcccgaaccgaactacaacccgcgaacgaccccaaatcctacgcgaccgcccaaaaccaaacctccgcttccaaaacgaaaatacgatttaaccgcgaaacccgaaaaaaccactccgcgctcctacaccgtccgactaacaactacgacgaaacgacgctaattccttacataaaaccgaacgacgtccgcgcgtaccgtttactctcaacgtcttcccttaaatcgatttctataataaatattttttaccgctacgcccgaaccgcgactcgatccctccgcgcgtctcacttactacgtacgtcaacgaccaacgaaaaatttcctaatcaaaaaaaaccccaaaaacgcgcgactaaaaaaaaaattaaaaacaaccacgcgacttactcccgaaccttataacgccgacacccgcaacaaccgaacaacctacccgaaccccgcgtctcccctccgactccccgaaaacgacccccgctcctctccccgcccccgtacgctcgaacgaccccaaatacgaaacccaccccgacttcgcgtacgaacgaccgcttccccctacgccgatccccgcgatactacgaacattttcgcgaaactcgaaaaaccccgcccccgatccgacgtacgctaccaactccgaccccgcccgacgaaactccctcccaacgaaaactactcccgtcaccataaatccctccacgccctccctaccgaaccctacacctcccgaaacctc

SEQ ID NO: 19041 - DNA, 743 bp, Artificial Sequence
  chemically treated genomic DNA (Homo sapiens) CpG-island No: 19041
gttttatcgcgggttgttttgtggttttcgcggagttttttaattaagtttttcggcgcgggggtttttcgtcgattttacggggtttttgacgttcgttttttttttttttagggttagggtgttgtggtcgttgtcgcgtagggattgttttcgggcgttgtcgcgggttcggacgtaggagggggtcggggttgattggcgtggaggtttttttcgggcgggttcggattgcgcggagttgtcgggacgcgtcgcgggttttggcggacgttagggggtagtagtcgttttttttggacgtcgcgcgtagttttcggagttttcggaacgttttcgacggcgcggggttgtgcggttcgtttcgtggttttcgggtcgttcgggaagaattagcgttcgaggataaaagataggaagtcgttttagagtttatttgagttggaacggttaaggcgcgttttcgaggttttaatatagagtcgtagtcggttaggtggggattttcggattaggttttttcgttgtgcggttcggtcggggttttttttcgaagtttttgtttttggggtttgattcgggtcgtttttggttatttgtgttttaggagttcgggttttcggggggttaaggcgggcggttcgcggttttaatttttttcgttttcgttttttttgggtattgttagtattcgagtttagttttgttttaatggatttggggtttcggaaagaaaatttatt

SEQ ID NO: 19042 - DNA, 743 bp, Artificial Sequence
  chemically treated genomic DNA (Homo sapiens) CpG-island No: 19042
aataaattttctttccgaaaccccaaatccattaaaacaaaactaaactcgaatactaacaatacccaaaaaaaacgaaaacgaaaaaaattaaaaccgcgaaccgcccgccttaaccccccgaaaacccgaactcctaaaacacaaataaccaaaaacgacccgaatcaaaccccaaaaacaaaaacttcgaaaaaaaaccccgaccgaaccgcacaacgaaaaaacctaatccgaaaatccccacctaaccgactacgactctatattaaaacctcgaaaacgcgccttaaccgttccaactcaaataaactctaaaacgacttcctatcttttatcctcgaacgctaattcttcccgaacgacccgaaaaccacgaaacgaaccgcacaaccccgcgccgtcgaaaacgttccgaaaactccgaaaactacgcgcgacgtccaaaaaaaacgactactaccccctaacgtccgccaaaacccgcgacgcgtcccgacaactccgcgcaatccgaacccgcccgaaaaaaacctccacgccaatcaaccccgaccccctcctacgtccgaacccgcgacaacgcccgaaaacaatccctacgcgacaacgaccacaacaccctaaccctaaaaaaaaaaaaaacgaacgtcaaaaaccccgtaaaatcgacgaaaaacccccgcgccgaaaaacttaattaaaaaactccgcgaaaaccacaaaacaacccgcgataaaac

SEQ ID NO: 19043 - DNA, 743 bp, Artificial Sequence
  chemically treated genomic DNA (Homo sapiens) CpG-island No: 19043
agtaagtttttttttcgagattttaggtttattaaaataaaattgaattcgggtgttggtagtgtttagggggagcggaggcggagagggttgaggtcgcgggtcgttcgttttagtttttcggaagttcgggtttttgaagtatagatagttaagagcggttcgagttaagttttaggaataggggtttcgggaagagatttcgatcgggtcgtatagcggggaggtttggttcgagagtttttatttggtcggttgcgattttatattggaatttcggaaacgcgttttggtcgttttagtttaagtgggttttggggcggttttttgttttttattttcgaacgttagtttttttcgggcgattcgaaggttacgaggcgggtcgtatagtttcgcgtcgtcgggggcgtttcgggagtttcggggattgcgcgcggcgtttagggagggcggttgttgttttttggcgttcgttagagttcgcggcgcgtttcgatagtttcgcgtagttcgggttcgttcgggaaaggtttttacgttagttaatttcggtttttttttgcgttcgggttcgcggtaacgttcggggatagtttttgcgcggtagcggttatagtattttagttttgggggagggaggagcgggcgttaggggtttcgtgaggtcggcgagggattttcgcgtcggggagtttaattgaggggtttcgcggggattataaagtagttcgcggtggaat

SEQ ID NO: 19044 - DNA, 743 bp, Artificial Sequence
  chemically treated genomic DNA (Homo sapiens) CpG-island No: 19044
attccaccgcgaactactttataatccccgcgaaacccctcaattaaactccccgacgcgaaaatccctcgccgacctcacgaaacccctaacgcccgctcctccctcccccaaaactaaaatactataaccgctaccgcgcaaaaactatccccgaacgttaccgcgaacccgaacgcaaaaaaaaaccgaaattaactaacgtaaaaacctttcccgaacgaacccgaactacgcgaaactatcgaaacgcgccgcgaactctaacgaacgccaaaaaacaacaaccgccctccctaaacgccgcgcgcaatccccgaaactcccgaaacgcccccgacgacgcgaaactatacgacccgcctcgtaaccttcgaatcgcccgaaaaaaactaacgttcgaaaataaaaaacaaaaaaccgccccaaaacccacttaaactaaaacgaccaaaacgcgtttccgaaattccaatataaaatcgcaaccgaccaaataaaaactctcgaaccaaacctccccgctatacgacccgatcgaaatctcttcccgaaacccctattcctaaaacttaactcgaaccgctcttaactatctatacttcaaaaacccgaacttccgaaaaactaaaacgaacgacccgcgacctcaaccctctccgcctccgctccccctaaacactaccaacacccgaattcaattttattttaataaacctaaaatctcgaaaaaaaaacttact

SEQ ID NO: 19045 - DNA, 631 bp, Artificial Sequence
  chemically treated genomic DNA (Homo sapiens) CpG-island No: 19045
ggatttttcgcgagaatatttttttttttcgcgcgcgttgttgtgtgacgttgtagtttttaaatagaaaaagttcgcggtgcgtttatcgtttgtttgaggaagtataattttacgatcgttttaaggttaggcgcgcgggtagaggtgggtcggtttttcgcgtcggcggtggtcgcgggtttggtaggttgaaggtggaggaagttagatggttagtgcggttttttggaggattttttttcgagttagggattgacgcggcgtattttcgtggttacgattggatattttgcgtagaagagggtttttgagagcgttggtcgtgtcgtgtcgttaaatattttttattatcgaatgtgggaaacgttttttttggagtttagtattttttgttcgtttcggatggaatttggttttttgcgtagggtcgttttttggagttcgtttttaaatgattttaagagggaagggaatttagggaggtcgattttaggggcgagggtggaaaatttaggtcgggtagtcgaggagcggcgtgggtattagaagcggttcgtcgttttttattgtgagaggcggaaagcgaagtttcggggtgtgtcggggtattcggaatgtagataagttt

SEQ ID NO: 19046 - DNA, 631 bp, Artificial Sequence
  chemically treated genomic DNA (Homo sapiens) CpG-island No: 19046
aaacttatctacattccgaataccccgacacaccccgaaacttcgctttccgcctctcacaataaaaaacgacgaaccgcttctaatacccacgccgctcctcgactacccgacctaaattttccaccctcgcccctaaaatcgacctccctaaattcccttccctcttaaaatcatttaaaaacgaactccaaaaaacgaccctacgcaaaaaaccaaattccatccgaaacgaacaaaaaatactaaactccaaaaaaaacgtttcccacattcgataataaaaaatatttaacgacacgacacgaccaacgctctcaaaaaccctcttctacgcaaaatatccaatcgtaaccacgaaaatacgccgcgtcaatccctaactcgaaaaaaaatcctccaaaaaaccgcactaaccatctaacttcctccaccttcaacctaccaaacccgcgaccaccgccgacgcgaaaaaccgacccacctctacccgcgcgcctaaccttaaaacgatcgtaaaattatacttcctcaaacaaacgataaacgcaccgcgaactttttctatttaaaaactacaacgtcacacaacaacgcgcgcgaaaaaaaaaaatattctcgcgaaaaatcc

SEQ ID NO: 19047 - DNA, 631 bp, Artificial Sequence
  chemically treated genomic DNA (Homo sapiens) CpG-island No: 19047
aaatttgtttatatttcgagtgtttcggtatatttcggggtttcgtttttcgttttttatagtaggaagcggcgagtcgtttttagtgtttacgtcgtttttcggttgttcggtttgggttttttattttcgtttttggaatcggtttttttagattttttttttttttaaaattatttggaaacgggttttaaggggcgattttgcgtagaaaattaaattttattcggggcgggtagggagtgttagattttaaggaagacgttttttatattcggtggtgaggagtgtttggcggtacggtacggttagcgtttttaaggatttttttttgcgtagaatatttagtcgtagttacgaaaatacgtcgcgttagtttttgattcgaaaggaagttttttagagagtcgtattaattatttagttttttttatttttagtttgttaggttcgcggttatcgtcggcgcgggaggtcggtttatttttgttcgcgcgtttggttttaaagcggtcgtggaattatgtttttttaggtaggcggtggacgtatcgcgggttttttttgtttgaagattatagcgttatatagtaacgcgcgcgagagaagagagtattttcgcgagaagttt

SEQ ID NO: 19048 - DNA, 631 bp, Artificial Sequence
  chemically treated genomic DNA (Homo sapiens) CpG-island No: 19048
aaacttctcgcgaaaatactctcttctctcgcgcgcgttactatataacgctataatcttcaaacaaaaaaaacccgcgatacgtccaccgcctacctaaaaaaacataattccacgaccgctttaaaaccaaacgcgcgaacaaaaataaaccgacctcccgcgccgacgataaccgcgaacctaacaaactaaaaataaaaaaaactaaataattaatacgactctctaaaaaacttcctttcgaatcaaaaactaacgcgacgtattttcgtaactacgactaaatattctacgcaaaaaaaaatccttaaaaacgctaaccgtaccgtaccgccaaacactcctcaccaccgaatataaaaaacgtcttccttaaaatctaacactccctacccgccccgaataaaatttaattttctacgcaaaatcgccccttaaaacccgtttccaaataattttaaaaaaaaaaaaaatctaaaaaaaccgattccaaaaacgaaaataaaaaacccaaaccgaacaaccgaaaaacgacgtaaacactaaaaacgactcgccgcttcctactataaaaaacgaaaaacgaaaccccgaaatataccgaaacactcgaaatataaacaaattt

SEQ ID NO: 19049 - DNA, 710 bp, Artificial Sequence
  chemically treated genomic DNA (Homo sapiens) CpG-island No: 19049
ttaacgtgttcgtgatttcgttggtcgtagtcgatttggtgatgggatttttggtggtgtcgtcggcggttattttggcgttgattggttattggtcgttgggcgttattggttgcgagttgtggatttcggtggacgtgttgtgtgtgatcgttagtatcgaaattttgtgcgttttggtcgtggatcgttatttggttgtgattaattcgttgcgttacggcgtattggttattaagcgttgcgttcggatagttgtggttttggtgtgggtcgtgtcggtcgcggtgtcgtttgcgtttattatgagttagtggtggcgcgtaggggtcgacgtcgaggcgtagcgttgttattttaattcgcgttgttgtgttttcgtttttaatatgttttacgtgttgttgttttttttcgtttttttttattttttttttttcgtgatgtttttcgtttacgcgcgggttttcgtggtggttacgcgttagttgcgtttgttgcgcggggagttgggtcgtttttcgttcgaggagttttcgtcggcgtcgtcgcgttttttggtttcggtttcggtggggacgtgcgtttcgttcgaaggggtgttcgtttgcggtcggcggttcgcgcgttttttgttttttcgggaatatcgggttttgtgtattttgggttttattatgggtatttttattttttgttggttgtttttt

SEQ ID NO: 19050 - DNA, 710 bp, Artificial Sequence
  chemically treated genomic DNA (Homo sapiens) CpG-island No: 19050
aaaaaacaaccaacaaaaaataaaaatacccataataaaacccaaaatacacaaaacccgatattcccgaaaaaacaaaaaacgcgcgaaccgccgaccgcaaacgaacaccccttcgaacgaaacgcacgtccccaccgaaaccgaaaccaaaaaacgcgacgacgccgacgaaaactcctcgaacgaaaaacgacccaactccccgcgcaacaaacgcaactaacgcgtaaccaccacgaaaacccgcgcgtaaacgaaaaacatcacgaaaaaaaaaaaataaaaaaaaacgaaaaaaaacaacaacacgtaaaacatattaaaaacgaaaacacaacaacgcgaattaaaataacaacgctacgcctcgacgtcgacccctacgcgccaccactaactcataataaacgcaaacgacaccgcgaccgacacgacccacaccaaaaccacaactatccgaacgcaacgcttaataaccaatacgccgtaacgcaacgaattaatcacaaccaaataacgatccacgaccaaaacgcacaaaatttcgatactaacgatcacacacaacacgtccaccgaaatccacaactcgcaaccaataacgcccaacgaccaataaccaatcaacgccaaaataaccgccgacgacaccaccaaaaatcccatcaccaaatcgactacgaccaacgaaatcacgaacacgttaa

SEQ ID NO: 19051 - DNA, 710 bp, Artificial Sequence
  chemically treated genomic DNA (Homo sapiens) CpG-island No: 19051
gaagggtaattagtagagagtgaaggtgtttatgatgagatttaaggtgtatagggttcggtgttttcggagaggtaggaggcgcgcgggtcgtcggtcgtaggcgggtattttttcgggcggagcgtacgtttttatcggggtcggggttagagagcgcgacggcgtcggcggagatttttcgggcggaaagcggtttagtttttcgcgtagtaagcgtagttggcgcgtagttattacgaaaattcgcgcgtagacgaagagtattacgagaagaggaaggtagaaggagacggaggaggatagtagtacgtagggtatgttggaggcgaaggtatagtagcgcgggttggagtggtagcgttgcgtttcggcgtcggtttttacgcgttattattggtttatgatgggcgtaaacgatatcgcggtcgatacgatttatattaggattatagttgttcgggcgtagcgtttggtgattagtgcgtcgtaacgtagcgggttggttatagttaggtagcggtttacggttagggcgtatagggtttcgatgttggcggttatatatagtacgtttatcgaggtttatagttcgtagttagtggcgtttaacggttagtggttagttagcgttaaggtggtcgtcggcggtattattaggagttttattattaggtcggttgcggttagcgaagttacgaatacgttgg

SEQ ID NO: 19052 - DNA, 710 bp, Artificial Sequence
  chemically treated genomic DNA (Homo sapiens) CpG-island No: 19052
ccaacgtattcgtaacttcgctaaccgcaaccgacctaataataaaactcctaataataccgccgacgaccaccttaacgctaactaaccactaaccgttaaacgccactaactacgaactataaacctcgataaacgtactatatataaccgccaacatcgaaaccctatacgccctaaccgtaaaccgctacctaactataaccaacccgctacgttacgacgcactaatcaccaaacgctacgcccgaacaactataatcctaatataaatcgtatcgaccgcgatatcgtttacgcccatcataaaccaataataacgcgtaaaaaccgacgccgaaacgcaacgctaccactccaacccgcgctactataccttcgcctccaacataccctacgtactactatcctcctccgtctccttctaccttcctcttctcgtaatactcttcgtctacgcgcgaattttcgtaataactacgcgccaactacgcttactacgcgaaaaactaaaccgctttccgcccgaaaaatctccgccgacgccgtcgcgctctctaaccccgaccccgataaaaacgtacgctccgcccgaaaaaatacccgcctacgaccgacgacccgcgcgcctcctacctctccgaaaacaccgaaccctatacaccttaaatctcatcataaacaccttcactctctactaattacccttc

SEQ ID NO: 19053 - DNA, 514 bp, Artificial Sequence
  chemically treated genomic DNA (Homo sapiens) CpG-island No: 19053
  unsure (351)
cgggcggcgggcggggggaggtgtagatggtaggaggcggcggcggcggcggcggcggcggcgttgtttagggtttcgaggtttcggggggagggcggttagaagtttttcggttttcggtagtcgtgttgggttcgtaggtggttgagtagttttttcgaggtggcgaagcgtttgtcgatcggtttattggttgttatttagttgtagttgtgcgttacggtttcgttttgtagtatgaagtcgtaggtgtagagcgggtggtcggggagcgcggttgggcggcgtggggatcgagagcgcgggcgggtttgtagcgggtgttcggggtataattacggtagttttttnttttaggttgggttcggtagggtcgtgcgcgttgtaggtggagtagttggagtcgtcgaggtgcgaggcgtcgtggtaattttttaagtaataggggtcgcggtataattttgtaggaaggaggggggaggtttcggtgagcgggttggagttggggggtttg

SEQ ID NO: 19054 - DNA, 514 bp, Artificial Sequence
  chemically treated genomic DNA (Homo sapiens) CpG-island No: 19054
  unsure (164)
caaaccccccaactccaacccgctcaccgaaacctcccccctccttcctacaaaattataccgcgacccctattacttaaaaaattaccacgacgcctcgcacctcgacgactccaactactccacctacaacgcgcacgaccctaccgaacccaacctaaaanaaaaaactaccgtaattataccccgaacacccgctacaaacccgcccgcgctctcgatccccacgccgcccaaccgcgctccccgaccacccgctctacacctacgacttcatactacaaaacgaaaccgtaacgcacaactacaactaaataacaaccaataaaccgatcgacaaacgcttcgccacctcgaaaaaactactcaaccacctacgaacccaacacgactaccgaaaaccgaaaaacttctaaccgccctccccccgaaacctcgaaaccctaaacaacgccgccgccgccgccgccgccgccgcctcctaccatctacacctccccccgcccgccgcccg

SEQ ID NO: 19055 - DNA, 514 bp, Artificial Sequence
  chemically treated genomic DNA (Homo sapiens) CpG-island No: 19055
  unsure (164)
taagttttttagttttagttcgtttatcggggtttttttttttttttttgtaggattatgtcgcgatttttattgtttgggaggttattacggcgtttcgtatttcggcggttttagttgttttatttgtagcgcgtacgattttgtcgggtttagtttgaagnggggggttatcgtggttgtatttcgggtattcgttgtaggttcgttcgcgttttcggtttttacgtcgtttagtcgcgtttttcggttattcgttttatatttacggttttatgttgtagaacggaatcgtggcgtatagttgtaattgggtggtagttagtgggtcggtcgataagcgtttcgttatttcggaggagttgtttagttatttacggatttaatacggttgtcgggagtcgagaaatttttggtcgtttttttttcggggtttcggggttttgggtagcgtcgtcgtcgtcgtcgtcgtcgtcgttttttgttatttgtattttttttcgttcgtcgttcg

SEQ ID NO: 19056 - DNA, 514 bp, Artificial Sequence
  chemically treated genomic DNA (Homo sapiens) CpG-island No: 19056
  unsure (351)
cgaacgacgaacgaaaaaaaatacaaataacaaaaaacgacgacgacgacgacgacgacgacgctacccaaaaccccgaaaccccgaaaaaaaaacgaccaaaaatttctcgactcccgacaaccgtattaaatccgtaaataactaaacaactcctccgaaataacgaaacgcttatcgaccgacccactaactaccacccaattacaactatacgccacgattccgttctacaacataaaaccgtaaatataaaacgaataaccgaaaaacgcgactaaacgacgtaaaaaccgaaaacgcgaacgaacctacaacgaatacccgaaatacaaccacgataaccccccncttcaaactaaacccgacaaaatcgtacgcgctacaaataaaacaactaaaaccgccgaaatacgaaacgccgtaataacctcccaaacaataaaaatcgcgacataatcctacaaaaaaaaaaaaaaaaaccccgataaacgaactaaaactaaaaaactta

SEQ ID NO: 19057 - DNA, 755 bp, Artificial Sequence
  chemically treated genomic DNA (Homo sapiens) CpG-island No: 19057
ggcgtaggcgtttacgatggagtcgtggtagttaatgttggagggcggtagcgggaatatcgagtggttcggtttgtagggagatatcggcgttacgtggtcggtttttattagcgtcgagggcggttcggatttgcgttcggaggtttcggattcggcgttattcgtgcgtttcgggttttttatcgtcgtcgcggtttacggttgtcggtttcgggttgggtttgggtttttggttttttttgtttagtttttcgtcgttaatttcgtcgtcgtttttgtagttagagtggtgcggggagtcgtcgcgggagtcgtcgggcgacgacgaggacgaggatgcggagatcggcgttttatgcggggggaaagggcgggtaggcggcgttggggattttgaagttcgttttgtttttcggggacgaggaggacgaggaggaggtggaagatatcgaggaggagtcgttgtttttgcgggagtcgtcgtcgtcggagtttttggagtagggtttgaagttggatttgttttcggtcggtgagttttttagttgttttagggtcgcggttgcggaggcggcgttcggggttgagcggtcggggttttttttcgtttttagttcgttggtcgtcgtcgttatcgagttgagtttggaggagggcggcgggttcggtttgtcgatttgcgataggtttgagttaggtaagcgttaaggggttttttttggcgtttagttgtgggagatagaagtaggggg

SEQ ID NO: 19058 - DNA, 755 bp, Artificial Sequence
  chemically treated genomic DNA (Homo sapiens) CpG-island No: 19058
ccccctacttctatctcccacaactaaacgccaaaaaaaaccccttaacgcttacctaactcaaacctatcgcaaatcgacaaaccgaacccgccgccctcctccaaactcaactcgataacgacgacgaccaacgaactaaaaacgaaaaaaaaccccgaccgctcaaccccgaacgccgcctccgcaaccgcgaccctaaaacaactaaaaaactcaccgaccgaaaacaaatccaacttcaaaccctactccaaaaactccgacgacgacgactcccgcaaaaacaacgactcctcctcgatatcttccacctcctcctcgtcctcctcgtccccgaaaaacaaaacgaacttcaaaatccccaacgccgcctacccgccctttccccccgcataaaacgccgatctccgcatcctcgtcctcgtcgtcgcccgacgactcccgcgacgactccccgcaccactctaactacaaaaacgacgacgaaattaacgacgaaaaactaaacaaaaaaaaccaaaaacccaaacccaacccgaaaccgacaaccgtaaaccgcgacgacgataaaaaacccgaaacgcacgaataacgccgaatccgaaacctccgaacgcaaatccgaaccgccctcgacgctaataaaaaccgaccacgtaacgccgatatctccctacaaaccgaaccactcgatattcccgctaccgccctccaacattaactaccacgactccatcgtaaacgcctacgcc

SEQ ID NO: 19059 - DNA, 755 bp, Artificial Sequence
  chemically treated genomic DNA (Homo sapiens) CpG-island No: 19059
ttttttgtttttgttttttatagttggacgttaagaagagttttttggcgtttgtttggtttagatttgtcgtagatcggtaagtcggattcgtcgtttttttttaaatttaattcggtggcggcggcggttaacgggttgggagcggagaaggatttcggtcgtttagtttcgggcgtcgttttcgtagtcgcggttttgaagtagttgggggatttatcggtcgaggataagtttagttttaagttttattttaagggtttcggcggcggcgattttcgtaaagatagcggttttttttcggtgttttttatttttttttcgtttttttcgttttcgggagataaggcgggttttagggtttttagcgtcgtttgttcgtttttttttttcgtatggagcgtcggttttcgtattttcgttttcgtcgtcgttcggcggttttcgcggcggtttttcgtattattttgattgtaagaacggcggcggggttggcggcggggaattggataagaaagattaggagtttaagtttagttcggagtcggtagtcgtgagtcgcggcggcggtggggagttcggggcgtacgggtggcgtcgagttcggggttttcgggcgtaagttcgagtcgttttcggcgttggtgggggtcggttacgtggcgtcggtgtttttttataagtcgggttattcggtgttttcgttgtcgttttttagtattggttattacggttttatcgtgggcgtttacgtt

SEQ ID NO: 19060 - DNA, 755 bp, Artificial Sequence
  chemically treated genomic DNA (Homo sapiens) CpG-island No: 19060
aacgtaaacgcccacgataaaaccgtaataaccaatactaaaaaacgacaacgaaaacaccgaataacccgacttataaaaaaacaccgacgccacgtaaccgacccccaccaacgccgaaaacgactcgaacttacgcccgaaaaccccgaactcgacgccacccgtacgccccgaactccccaccgccgccgcgactcacgactaccgactccgaactaaacttaaactcctaatctttcttatccaattccccgccgccaaccccgccgccgttcttacaatcaaaataatacgaaaaaccgccgcgaaaaccgccgaacgacgacgaaaacgaaaatacgaaaaccgacgctccatacgaaaaaaaaaaacgaacaaacgacgctaaaaaccctaaaacccgccttatctcccgaaaacgaaaaaaacgaaaaaaaaataaaaaacaccgaaaaaaaaccgctatctttacgaaaatcgccgccgccgaaacccttaaaataaaacttaaaactaaacttatcctcgaccgataaatcccccaactacttcaaaaccgcgactacgaaaacgacgcccgaaactaaacgaccgaaatccttctccgctcccaacccgttaaccgccgccgccaccgaattaaatttaaaaaaaaacgacgaatccgacttaccgatctacgacaaatctaaaccaaacaaacgccaaaaaactcttcttaacgtccaactataaaaaacaaaaacaaaaaa

SEQ ID NO: 19061 - DNA, 691 bp, Artificial Sequence
  chemically treated genomic DNA (Homo sapiens) CpG-island No: 19061
tcgggagtcggttcgtttggcgtagggggttcgtcggtggtaagagggatatcgttgtcggtatcgtcggttttttttcgtcgtcgtcgttgtcgttgtcgttgttttcgggtgtttttgggttagatttagcgggcgaatcgtttatttggaggaggtagcgtcgttgggggggcggggagggcgggggagtatcggggagcgagtttcgttgcggtgggttcgtttcgtagcgtcgatcgcgtgtgatacgggtagttgcgttttttcgtcgtttttttttttttatcgacgttttcgtcgtcgtcgttatcgtcgttggtttcggttagtaatataaaaattttcgtttttttcgagtcgtacgttaaatagtcgcgatcggtagttatattttaaagggatcgtcgcgttcgtttaatcgtagttttcgtcgggatttcggggcggggagagcggcgggttgaggtcggttttatcggtgggcggggagagttttaaaggggtcgcgtcgcgcgtcgtcgttgtttcggtttcggtcgttttcgggatttttttttttttttcgattgggtttttttcgttttggggtttttcgtttgggacgggattttttcgggattttgagttttgcgtttcgttttttttttcggtcgtttttttttttttttttttttttattattgggtgg

SEQ ID NO: 19062 - DNA, 691 bp, Artificial Sequence
  chemically treated genomic DNA (Homo sapiens) CpG-island No: 19062
ccacccaataataaaaaaaaaaaaaaaaaaaaaaacgaccgaaaaaaaaaacgaaacgcaaaactcaaaatcccgaaaaaatcccgtcccaaacgaaaaaccccaaaacgaaaaaaacccaatcgaaaaaaaaaaaaaaatcccgaaaacgaccgaaaccgaaacaacgacgacgcgcgacgcgacccctttaaaactctccccgcccaccgataaaaccgacctcaacccgccgctctccccgccccgaaatcccgacgaaaactacgattaaacgaacgcgacgatccctttaaaatataactaccgatcgcgactatttaacgtacgactcgaaaaaaacgaaaatttttatattactaaccgaaaccaacgacgataacgacgacgacgaaaacgtcgataaaaaaaaaaaaacgacgaaaaaacgcaactacccgtatcacacgcgatcgacgctacgaaacgaacccaccgcaacgaaactcgctccccgatactcccccgccctccccgcccccccaacgacgctacctcctccaaataaacgattcgcccgctaaatctaacccaaaaacacccgaaaacaacgacaacgacaacgacgacgacgaaaaaaaaccgacgataccgacaacgatatccctcttaccaccgacgaaccccctacgccaaacgaaccgactcccga

SEQ ID NO: 19063 - DNA, 691 bp, Artificial Sequence
  chemically treated genomic DNA (Homo sapiens) CpG-island No: 19063
ttatttagtggtgagaagggagagaggagagagagcggtcggaaaggaggacggggcgtagagtttagggtttcggagaagtttcgttttaggcgggggattttagggcgaggaaggtttagtcggggggaggggaggaatttcgggagcggtcgagatcgaggtagcggcggcgcgcggcgcggtttttttaaggtttttttcgtttatcgatggagtcggttttagttcgtcgtttttttcgtttcggggtttcggcgagagttgcgattgggcgggcgcggcgatttttttgaagtgtggttgtcgatcgcggttatttgacgtgcggttcgaggaaggcgaaggtttttgtgttgttagtcggggttagcggcggtggcggcggcggcggaggcgtcggtggaggaggggaggcggcgaggaggcgtagttgttcgtgttatacgcgatcgacgttgcggagcgagtttatcgtaacggagttcgtttttcggtgttttttcgtttttttcgtttttttagcggcgttgttttttttaaatgagcgattcgttcgttggatttaatttaaggatattcgaaagtagcggtagcggtagcggcggcggcgggaagaggtcggcggtgtcggtagcggtgttttttttgttatcggcggattttttgcgttaggcgaatcggttttcga

SEQ ID NO: 19064 - DNA, 691 bp, Artificial Sequence
  chemically treated genomic DNA (Homo sapiens) CpG-island No: 19064
tcgaaaaccgattcgcctaacgcaaaaaatccgccgataacaaaaaaaacaccgctaccgacaccgccgacctcttcccgccgccgccgctaccgctaccgctactttcgaatatccttaaattaaatccaacgaacgaatcgctcatttaaaaaaaacaacgccgctaaaaaaacgaaaaaaacgaaaaaacaccgaaaaacgaactccgttacgataaactcgctccgcaacgtcgatcgcgtataacacgaacaactacgcctcctcgccgcctcccctcctccaccgacgcctccgccgccgccgccaccgccgctaaccccgactaacaacacaaaaaccttcgccttcctcgaaccgcacgtcaaataaccgcgatcgacaaccacacttcaaaaaaatcgccgcgcccgcccaatcgcaactctcgccgaaaccccgaaacgaaaaaaacgacgaactaaaaccgactccatcgataaacgaaaaaaaccttaaaaaaaccgcgccgcgcgccgccgctacctcgatctcgaccgctcccgaaattcctcccctccccccgactaaaccttcctcgccctaaaatcccccgcctaaaacgaaacttctccgaaaccctaaactctacgccccgtcctcctttccgaccgctctctctcctctctcccttctcaccactaaataa

SEQ ID NO: 19065 - DNA, 1092 bp, Artificial Sequence
  chemically treated genomic DNA (Homo sapiens) CpG-island No: 19065
ttttacgcgattttacgcgcgatagttatcgggttgagtagacgcgaggttgggtatgcggtgggaggcggcggaggataatacggggttttagtcgcgagggcggtgttgatgtgttatagttcgggcgggtcgcgggcgaggggtcgggttggcgttcgagggtagggaggggggtggggtagggatttcgcggtttttagttttcgttcgtttcgggtaaagtacggcgcgcgcgggtaaataatagtttcggtagtgtagggggttcggtcgtcgacgggacgtttttttcggcgtcgcggttatttttaggatttcggtcgtcggcgtttttcgcgggtttcgttacgtgtttttcgcgtttcgtttagtttagaaagagtcgttttcggttcgttcgcgtttttattggatttgttcgtcggtttttttttataggttcgcggttttgatcgcgttaattttttcggagaagggtcggcgggacggtcgagttatttattagagttgaggcgcggcgcggttcgattgattgaagcgagagcgttcggcgggcggcgagggtagcggttaggtgatttatttttttcgcgcggttagtcgtttttttttttttgcgtcgttttgttgtcgttatttcgcggcgttaaaatttcgttcgttcgttgaaggtttcgttttcggcgtcgaagtttcgttttgtcgttttcgaagtttttgttagcgaacgagcgcgcgtaatagcgcggggtaggggtcgtcgcggtcggaagtttacgcggggggttgtagggacgggtcgtaaggggcggggcgggtttcgaggaggcggcggtggggttttcggattttcgcgcgtggtatagttcgtattttgaattgatttttattcgaggattatttttttttttttttttgagggcggaacggaaaggttaagcgttttttcgtttcgggagttgtaggacgttttaatttagtcgagtcgtcgcgtgttcgggtgttcgcgaatagtaggagagaggacgggcgttggttttataggggtcgttttattttttgaagagtttttcgttgtttgttttgggg

SEQ ID NO: 19066 - DNA, 1092 bp, Artificial Sequence
  chemically treated genomic DNA (Homo sapiens) CpG-island No: 19066
ccccaaaacaaacaacgaaaaactcttcaaaaaataaaacgacccctataaaaccaacgcccgtcctctctcctactattcgcgaacacccgaacacgcgacgactcgactaaattaaaacgtcctacaactcccgaaacgaaaaaacgcttaacctttccgttccgccctcaaaaaaaaaaaaaaaaataatcctcgaataaaaatcaattcaaaatacgaactataccacgcgcgaaaatccgaaaaccccaccgccgcctcctcgaaacccgccccgccccttacgacccgtccctacaaccccccgcgtaaacttccgaccgcgacgacccctaccccgcgctattacgcgcgctcgttcgctaacaaaaacttcgaaaacgacaaaacgaaacttcgacgccgaaaacgaaaccttcaacgaacgaacgaaattttaacgccgcgaaataacgacaacaaaacgacgcaaaaaaaaaaaaacgactaaccgcgcgaaaaaaataaatcacctaaccgctaccctcgccgcccgccgaacgctctcgcttcaatcaatcgaaccgcgccgcgcctcaactctaataaataactcgaccgtcccgccgacccttctccgaaaaaattaacgcgatcaaaaccgcgaacctataaaaaaaaaccgacgaacaaatccaataaaaacgcgaacgaaccgaaaacgactctttctaaactaaacgaaacgcgaaaaacacgtaacgaaacccgcgaaaaacgccgacgaccgaaatcctaaaaataaccgcgacgccgaaaaaaacgtcccgtcgacgaccgaaccccctacactaccgaaactattatttacccgcgcgcgccgtactttacccgaaacgaacgaaaactaaaaaccgcgaaatccctaccccacccccctccctaccctcgaacgccaacccgacccctcgcccgcgacccgcccgaactataacacatcaacaccgccctcgcgactaaaaccccgtattatcctccgccgcctcccaccgcatacccaacctcgcgtctactcaacccgataactatcgcgcgtaaaatcgcgtaaaa

SEQ ID NO: 19067 - DNA, 1092 bp, Artificial Sequence
  chemically treated genomic DNA (Homo sapiens) CpG-island No: 19067
ttttagggtaggtagcgaggagttttttaaggggtaaagcgatttttgtggggttagcgttcgtttttttttttgttgttcgcgggtattcgggtacgcggcgattcggttgaattagggcgttttgtagttttcgaggcgaggaggcgtttggttttttcgtttcgtttttagaagggagaggagaggtggttttcgagtgggagttagtttaggatgcgggttgtgttacgcgcggaggttcggggattttatcgtcgttttttcgaggttcgtttcgttttttacgattcgtttttgtaatttttcgcgtgggttttcggtcgcggcgatttttgtttcgcgttattgcgcgcgttcgttcgttgatagaggtttcgagggcggtagggcggggtttcggcgtcgggggcggggtttttagcgggcgggcggggttttggcgtcgcgaggtggcggtagtagagcggcgtagaagggagggggcggttggtcgcgcggaaggagtgagttatttgatcgttgttttcgtcgttcgtcgggcgttttcgttttagttagtcgggtcgcgtcgcgttttagttttggtgagtggttcggtcgtttcgtcggttttttttcgggagggttggcgcggttagggtcgcgggtttgtgaggggaggtcggcggataggtttagtgaaggcgcgggcgggtcgggggcggttttttttgggttgggcggggcgcggggggtacgtagcggggttcgcggggggcgtcggcggtcgggattttggaagtggtcgcgacgtcggaaggggcgtttcgtcggcggtcgaattttttgtattgtcggagttgttgtttattcgcgcgcgtcgtattttattcggggcgggcgggggttgggggtcgcggggtttttgttttatttttttttttgttttcgggcgttagttcggtttttcgttcgcggttcgttcgggttgtgatatattagtatcgttttcgcggttggggtttcgtattgtttttcgtcgttttttatcgtatgtttagtttcgcgtttatttagttcggtggttgtcgcgcgtggaatcgcgtaaga

SEQ ID NO: 19068 - DNA, 1092 bp, Artificial Sequence
  chemically treated genomic DNA (Homo sapiens) CpG-island No: 19068
tcttacgcgattccacgcgcgacaaccaccgaactaaataaacgcgaaactaaacatacgataaaaaacgacgaaaaacaatacgaaaccccaaccgcgaaaacgatactaatatatcacaacccgaacgaaccgcgaacgaaaaaccgaactaacgcccgaaaacaaaaaaaaaaataaaacaaaaaccccgcgacccccaacccccgcccgccccgaataaaatacgacgcgcgcgaataaacaacaactccgacaatacaaaaaattcgaccgccgacgaaacgccccttccgacgtcgcgaccacttccaaaatcccgaccgccgacgccccccgcgaaccccgctacgtaccccccgcgccccgcccaacccaaaaaaaaccgcccccgacccgcccgcgccttcactaaacctatccgccgacctcccctcacaaacccgcgaccctaaccgcgccaaccctcccgaaaaaaaaccgacgaaacgaccgaaccactcaccaaaactaaaacgcgacgcgacccgactaactaaaacgaaaacgcccgacgaacgacgaaaacaacgatcaaataactcactccttccgcgcgaccaaccgccccctcccttctacgccgctctactaccgccacctcgcgacgccaaaaccccgcccgcccgctaaaaaccccgcccccgacgccgaaaccccgccctaccgccctcgaaacctctatcaacgaacgaacgcgcgcaataacgcgaaacaaaaatcgccgcgaccgaaaacccacgcgaaaaattacaaaaacgaatcgtaaaaaacgaaacgaacctcgaaaaaacgacgataaaatccccgaacctccgcgcgtaacacaacccgcatcctaaactaactcccactcgaaaaccacctctcctctcccttctaaaaacgaaacgaaaaaaccaaacgcctcctcgcctcgaaaactacaaaacgccctaattcaaccgaatcgccgcgtacccgaatacccgcgaacaacaaaaaaaaaaacgaacgctaaccccacaaaaatcgctttaccccttaaaaaactcctcgctacctaccctaaaa

SEQ ID NO: 19069 - DNA, 1205 bp, Artificial Sequence
  chemically treated genomic DNA (Homo sapiens) CpG-island No: 19069
ggcgtagtcggaggcggttcgatttgggcggttcgggagcgcgcgttttcgaggtcgcgtaggttttttttgtttggcgtttaggtggttttttcgtttatttcgtcgttttttttttcgggtttttttttttttagcgagggtcgagtttgattgtggcgcgcggggaaggaggggttattagggatttgaaagtgtacgggttgcggagtggagttcgtatttgttttcgtcgttcgcgagcggattaaatttttgtaaatttaaattgaatggggtttttttttgttgttttttagagggcgtcggtagttcgtcgcgcgttttttttcggcgggagcggtcgtttagcgtacggttaggagcgatcgcgggagttcgatttaagttcgtgcgggttagacggcggcggcgaggcggaggttgcggaggtattcgggttttcggatttaggtattcggatttcgggatttaggcgtcgtcggatcgcgttttatttcgcgcgttcgagtagggcgattgttattagttttttggacgggattcggggcgggattttggtgttttgaaaggggttcgggcgattttaagaggaagaatttttgggggcggggttttcggtttcgcgttttttgggtagtcgttattgtttacgcgtttcgttgggcggcgcggggggcgtgatcgcggcggtttcgggttttgggtgcggagatttaggcggggttgggtttagggcggcggcgggagaagtcggggaagtcgaagagtttggggaggaggagttgcgagcgcgggagacgagtaggagtcgcgcgggtcgcggcgagcgcgatgtcggcggcggcgggggacgggtttttgggggagtcggcggcgtttgggggcggcggcggcgcggaggacgcggttaggttcgcggcggtttgcgagggaagttttttgtttgtttgggtgagcggcgtgtttcgcgagcggtttcgcgatttttagtattataagcgcgtgggtaattattttatcggtagtaggaagttgggcgagggtttttttgttaaggtgcgcgaggggttgtacgtgttgatcggggagaaggtgagtttttcgggcgtcgtggggttggggtataggggcgggagtcggcggttaggatttcgcggggagtattgtattgggagttttagtgtgtagtttcgggttaagcg

SEQ ID NO: 19070 - DNA, 1205 bp, Artificial Sequence
  chemically treated genomic DNA (Homo sapiens) CpG-island No: 19070
cgcttaacccgaaactacacactaaaactcccaatacaatactccccgcgaaatcctaaccgccgactcccgcccctataccccaaccccacgacgcccgaaaaactcaccttctccccgatcaacacgtacaacccctcgcgcaccttaacaaaaaaaccctcgcccaacttcctactaccgataaaataattacccacgcgcttataatactaaaaatcgcgaaaccgctcgcgaaacacgccgctcacccaaacaaacaaaaaacttccctcgcaaaccgccgcgaacctaaccgcgtcctccgcgccgccgccgcccccaaacgccgccgactcccccaaaaacccgtcccccgccgccgccgacatcgcgctcgccgcgacccgcgcgactcctactcgtctcccgcgctcgcaactcctcctccccaaactcttcgacttccccgacttctcccgccgccgccctaaacccaaccccgcctaaatctccgcacccaaaacccgaaaccgccgcgatcacgccccccgcgccgcccaacgaaacgcgtaaacaataacgactacccaaaaaacgcgaaaccgaaaaccccgcccccaaaaattcttcctcttaaaatcgcccgaacccctttcaaaacaccaaaatcccgccccgaatcccgtccaaaaaactaataacaatcgccctactcgaacgcgcgaaataaaacgcgatccgacgacgcctaaatcccgaaatccgaatacctaaatccgaaaacccgaatacctccgcaacctccgcctcgccgccgccgtctaacccgcacgaacttaaatcgaactcccgcgatcgctcctaaccgtacgctaaacgaccgctcccgccgaaaaaaaacgcgcgacgaactaccgacgccctctaaaaaacaacaaaaaaaaaccccattcaatttaaatttacaaaaatttaatccgctcgcgaacgacgaaaacaaatacgaactccactccgcaacccgtacactttcaaatccctaataacccctccttccccgcgcgccacaatcaaactcgaccctcgctaaaaaaaaaaaaacccgaaaaaaaaaacgacgaaataaacgaaaaaaccacctaaacgccaaacaaaaaaaacctacgcgacctcgaaaacgcgcgctcccgaaccgcccaaatcgaaccgcctccgactacgcc

SEQ ID NO: 19071 - DNA, 1205 bp, Artificial Sequence
  chemically treated genomic DNA (Homo sapiens) CpG-island No: 19071
cgtttggttcgggattgtatattgggatttttagtgtagtgtttttcgcggggttttggtcgtcgattttcgtttttgtgttttagttttacggcgttcgggagatttatttttttttcggttagtacgtgtagtttttcgcgtattttggtaaaggagttttcgtttagttttttgttgtcgatgaggtagttgtttacgcgtttgtggtgttggaagtcgcggagtcgttcgcggggtacgtcgtttatttaggtaggtaggaaatttttttcgtaggtcgtcgcgggtttggtcgcgtttttcgcgtcgtcgtcgtttttaggcgtcgtcggtttttttaggagttcgtttttcgtcgtcgtcggtatcgcgttcgtcgcggttcgcgcggtttttgttcgtttttcgcgttcgtagttttttttttttaggtttttcggttttttcggtttttttcgtcgtcgttttgggtttagtttcgtttgggttttcgtatttagagttcggggtcgtcgcgattacgtttttcgcgtcgtttagcgaggcgcgtagataatagcggttgtttaggggacgcgggatcggggatttcgtttttaaaagtttttttttttagggtcgttcgggttttttttaggatattaggatttcgtttcgggtttcgtttaggaagttaatgatagtcgttttgttcgggcgcgcggggtggggcgcggttcggcggcgtttgggtttcggggttcgggtgtttgggttcgggagttcgggtgttttcgtagttttcgtttcgtcgtcgtcgtttggttcgtacgggtttgggtcgggttttcgcgatcgtttttagtcgtgcgttgggcggtcgttttcgtcggagagaagcgcgcggcgggttgtcggcgttttttggaaggtagtagaagaaagttttatttagtttgaatttgtagaaatttaattcgttcgcgggcggcgggaatagatgcgagttttatttcgtagttcgtgtatttttaaatttttagtagttttttttttttcgcgcgttatagttaaattcgattttcgttggagaggggagggttcggggaggggagcggcggagtggacggagaagttatttgagcgttagatagggagaatttgcgcggtttcggaggcgcgcgttttcgggtcgtttaggtcgggtcgttttcggttgcgtt

SEQ ID NO: 19072 - DNA, 1205 bp, Artificial Sequence
  chemically treated genomic DNA (Homo sapiens) CpG-island No: 19072
aacgcaaccgaaaacgacccgacctaaacgacccgaaaacgcgcgcctccgaaaccgcgcaaattctccctatctaacgctcaaataacttctccgtccactccgccgctcccctccccgaaccctcccctctccaacgaaaatcgaatttaactataacgcgcgaaaaaaaaaaaactactaaaaatttaaaaatacacgaactacgaaataaaactcgcatctattcccgccgcccgcgaacgaattaaatttctacaaattcaaactaaataaaactttcttctactaccttccaaaaaacgccgacaacccgccgcgcgcttctctccgacgaaaacgaccgcccaacgcacgactaaaaacgatcgcgaaaacccgacccaaacccgtacgaaccaaacgacgacgacgaaacgaaaactacgaaaacacccgaactcccgaacccaaacacccgaaccccgaaacccaaacgccgccgaaccgcgccccaccccgcgcgcccgaacaaaacgactatcattaacttcctaaacgaaacccgaaacgaaatcctaatatcctaaaaaaaacccgaacgaccctaaaaaaaaaaacttttaaaaacgaaatccccgatcccgcgtcccctaaacaaccgctattatctacgcgcctcgctaaacgacgcgaaaaacgtaatcgcgacgaccccgaactctaaatacgaaaacccaaacgaaactaaacccaaaacgacgacgaaaaaaaccgaaaaaaccgaaaaacctaaaaaaaaaaaactacgaacgcgaaaaacgaacaaaaaccgcgcgaaccgcgacgaacgcgataccgacgacgacgaaaaacgaactcctaaaaaaaccgacgacgcctaaaaacgacgacgacgcgaaaaacgcgaccaaacccgcgacgacctacgaaaaaaatttcctacctacctaaataaacgacgtaccccgcgaacgactccgcgacttccaacaccacaaacgcgtaaacaactacctcatcgacaacaaaaaactaaacgaaaactcctttaccaaaatacgcgaaaaactacacgtactaaccgaaaaaaaaataaatctcccgaacgccgtaaaactaaaacacaaaaacgaaaatcgacgaccaaaaccccgcgaaaaacactacactaaaaatcccaatatacaatcccgaaccaaacg

SEQ ID NO: 19073 - DNA, 524 bp, Artificial Sequence
  chemically treated genomic DNA (Homo sapiens) CpG-island No: 19073
ttagcggtcgtcggtagtcggagtataggaatattagcggtttttttttcgtagtcgtcgtttttttttttagttgcgttttttttatgtcggttatcgacgcgttttcgtttatggagttttatatgttcgtttatttttgtaatagttggtggcggttcgagttttcggagagttttttgtttaatagcgaggagtcgttgtatttgtttttgtcgtcgtatttatagtcgttagcgtattttttgttatattttagtgatcgaacgtttgttattatttataaatcgttcgcgttttagagcgttatgggaaaaaaaatcgtcgttgtttatgcgcggggcggggagcggtggcggaggtcgagaaggggtaaaagtttgaagggggcgggacggcgggcggtttttagtgcgtatgcgcgtcgtgcggttttggttaagcgtgatagttattgcgtttgcgttaggttttttagtttgaagaaattgatgatgtagatttgtttgtttgtttttttaagg

SEQ ID NO: 19074 - DNA, 524 bp, Artificial Sequence
  chemically treated genomic DNA (Homo sapiens) CpG-island No: 19074
ccttaaaaaaacaaacaaacaaatctacatcatcaatttcttcaaactaaaaaacctaacgcaaacgcaataactatcacgcttaaccaaaaccgcacgacgcgcatacgcactaaaaaccgcccgccgtcccgcccccttcaaacttttaccccttctcgacctccgccaccgctccccgccccgcgcataaacaacgacgattttttttcccataacgctctaaaacgcgaacgatttataaataataacaaacgttcgatcactaaaatataacaaaaaatacgctaacgactataaatacgacgacaaaaacaaatacaacgactcctcgctattaaacaaaaaactctccgaaaactcgaaccgccaccaactattacaaaaataaacgaacatataaaactccataaacgaaaacgcgtcgataaccgacataaaaaaaacgcaactaaaaaaaaaaacgacgactacgaaaaaaaaaccgctaatattcctatactccgactaccgacgaccgctaa

SEQ ID NO: 19075 - DNA, 524 bp, Artificial Sequence
  chemically treated genomic DNA (Homo sapiens) CpG-island No: 19075
ttttaggaagataagtaaataggtttgtattattaatttttttaggttggaaaatttgacgtaggcgtagtgattattacgtttggttaaggtcgtacggcgcgtatgcgtattagaggtcgttcgtcgtttcgttttttttaggtttttgttttttttcggttttcgttatcgtttttcgtttcgcgtatgagtagcggcggtttttttttttatggcgttttggggcgcgggcgatttgtaggtaatggtaggcgttcggttattgaggtgtagtagaggatgcgttggcggttgtgagtgcggcgataagggtaaatgtagcgatttttcgttgttgggtaagagatttttcgaagattcgagtcgttattagttgttgtagaagtgggcgagtatgtggagttttatgagcgaagacgcgtcggtggtcgatatggagagggcgtagttggaggaggaggcggcggttgcggaggagaggtcgttggtgtttttgtgtttcggttgtcggcggtcgttgg

SEQ ID NO: 19076 - DNA, 524 bp, Artificial Sequence
  chemically treated genomic DNA (Homo sapiens) CpG-island No: 19076
ccaacgaccgccgacaaccgaaacacaaaaacaccaacgacctctcctccgcaaccgccgcctcctcctccaactacgccctctccatatcgaccaccgacgcgtcttcgctcataaaactccacatactcgcccacttctacaacaactaataacgactcgaatcttcgaaaaatctcttacccaacaacgaaaaatcgctacatttacccttatcgccgcactcacaaccgccaacgcatcctctactacacctcaataaccgaacgcctaccattacctacaaatcgcccgcgccccaaaacgccataaaaaaaaaaaccgccgctactcatacgcgaaacgaaaaacgataacgaaaaccgaaaaaaaacaaaaacctaaaaaaaacgaaacgacgaacgacctctaatacgcatacgcgccgtacgaccttaaccaaacgtaataatcactacgcctacgtcaaattttccaacctaaaaaaattaataatacaaacctatttacttatcttcctaaaa

SEQ ID NO: 19077 - DNA, 557 bp, Artificial Sequence
  chemically treated genomic DNA (Homo sapiens) CpG-island No: 19077
gcgttacgtattttatgtcggatgtattacgcgttttgcgtcggatgcgttatgcgttttatgttagatgttttatacgttttatgttaggggcgttatgcgttttatgtcggatgtgttacgtattttatgttacgttatgcgtcgtatgttagatgcgttacgtgttttatgttagatgttttatacgttatgttaggggcgttatacgttttatgtcggatatgttacgcgtcgtatgttagatgcgttatacgttttatgtcgggggcgttatacgttttatgtcggatgtgttacgcgttttatgttaggggcgttatgcgttttatgtcggggcgttattcgttttatgttagtgtgtcgtgcgttttatgttaggggcgttatgttttttatgtcggatgtgttatgtattttatgttaggggcgttatgtgttttatgtcggatatgttatgcgttttatgttaggggcgttatgcgttttatgtcgggtgttatgtattttatgtcggggcgttatgtgtttatgtgttatgatatatcgtgtatgtt

SEQ ID NO: 19078 - DNA, 557 bp, Artificial Sequence
  chemically treated genomic DNA (Homo sapiens) CpG-island No: 19078
aacatacacgatatatcataacacataaacacataacgccccgacataaaatacataacacccgacataaaacgcataacgcccctaacataaaacgcataacatatccgacataaaacacataacgcccctaacataaaatacataacacatccgacataaaaaacataacgcccctaacataaaacgcacgacacactaacataaaacgaataacgccccgacataaaacgcataacgcccctaacataaaacgcgtaacacatccgacataaaacgtataacgcccccgacataaaacgtataacgcatctaacatacgacgcgtaacatatccgacataaaacgtataacgcccctaacataacgtataaaacatctaacataaaacacgtaacgcatctaacatacgacgcataacgtaacataaaatacgtaacacatccgacataaaacgcataacgcccctaacataaaacgtataaaacatctaacataaaacgcataacgcatccgacgcaaaacgcgtaatacatccgacataaaatacgtaacgc

SEQ ID NO: 19079 - DNA, 557 bp, Artificial Sequence
  chemically treated genomic DNA (Homo sapiens) CpG-island No: 19079
gatatatacgatatattatgatatatagatatatgacgtttcgatataggatgtatgatattcgatataggacgtatgacgtttttgatatagggcgtatgatatattcgatataggatatatgacgtttttgatataggatgtatgatatattcgatataggaggtatgacgtttttgatataggacgtacgatatattgatataggacgaatgacgtttcgatataggacgtatgacgtttttgatataggacgcgtgatatattcgatataggacgtgtgacgttttcggtataggacgtgtgacgtatttgatatacgacgcgtgatatattcgatataggacgtgtgacgtttttgatatgacgtgtgaaatatttgatataggatacgtgacgtatttgatatgcgacgtatgacgtgatataggatgcgtgatatattcgatataggacgtatggcgtttttgatataagacgtgtgaaatatttgatataggacgtatgacgtattcgacgtaggacgcgtgatgtattcgatataggatgcgtgacgt

SEQ ID NO: 19080 - DNA, 557 bp, Artificial Sequence
  chemically treated genomic DNA (Homo sapiens) CpG-island No: 19080
acgtcacgcatcctatatcgaatacatcacgcgtcctacgtcgaatacgtcatacgtcctatatcaaatatttcacacgtcttatatcaaaaacgccatacgtcctatatcgaatatatcacgcatcctatatcacgtcatacgtcgcatatcaaatacgtcacgtatcctatatcaaatatttcacacgtcatatcaaaaacgtcacacgtcctatatcgaatatatcacgcgtcgtatatcaaatacgtcacacgtcctataccgaaaacgtcacacgtcctatatcgaatatatcacgcgtcctatatcaaaaacgtcatacgtcctatatcgaaacgtcattcgtcctatatcaatatatcgtacgtcctatatcaaaaacgtcatacctcctatatcgaatatatcatacatcctatatcaaaaacgtcatatatcctatatcgaatatatcatacgccctatatcaaaaacgtcatacgtcctatatcgaatatcatacatcctatatcgaaacgtcatatatctatatatcataatatatcgtatatatc

SEQ ID NO: 19081 - DNA, 1083 bp, Artificial Sequence
  chemically treated genomic DNA (Homo sapiens) CpG-island No: 19081
ttacgcggcgcgtgttcggtgaatgaatatagcgtgggagaatcgtgtgtgtgtggtgtttacgcggcgtatgttcggtgaatgaatatagcgtgggagaattgtgtgtgtggtgtttacgtagcgcgtgttcggtgaatgaatatagcgtgggagaattgtgtgtgtgtggtgtttacgcggcgcgtgttcggtgaatgaatatagcgtgggagaattgtgtgtgtggtgtttacgcggcgcgtgattggtgaatgaatatagcgtgggagaattgtgtgtgtggtgtttacgcggtacgtgtttggtgaatgaatatagcgtgggagaattgtgtgtgtggtgtttacgcggcgtgtgttcggtgaatgaatatagcgtgggagaattgtgtgtgtgtggtgtttacgtggtatatgttcggtgagtgaatatagcgtgggagaatcgtgtgtgtgtggtgtttacgtggtatatgttcggtgaatgaatatagcgtgggagaatcgtgtgtgtgtggtgtttacgcggtacgtgtttggtgaatgaatatagcgtgggagaatagtgtgtgtttggtgtttacgcggcgcgtgttcggtgaatgaatatagcgtgggagaattgtgtgtgtggtgtttacgcggtacgtgttcggtgaattaatttagcgtgggagaatcgtgtatgtgtggtgtttacgcggcgtgtgttcggtgaatgaatatagcgtgggagaattgtgtgtgtggtgtttacgcggcgcgtgttcggtgaatgaatatagcgtgggagaattgtgtgtgtggtgtttacgcggcgcgtgttcggtgaatgaatatagcgtgggagaattgtgtgtgtgtggtgtttacgtggcgcgtgttcggtgaatgaatatagcgtgggagaattgtgtgtgtggtgtttacgcggcgcgtgttcggtgaatgaatatagcgtgggagaattgtgtgtgtgtggtgtttacgtggcgcgtgttcggtgaatgaatatagcgtgggaatgttttttgagtgaatatagcgtgggagagttttaaaaaataataataataataat

SEQ ID NO: 19082 - DNA, 1083 bp, Artificial Sequence
  chemically treated genomic DNA (Homo sapiens) CpG-island No: 19082
attattattattattattttttaaaactctcccacgctatattcactcaaaaaacattcccacgctatattcattcaccgaacacgcgccacgtaaacaccacacacacacaattctcccacgctatattcattcaccgaacacgcgccgcgtaaacaccacacacacaattctcccacgctatattcattcaccgaacacgcgccacgtaaacaccacacacacacaattctcccacgctatattcattcaccgaacacgcgccgcgtaaacaccacacacacaattctcccacgctatattcattcaccgaacacgcgccgcgtaaacaccacacacacaattctcccacgctatattcattcaccgaacacacgccgcgtaaacaccacacatacacgattctcccacgctaaattaattcaccgaacacgtaccgcgtaaacaccacacacacaattctcccacgctatattcattcaccgaacacgcgccgcgtaaacaccaaacacacactattctcccacgctatattcattcaccaaacacgtaccgcgtaaacaccacacacacacgattctcccacgctatattcattcaccgaacatataccacgtaaacaccacacacacacgattctcccacgctatattcactcaccgaacatataccacgtaaacaccacacacacacaattctcccacgctatattcattcaccgaacacacgccgcgtaaacaccacacacacaattctcccacgctatattcattcaccaaacacgtaccgcgtaaacaccacacacacaattctcccacgctatattcattcaccaatcacgcgccgcgtaaacaccacacacacaattctcccacgctatattcattcaccgaacacgcgccgcgtaaacaccacacacacacaattctcccacgctatattcattcaccgaacacgcgctacgtaaacaccacacacacaattctcccacgctatattcattcaccgaacatacgccgcgtaaacaccacacacacacgattctcccacgctatattcattcaccgaacacgcgccgcgtaa

SEQ ID NO: 19083 - DNA, 1083 bp, Artificial Sequence
  chemically treated genomic DNA (Homo sapiens) CpG-island No: 19083
gttgttattgttgttgttttttgagatttttttacgttgtgtttatttagggagtatttttacgttgtgtttatttatcgagtacgcgttacgtgggtattatatatatataatttttttacgttatgtttatttatcgagtacgcgtcgcgtgggtattatatatataatttttttacgttgtgtttatttatcgagtacgcgttacgtgggtattatatatatataatttttttacgttgtgtttatttatcgagtacgcgtcgcgtgggtattatatatataatttttttacgttgtgtttatttatcgagtacgcgtcgcgtgggtattatatatataatttttttacgttgtgtttatttatcgagtatacgtcgcgtgggtattatatatatacgatttttttacgttgagttgatttatcgagtacgtgtcgcgtgggtattatatatataatttttttacgttgtgtttatttatcgagtacgcgtcgcgtgggtattaaatatatattatttttttacgttgtgtttatttattaagtacgtgtcgcgtgggtattatatatatacgatttttttacgttgtgtttatttatcgagtatgtgttacgtgggtattatatatatacgatttttttacgttgtgtttatttatcgagtatgtgttacgtgggtattatatatatataatttttttacgttgtgtttatttatcgagtatacgtcgcgtgggtattatatatataatttttttacgttgtgtttatttattaagtacgtgtcgcgtgggtattatatatataatttttttacgttgtgtttatttattaattacgcgtcgcgtgggtattatatatataatttttttacgttgtgtttatttatcgagtacgcgtcgcgtgggtattatatatatataatttttttacgttgtgtttatttatcgagtacgcgttgcgtgggtattatatatataatttttttacgttgtgtttatttatcgagtatgcgtcgcgtgggtattatatatatacgatttttttacgttgtgtttatttatcgagtacgcgtcgcgtgg

SEQ ID NO: 19084 - DNA, 1083 bp, Artificial Sequence
  chemically treated genomic DNA (Homo sapiens) CpG-island No: 19084
ccacgcgacgcgtactcgataaataaacacaacgtaaaaaaatcgtatatatataatacccacgcgacgcatactcgataaataaacacaacgtaaaaaaattatatatataatacccacgcaacgcgtactcgataaataaacacaacgtaaaaaaattatatatatataatacccacgcgacgcgtactcgataaataaacacaacgtaaaaaaattatatatataatacccacgcgacgcgtaattaataaataaacacaacgtaaaaaaattatatatataatacccacgcgacacgtacttaataaataaacacaacgtaaaaaaattatatatataatacccacgcgacgtatactcgataaataaacacaacgtaaaaaaattatatatatataatacccacgtaacacatactcgataaataaacacaacgtaaaaaaatcgtatatatataatacccacgtaacacatactcgataaataaacacaacgtaaaaaaatcgtatatatataatacccacgcgacacgtacttaataaataaacacaacgtaaaaaaataatatatatttaatacccacgcgacgcgtactcgataaataaacacaacgtaaaaaaattatatatataatacccacgcgacacgtactcgataaatcaactcaacgtaaaaaaatcgtatatatataatacccacgcgacgtatactcgataaataaacacaacgtaaaaaaattatatatataatacccacgcgacgcgtactcgataaataaacacaacgtaaaaaaattatatatataatacccacgcgacgcgtactcgataaataaacacaacgtaaaaaaattatatatatataatacccacgtaacgcgtactcgataaataaacacaacgtaaaaaaattatatatataatacccacgcgacgcgtactcgataaataaacataacgtaaaaaaattatatatatataatacccacgtaacgcgtactcgataaataaacacaacgtaaaaatactccctaaataaacacaacgtaaaaaaatctcaaaaaacaacaacaataacaac

SEQ ID NO: 19085 - DNA, 1297 bp, Artificial Sequence
  chemically treated genomic DNA (Homo sapiens) CpG-island No: 19085
gtttcgacgttattacggattgcgtagcgttcgcgattagtatagttcgaaagggaagatagcggttaacgcggacgcgttatggcgcggggattaaggaggagtttcgagaggggcggggttggtcggagggtcgcgcgcggggttattagcggcgtttaggggttagcgttaacgtttacgggttggttatttttatttaggcgtttcgggtcgtaattaagtagtttgttcgttttaagttcgttatttttaagtaggtttagcgtagagtttgtcgggagcggcgttttttcgttttttttaatgggagttcggagcggtatcgacgcgttttcggggttaatggaagcgaggttttggtgttgttgggcggggtcgggagggttgcgcgggttcgagatttattgcgtacgcgcgttcgttattcgtttttttcgtcgcgtacgcgttttcgtgtagggtcggtcgggcgtttaggagcgcgcggggtagcggcggcgcggcggagttattcgcgttcgtgttcgcgcgggtgcgttgttgttttggtcgcgtttttgtttcgtcgtttttcgtttttcgtttggcggatgtaggttgttggtttgaggggagttacgtagtcgaggtttgcgttgtcgtcgttaggttcggttcggttttagtttttgttcggacgttagtcggtttggttatggttgatcgcgggtgttcgttggaggcggcgtcgttgtttgtcgaggtgcgggagagtttggttgagttggagttggagttgtcggaaggtgagtcggatttcgtttttaattttcgcgattcgtttttagttcggtttttcgcgtagttttttatttcgggattttcgcgcggttttttattttaggattttcgttttttattttcgggatttttacgcggtttcgtttttgggatttttgttttttaacgggatttcggtttttttattttggaattcgtttttcgtttcggagatatcgttttttaattttaggatttcgttttttatgtgggattttagtacgatttttcgtttcgagatttcggttttttattttcgggaattttcgttttttattttcgggattttttgttttttattttcggaatttcgcgcggttttttatttcggggatttcgttttttattttgggagtttcgcgttgttttttcggattttcgatttttagtttcgggatattcgcgcggttttttaaattagggattattgtttcgttttttatataaggattttttttttatataaggatttttt

SEQ ID NO: 19086 - DNA, 1297 bp, Artificial Sequence
  chemically treated genomic DNA (Homo sapiens) CpG-island No: 19086
aaaaaatccttatataaaaaaaaaatccttatataaaaaacgaaacaataatccctaatttaaaaaaccgcgcgaatatcccgaaactaaaaatcgaaaatccgaaaaaacaacgcgaaactcccaaaataaaaaacgaaatccccgaaataaaaaaccgcgcgaaattccgaaaataaaaaacaaaaaatcccgaaaataaaaaacgaaaattcccgaaaataaaaaaccgaaatctcgaaacgaaaaatcgtactaaaatcccacataaaaaacgaaatcctaaaattaaaaaacgatatctccgaaacgaaaaacgaattccaaaataaaaaaaccgaaatcccgttaaaaaacaaaaatcccaaaaacgaaaccgcgtaaaaatcccgaaaataaaaaacgaaaatcctaaaataaaaaaccgcgcgaaaatcccgaaataaaaaactacgcgaaaaaccgaactaaaaacgaatcgcgaaaattaaaaacgaaatccgactcaccttccgacaactccaactccaactcaaccaaactctcccgcacctcgacaaacaacgacgccgcctccaacgaacacccgcgatcaaccataaccaaaccgactaacgtccgaacaaaaactaaaaccgaaccgaacctaacgacgacaacgcaaacctcgactacgtaactcccctcaaaccaacaacctacatccgccaaacgaaaaacgaaaaacgacgaaacaaaaacgcgaccaaaacaacaacgcacccgcgcgaacacgaacgcgaataactccgccgcgccgccgctaccccgcgcgctcctaaacgcccgaccgaccctacacgaaaacgcgtacgcgacgaaaaaaacgaataacgaacgcgcgtacgcaataaatctcgaacccgcgcaaccctcccgaccccgcccaacaacaccaaaacctcgcttccattaaccccgaaaacgcgtcgataccgctccgaactcccattaaaaaaaacgaaaaaacgccgctcccgacaaactctacgctaaacctacttaaaaataacgaacttaaaacgaacaaactacttaattacgacccgaaacgcctaaataaaaataaccaacccgtaaacgttaacgctaacccctaaacgccgctaataaccccgcgcgcgaccctccgaccaaccccgcccctctcgaaactcctccttaatccccgcgccataacgcgtccgcgttaaccgctatcttccctttcgaactatactaatcgcgaacgctacgcaatccgtaataacgtcgaaac

SEQ ID NO: 19087 - DNA, 1297 bp, Artificial Sequence
  chemically treated genomic DNA (Homo sapiens) CpG-island No: 19087
gaggagtttttgtatgggggaggggtttttgtatgagaggcggggtagtggtttttggtttgaggggtcgcgcgggtgtttcggggttgagggtcgggagttcggaggggtagcgcggggtttttagggtgaagggcggggttttcggggtgaggggtcgcgcggggtttcgggggtgaggggtaggaggtttcgggggtgaggggcgggagttttcgggggtaaggggtcggggtttcggggcgaggggtcgtgttggggttttatatgaggggcggggttttagggttgaggaacggtgttttcggggcgaggggcgggttttagggtagaggaatcggggtttcgttgaggggtagaggttttaggggcgaggtcgcgtgggggtttcgggggtgaagggcgggggttttggagtgaggggtcgcgcgggggtttcggagtgaggggttgcgcgggggatcgggttgagggcgggtcgcgggggttgagggcggggttcggtttatttttcgatagttttagttttagtttagttaggttttttcgtatttcggtaggtagcggcgtcgtttttagcgggtattcgcggttagttatggttaggtcggttagcgttcgggtagaggttggaatcggatcgggtttggcggcggtagcgtaaatttcggttacgtagttttttttaggttaataatttatattcgttaggcgaggagcgggaggcggcgggataggggcgcggttaggatagtaacgtattcgcgcgggtacgagcgcggatggtttcgtcgcgtcgtcgttgtttcgcgcgtttttgagcgttcggtcggttttatacgggagcgcgtgcgcggcgggaagggcgggtagcgagcgcgcgtgcgtagtgggtttcgggttcgcgtagttttttcggtttcgtttagtaatattagagtttcgtttttattggtttcgaagacgcgtcgatgtcgtttcgggtttttattgggagaggcgggagagcgtcgttttcgataggttttgcgttgggtttgtttgagggtggcgggtttgaggcgggtaggttgtttagttgcggttcgaggcgtttaagtggggatgattaattcgtgggcgttggcgttgatttttaggcgtcgttggtggtttcgcgcgcggtttttcggttagtttcgtttttttcggggtttttttttggttttcgcgttatggcgcgttcgcgttgatcgttgttttttttttcgggttgtgttgatcgcgaacgttgcgtagttcgtggtggcgtcgaggt

SEQ ID NO: 19088 - DNA, 1297 bp, Artificial Sequence
  chemically treated genomic DNA (Homo sapiens) CpG-island No: 19088
acctcgacgccaccacgaactacgcaacgttcgcgatcaacacaacccgaaaaaaaaaacaacgatcaacgcgaacgcgccataacgcgaaaaccaaaaaaaaaccccgaaaaaaacgaaactaaccgaaaaaccgcgcgcgaaaccaccaacgacgcctaaaaatcaacgccaacgcccacgaattaatcatccccacttaaacgcctcgaaccgcaactaaacaacctacccgcctcaaacccgccaccctcaaacaaacccaacgcaaaacctatcgaaaacgacgctctcccgcctctcccaataaaaacccgaaacgacatcgacgcgtcttcgaaaccaataaaaacgaaactctaatattactaaacgaaaccgaaaaaactacgcgaacccgaaacccactacgcacgcgcgctcgctacccgcccttcccgccgcgcacgcgctcccgtataaaaccgaccgaacgctcaaaaacgcgcgaaacaacgacgacgcgacgaaaccatccgcgctcgtacccgcgcgaatacgttactatcctaaccgcgcccctatcccgccgcctcccgctcctcgcctaacgaatataaattattaacctaaaaaaaactacgtaaccgaaatttacgctaccgccgccaaacccgatccgattccaacctctacccgaacgctaaccgacctaaccataactaaccgcgaatacccgctaaaaacgacgccgctacctaccgaaatacgaaaaaacctaactaaactaaaactaaaactatcgaaaaataaaccgaaccccgccctcaacccccgcgacccgccctcaacccgatcccccgcgcaacccctcactccgaaacccccgcgcgacccctcactccaaaacccccgcccttcacccccgaaacccccacgcgacctcgcccctaaaacctctacccctcaacgaaaccccgattcctctaccctaaaacccgcccctcgccccgaaaacaccgttcctcaaccctaaaaccccgcccctcatataaaaccccaacacgacccctcgccccgaaaccccgaccccttacccccgaaaactcccgcccctcacccccgaaacctcctacccctcacccccgaaaccccgcgcgacccctcaccccgaaaaccccgcccttcaccctaaaaaccccgcgctacccctccgaactcccgaccctcaaccccgaaacacccgcgcgacccctcaaaccaaaaaccactaccccgcctctcatacaaaaacccctcccccatacaaaaactcctc

SEQ ID NO: 19089 - DNA, 866 bp, Artificial Sequence
  chemically treated genomic DNA (Homo sapiens) CpG-island No: 19089
gtttcgcgtttttttgggtcggattttaagtcgagttttttaatttcgcggttgggttgggcgattggggacgagttttatatatggagaatttggtttcgtttcgtaagatcgcgggacgcgtagatgtgaagtgcgtttgcgcggggcgtagttttagttgtagacgatttgtgagcgacgcgtcggcgtaagtcgagggcggtggtttggtttttttggaatgggggacgttttaggattgcgtttgcgcggggcgtcgggttttgggcggggttttttcggttgacggtttgcgtgtattgcgtttgcgcgggttgagggcggtggtttaggtttttggaaaggatcgtttattttttcgcgttggcggtgtggacgcggaatttagcggagaaacgcgattgaggtaggtgttttgatgggtagtttagatggttggattgtacgtaaggaaggataggttaggtgaggcgttttcgtattgcgtgtgcgtcgttggcggatagaggttttcgtttttttttgggattttcgagcgttttcgcgattttagttattttttttggcgtttaaacgggagttcggttttcgttatatttttttttgcgtgtcgtattttttttcggttattttcgtcgtttagcgttttttacggttacgtttattttattattatttttgttacgtttttcgcggttacgtttatttgtttggcggtttttgtttcgaagttcgcggcgttgttttagtttgattttttcgtgtttttgcgtttacgcgtggttttttcgttttttgttttttttttatttttttttattggttatttgttttaattttttatgattttgtttttttcgagg

SEQ ID NO: 19090 - DNA, 866 bp, Artificial Sequence
  chemically treated genomic DNA (Homo sapiens) CpG-island No: 19090
cctcgaaaaaaacaaaatcataaaaaattaaaacaaataaccaataaaaaaaaataaaaaaaaaacaaaaaacgaaaaaaccacgcgtaaacgcaaaaacacgaaaaaatcaaactaaaacaacgccgcgaacttcgaaacaaaaaccgccaaacaaataaacgtaaccgcgaaaaacgtaacaaaaataataataaaataaacgtaaccgtaaaaaacgctaaacgacgaaaataaccgaaaaaaaatacgacacgcaaaaaaaaatataacgaaaaccgaactcccgtttaaacgccaaaaaaaataactaaaatcgcgaaaacgctcgaaaatcccaaaaaaaaacgaaaacctctatccgccaacgacgcacacgcaatacgaaaacgcctcacctaacctatccttccttacgtacaatccaaccatctaaactacccatcaaaacacctacctcaatcgcgtttctccgctaaattccgcgtccacaccgccaacgcgaaaaaataaacgatcctttccaaaaacctaaaccaccgccctcaacccgcgcaaacgcaatacacgcaaaccgtcaaccgaaaaaaccccgcccaaaacccgacgccccgcgcaaacgcaatcctaaaacgtcccccattccaaaaaaaccaaaccaccgccctcgacttacgccgacgcgtcgctcacaaatcgtctacaactaaaactacgccccgcgcaaacgcacttcacatctacgcgtcccgcgatcttacgaaacgaaaccaaattctccatatataaaactcgtccccaatcgcccaacccaaccgcgaaattaaaaaactcgacttaaaatccgacccaaaaaaacgcgaaac

SEQ ID NO: 19091 - DNA, 866 bp, Artificial Sequence
  chemically treated genomic DNA (Homo sapiens) CpG-island No: 19091
tttcgggaggaataggattatggagggttggaataggtggttagtgaaggggggtgagaagggggtaggaagcgagagggttacgcgtggacgtaggggtacgagagggttaggttgggatagcgtcgcgagtttcggggtaggggtcgttaggtaggtgggcgtggtcgcgaagggcgtgatagagatggtggtggggtgggcgtggtcgtagaaggcgttggacggcgggagtggtcgggaaggggtgcggtacgtagggaagggtgtgacggggatcgagttttcgtttggacgttagggaaagtggttgagatcgcgaaggcgttcggaggttttaaaagggggcggaggtttttgttcgttagcgacgtatacgtagtgcgaggacgttttatttggtttgtttttttttacgtgtagtttagttatttgagttgtttattaggatatttattttaatcgcgttttttcgttgagtttcgcgtttatatcgttagcgcggaggggtggacggttttttttaggagtttgagttatcgtttttaattcgcgtaagcgtagtgtacgtaggtcgttagtcgggaaggtttcgtttagggttcggcgtttcgcgtaggcgtagttttaagacgttttttattttagggaagttaagttatcgttttcgatttgcgtcggcgcgtcgtttatagatcgtttgtagttggggttgcgtttcgcgtaggcgtattttatatttgcgcgtttcgcggttttgcgaggcgaggttaggttttttatgtgtggagttcgtttttaatcgtttagtttagtcgcggggttggggggttcggtttggggttcgatttagaggggcgcggggt

SEQ ID NO: 19092 - DNA, 866 bp, Artificial Sequence
  chemically treated genomic DNA (Homo sapiens) CpG-island No: 19092
accccgcgcccctctaaatcgaaccccaaaccgaaccccccaaccccgcgactaaactaaacgattaaaaacgaactccacacataaaaaacctaacctcgcctcgcaaaaccgcgaaacgcgcaaatataaaatacgcctacgcgaaacgcaaccccaactacaaacgatctataaacgacgcgccgacgcaaatcgaaaacgataacttaacttccctaaaataaaaaacgtcttaaaactacgcctacgcgaaacgccgaaccctaaacgaaaccttcccgactaacgacctacgtacactacgcttacgcgaattaaaaacgataactcaaactcctaaaaaaaaccgtccacccctccgcgctaacgatataaacgcgaaactcaacgaaaaaacgcgattaaaataaatatcctaataaacaactcaaataactaaactacacgtaaaaaaaaacaaaccaaataaaacgtcctcgcactacgtatacgtcgctaacgaacaaaaacctccgcccccttttaaaacctccgaacgccttcgcgatctcaaccactttccctaacgtccaaacgaaaactcgatccccgtcacacccttccctacgtaccgcaccccttcccgaccactcccgccgtccaacgccttctacgaccacgcccaccccaccaccatctctatcacgcccttcgcgaccacgcccacctacctaacgacccctaccccgaaactcgcgacgctatcccaacctaaccctctcgtacccctacgtccacgcgtaaccctctcgcttcctacccccttctcaccccccttcactaaccacctattccaaccctccataatcctattcctcccgaaa

SEQ ID NO: 19093 - DNA, 2476 bp, Artificial Sequence
  chemically treated genomic DNA (Homo sapiens) CpG-island No: 19093
aaatagtatacgtaagatcgggtgtgcgtgaggagatgtgaatatcgggaatagtcgagtgggtagaaatagtatacgtaagatcgggtgtgtacgaggagatgtgaatatcgggaatagtcgagtgggtagaaatagtatacgtaagatcgggtgtgtacgaggagatgtgaatatcgggaatagtcgagtggatagaaatagtatacgtaagatcgggtgtgcgtgaggagatgcgaatatcgggaatagtcgagtgggtagaaatagtatacgtaagatcgggtgtgtacgaggagatgtgaatatcgggaatagttgcgtggatagaaatagtatacgtaagatcgggtgtgcgtgaggagatgcgaatatcgggaatagtcgcgtggatagaaatagtatacgtaagatcgggtgtgtacgaggagatgtgaatatcgggaatagtcgcgtggatagaaatagtatacgtaagatcgggtgtgcgtgaggagatgcgaatatcgggaatagttaagtgggtagaaatagtatacgtaagatcgggtgtgcgtgaggagatgcgaatatcgggaatagtcgagtgggtagaaatagtatacgtaagatcgggtgtgtacgaggagatgtgaatatcgggaatagtcgagtggatagaaatagtatacgtaagatcgggtgtgcgtgaggagatgcgaatatcgggaatagtcgcgtggatagaaatagtatacgtaagatcgggtgtgtacgaggagatgtgaatatcgggaatagtcgcgtggatagaaatagtatacgtaagatcgggtgtgtacgaggagatgtgaatatcgggaatagtcgagtgggtagaaatagtatacgtaagatcgggtgtgcgtgaggagatgcgaatatcgggaatagtcgagtggatagaaatagtatacgtaagatcgggtgtgtacgaggagatgtgaatatcgggaatagtcgagtggatagaaatagtatacgtaagatcgggtgtgcgtgaggagatgtaaatatcgggaatagtcgagtggatagaaatagtatacgtaagatcgggtgtgcgtgaggagatgcgaatatcgggaatagtcgagtgggtagaaatagtatacgtaagatcgggtgtgtacgaggagatgtgaatatcgggaatagtcgcgtggatagaaatagtatacgtaagatcgggtgtgcgtgaggagatgcgaatatcgggaatagtcgagtgggtagaaatagtatacgtaagatcgggtgtgtacgaggagatgcgaatatcgggaatagtcgcgtggatagaaatagtatacgtaagatcgggtgtgcgtgaggagatgcgaatatcgggaatagtcgagtgggtagaaatagtatacgtaagatcgggtgtgtacgaggagatgcgaatatcgggaatagtcgcgtggatagaaatagtatacgtaagatcgggtgtgcgtgaggagatgcgaatatcgggaatagtcgcgtggatagaaatagtatacgtaagatcgggtgtgtacgaggagatgcgaatatcgggaatagtcgcgtggatagaaatagtatacgtaagatcgggtgtgtacgaggagatgcgaatatcgggaatagtcgcgtggatagaaatagtatacgtaagatcgggtgtgcgtgaggagatgcgaatatcgggaatagtcgcgtggatagaaatagtatacgtaagatcgggtgtgcgtgaggagatgcgaatatcgggaatagtcgagtgggtagaaatagtatacgtaagatcgggtgtgtacgaggagatgcgaatatcgggaatagtcgcgtggatagaaatagtatacgtaagatcgggtgtgtacgaggagatgcgaatatcgggaatagtcgagtggatagaaatagtatacgtaagatcgggtgtgcgtgaggagatgcgaatatcgggaatagtcgagtgggtagaaatagtatacgtaagatcgggtgtgtacgaggagatgcgaatatcgggaatagtcgcgtggatagaaatagtatacgtaagatcgggtgtgtacgaggagatgcgaatatcgggaatagtcgcgtggatagaaatagtatacgtaagatcgggtgtgcgtgaggagatgcgaatatcgggaatagtcgagtgggtagaaatagtatacgtaagatcgggtgtgtacgaggagatgcgaatatcgggaatagtcgagtgggtagaaatagtatacgtaagatcgggtgtgtacgaggagatgtaaatattgggaatagtcgagtggatagaaatagtatacgtaaggtcgggtgtgtacgaggagatgcgaatattaggaatagtcgagtgggtagaaatagtatacgtaaggtcgggtgtgcgtgaggagatgcgaatattcgtaggtttttgttttattttattagagggagaagatattgagtgtagattttt

SEQ ID NO: 19094 - DNA, 2476 bp, Artificial Sequence
  chemically treated genomic DNA (Homo sapiens) CpG-island No: 19094
aaaaatctacactcaatatcttctccctctaataaaataaaacaaaaacctacgaatattcgcatctcctcacgcacacccgaccttacgtatactatttctacccactcgactattcctaatattcgcatctcctcgtacacacccgaccttacgtatactatttctatccactcgactattcccaatatttacatctcctcgtacacacccgatcttacgtatactatttctacccactcgactattcccgatattcgcatctcctcgtacacacccgatcttacgtatactatttctacccactcgactattcccgatattcgcatctcctcacgcacacccgatcttacgtatactatttctatccacgcgactattcccgatattcgcatctcctcgtacacacccgatcttacgtatactatttctatccacgcgactattcccgatattcgcatctcctcgtacacacccgatcttacgtatactatttctacccactcgactattcccgatattcgcatctcctcacgcacacccgatcttacgtatactatttctatccactcgactattcccgatattcgcatctcctcgtacacacccgatcttacgtatactatttctatccacgcgactattcccgatattcgcatctcctcgtacacacccgatcttacgtatactatttctacccactcgactattcccgatattcgcatctcctcacgcacacccgatcttacgtatactatttctatccacgcgactattcccgatattcgcatctcctcacgcacacccgatcttacgtatactatttctatccacgcgactattcccgatattcgcatctcctcgtacacacccgatcttacgtatactatttctatccacgcgactattcccgatattcgcatctcctcgtacacacccgatcttacgtatactatttctatccacgcgactattcccgatattcgcatctcctcacgcacacccgatcttacgtatactatttctatccacgcgactattcccgatattcgcatctcctcgtacacacccgatcttacgtatactatttctacccactcgactattcccgatattcgcatctcctcacgcacacccgatcttacgtatactatttctatccacgcgactattcccgatattcgcatctcctcgtacacacccgatcttacgtatactatttctacccactcgactattcccgatattcgcatctcctcacgcacacccgatcttacgtatactatttctatccacgcgactattcccgatattcacatctcctcgtacacacccgatcttacgtatactatttctacccactcgactattcccgatattcgcatctcctcacgcacacccgatcttacgtatactatttctatccactcgactattcccgatatttacatctcctcacgcacacccgatcttacgtatactatttctatccactcgactattcccgatattcacatctcctcgtacacacccgatcttacgtatactatttctatccactcgactattcccgatattcgcatctcctcacgcacacccgatcttacgtatactatttctacccactcgactattcccgatattcacatctcctcgtacacacccgatcttacgtatactatttctatccacgcgactattcccgatattcacatctcctcgtacacacccgatcttacgtatactatttctatccacgcgactattcccgatattcgcatctcctcacgcacacccgatcttacgtatactatttctatccactcgactattcccgatattcacatctcctcgtacacacccgatcttacgtatactatttctacccactcgactattcccgatattcgcatctcctcacgcacacccgatcttacgtatactatttctacccacttaactattcccgatattcgcatctcctcacgcacacccgatcttacgtatactatttctatccacgcgactattcccgatattcacatctcctcgtacacacccgatcttacgtatactatttctatccacgcgactattcccgatattcgcatctcctcacgcacacccgatcttacgtatactatttctatccacgcaactattcccgatattcacatctcctcgtacacacccgatcttacgtatactatttctacccactcgactattcccgatattcgcatctcctcacgcacacccgatcttacgtatactatttctatccactcgactattcccgatattcacatctcctcgtacacacccgatcttacgtatactatttctacccactcgactattcccgatattcacatctcctcgtacacacccgatcttacgtatactatttctacccactcgactattcccgatattcacatctcctcacgcacacccgatcttacgtatactattt

SEQ ID NO: 19095 - DNA, 2476 bp, Artificial Sequence
  chemically treated genomic DNA (Homo sapiens) CpG-island No: 19095
gagagtttatatttagtgttttttttttttagtggaatgagatagagatttgcgggtgttcgtatttttttacgtatattcgattttacgtgtgttgtttttatttattcgattgtttttggtgttcgtattttttcgtgtatattcgattttacgtgtgttgtttttatttattcgattgtttttagtgtttgtattttttcgtgtatattcgattttacgtgtgttgtttttatttattcgattgttttcggtgttcgtattttttcgtgtatattcgattttacgtgtgttgtttttatttattcgattgttttcggtgttcgtatttttttacgtatattcgattttacgtgtgttgtttttatttacgcgattgttttcggtgttcgtattttttcgtgtatattcgattttacgtgtgttgtttttatttacgcgattgttttcggtgttcgtattttttcgtgtatattcgattttacgtgtgttgtttttatttattcgattgttttcggtgttcgtatttttttacgtatattcgattttacgtgtgttgtttttatttattcgattgttttcggtgttcgtattttttcgtgtatattcgattttacgtgtgttgtttttatttacgcgattgttttcggtgttcgtattttttcgtgtatattcgattttacgtgtgttgtttttatttattcgattgttttcggtgttcgtatttttttacgtatattcgattttacgtgtgttgtttttatttacgcgattgttttcggtgttcgtatttttttacgtatattcgattttacgtgtgttgtttttatttacgcgattgttttcggtgttcgtattttttcgtgtatattcgattttacgtgtgttgtttttatttacgcgattgttttcggtgttcgtattttttcgtgtatattcgattttacgtgtgttgtttttatttacgcgattgttttcggtgttcgtatttttttacgtatattcgattttacgtgtgttgtttttatttacgcgattgttttcggtgttcgtattttttcgtgtatattcgattttacgtgtgttgtttttatttattcgattgttttcggtgttcgtatttttttacgtatattcgattttacgtgtgttgtttttatttacgcgattgttttcggtgttcgtattttttcgtgtatattcgattttacgtgtgttgtttttatttattcgattgttttcggtgttcgtatttttttacgtatattcgattttacgtgtgttgtttttatttacgcgattgttttcggtgtttatattttttcgtgtatattcgattttacgtgtgttgtttttatttattcgattgttttcggtgttcgtatttttttacgtatattcgattttacgtgtgttgtttttatttattcgattgttttcggtgtttgtatttttttacgtatattcgattttacgtgtgttgtttttatttattcgattgttttcggtgtttatattttttcgtgtatattcgattttacgtgtgttgtttttatttattcgattgttttcggtgttcgtatttttttacgtatattcgattttacgtgtgttgtttttatttattcgattgttttcggtgtttatattttttcgtgtatattcgattttacgtgtgttgtttttatttacgcgattgttttcggtgtttatattttttcgtgtatattcgattttacgtgtgttgtttttatttacgcgattgttttcggtgttcgtatttttttacgtatattcgattttacgtgtgttgtttttatttattcgattgttttcggtgtttatattttttcgtgtatattcgattttacgtgtgttgtttttatttattcgattgttttcggtgttcgtatttttttacgtatattcgattttacgtgtgttgtttttatttatttgattgttttcggtgttcgtatttttttacgtatattcgattttacgtgtgttgtttttatttacgcgattgttttcggtgtttatattttttcgtgtatattcgattttacgtgtgttgtttttatttacgcgattgttttcggtgttcgtatttttttacgtatattcgattttacgtgtgttgtttttatttacgtaattgttttcggtgtttatattttttcgtgtatattcgattttacgtgtgttgtttttatttattcgattgttttcggtgttcgtatttttttacgtatattcgattttacgtgtgttgtttttatttattcgattgttttcggtgtttatattttttcgtgtatattcgattttacgtgtgttgtttttatttattcgattgttttcggtgtttatattttttcgtgtatattcgattttacgtgtgttgtttttatttattcgattgttttcggtgtttatatttttttacgtatattcgattttacgtgtgttgttt

SEQ ID NO: 19096 - DNA, 2476 bp, Artificial Sequence
  chemically treated genomic DNA (Homo sapiens) CpG-island No: 19096
aaacaacacacgtaaaatcgaatatacgtaaaaaaatataaacaccgaaaacaatcgaataaataaaaacaacacacgtaaaatcgaatatacacgaaaaaatataaacaccgaaaacaatcgaataaataaaaacaacacacgtaaaatcgaatatacacgaaaaaatataaacaccgaaaacaatcgaataaataaaaacaacacacgtaaaatcgaatatacgtaaaaaaatacgaacaccgaaaacaatcgaataaataaaaacaacacacgtaaaatcgaatatacacgaaaaaatataaacaccgaaaacaattacgtaaataaaaacaacacacgtaaaatcgaatatacgtaaaaaaatacgaacaccgaaaacaatcgcgtaaataaaaacaacacacgtaaaatcgaatatacacgaaaaaatataaacaccgaaaacaatcgcgtaaataaaaacaacacacgtaaaatcgaatatacgtaaaaaaatacgaacaccgaaaacaatcaaataaataaaaacaacacacgtaaaatcgaatatacgtaaaaaaatacgaacaccgaaaacaatcgaataaataaaaacaacacacgtaaaatcgaatatacacgaaaaaatataaacaccgaaaacaatcgaataaataaaaacaacacacgtaaaatcgaatatacgtaaaaaaatacgaacaccgaaaacaatcgcgtaaataaaaacaacacacgtaaaatcgaatatacacgaaaaaatataaacaccgaaaacaatcgcgtaaataaaaacaacacacgtaaaatcgaatatacacgaaaaaatataaacaccgaaaacaatcgaataaataaaaacaacacacgtaaaatcgaatatacgtaaaaaaatacgaacaccgaaaacaatcgaataaataaaaacaacacacgtaaaatcgaatatacacgaaaaaatataaacaccgaaaacaatcgaataaataaaaacaacacacgtaaaatcgaatatacgtaaaaaaatacaaacaccgaaaacaatcgaataaataaaaacaacacacgtaaaatcgaatatacgtaaaaaaatacgaacaccgaaaacaatcgaataaataaaaacaacacacgtaaaatcgaatatacacgaaaaaatataaacaccgaaaacaatcgcgtaaataaaaacaacacacgtaaaatcgaatatacgtaaaaaaatacgaacaccgaaaacaatcgaataaataaaaacaacacacgtaaaatcgaatatacacgaaaaaatacgaacaccgaaaacaatcgcgtaaataaaaacaacacacgtaaaatcgaatatacgtaaaaaaatacgaacaccgaaaacaatcgaataaataaaaacaacacacgtaaaatcgaatatacacgaaaaaatacgaacaccgaaaacaatcgcgtaaataaaaacaacacacgtaaaatcgaatatacgtaaaaaaatacgaacaccgaaaacaatcgcgtaaataaaaacaacacacgtaaaatcgaatatacacgaaaaaatacgaacaccgaaaacaatcgcgtaaataaaaacaacacacgtaaaatcgaatatacacgaaaaaatacgaacaccgaaaacaatcgcgtaaataaaaacaacacacgtaaaatcgaatatacgtaaaaaaatacgaacaccgaaaacaatcgcgtaaataaaaacaacacacgtaaaatcgaatatacgtaaaaaaatacgaacaccgaaaacaatcgaataaataaaaacaacacacgtaaaatcgaatatacacgaaaaaatacgaacaccgaaaacaatcgcgtaaataaaaacaacacacgtaaaatcgaatatacacgaaaaaatacgaacaccgaaaacaatcgaataaataaaaacaacacacgtaaaatcgaatatacgtaaaaaaatacgaacaccgaaaacaatcgaataaataaaaacaacacacgtaaaatcgaatatacacgaaaaaatacgaacaccgaaaacaatcgcgtaaataaaaacaacacacgtaaaatcgaatatacacgaaaaaatacgaacaccgaaaacaatcgcgtaaataaaaacaacacacgtaaaatcgaatatacgtaaaaaaatacgaacaccgaaaacaatcgaataaataaaaacaacacacgtaaaatcgaatatacacgaaaaaatacgaacaccgaaaacaatcgaataaataaaaacaacacacgtaaaatcgaatatacacgaaaaaatacaaacactaaaaacaatcgaataaataaaaacaacacacgtaaaatcgaatatacacgaaaaaatacgaacaccaaaaacaatcgaataaataaaaacaacacacgtaaaatcgaatatacgtaaaaaaatacgaacacccgcaaatctctatctcattccactaaaaaaaaaaaacactaaatataaactctc

SEQ ID NO: 19097 - DNA, 535 bp, Artificial Sequence
  chemically treated genomic DNA (Homo sapiens) CpG-island No: 19097
agtgcggacgggcgaggaggggacgcggaaaggagggagcggcgataggcgattcgttcggtacgggtttcggcggtgttcggttttttcgggttttaggtcgttcgtttttcgtttttttttttcgtttttcgtatagttttttcgtttttttttattcggtttttttaagtttttacgaacggaaatgggagttatagcgtcggggattagcggaaataaaatatagaggcggtcgcgggggggtttttgtgggggaaaaggtttcggaacgaggtcggttcgcgagggttcgcgtttttttttttttcggcggtcgtatttatttatttcggaatcggttttgtcgttttcgttcgtattttagagtcggttgagaacggtagcggcgagggttttacgtgtagcgttttttcgggtaagatttgtagttttcgcgattagaagtgtgaggttttagggtttttttcgcggaatcggcgttgagaagttttaatttttttttcgttttttaggtattttcgggtttaggatt

SEQ ID NO: 19098 - DNA, 535 bp, Artificial Sequence
  chemically treated genomic DNA (Homo sapiens) CpG-island No: 19098
aatcctaaacccgaaaatacctaaaaaacgaaaaaaaaattaaaacttctcaacgccgattccgcgaaaaaaaccctaaaacctcacacttctaatcgcgaaaactacaaatcttacccgaaaaaacgctacacgtaaaaccctcgccgctaccgttctcaaccgactctaaaatacgaacgaaaacgacaaaaccgattccgaaataaataaatacgaccgccgaaaaaaaaaaaaacgcgaaccctcgcgaaccgacctcgttccgaaaccttttcccccacaaaaacccccccgcgaccgcctctatattttatttccgctaatccccgacgctataactcccatttccgttcgtaaaaacttaaaaaaaccgaataaaaaaaaacgaaaaaactatacgaaaaacgaaaaaaaaaaacgaaaaacgaacgacctaaaacccgaaaaaaccgaacaccgccgaaacccgtaccgaacgaatcgcctatcgccgctccctcctttccgcgtcccctcctcgcccgtccgcact

SEQ ID NO: 19099 - DNA, 535 bp, Artificial Sequence
  chemically treated genomic DNA (Homo sapiens) CpG-island No: 19099
agttttggattcgaaggtgtttgggaggcgggaggggggttggggttttttagcgtcgatttcgcgggaagggttttgggattttatatttttagtcgcgggagttgtaggttttattcggagagacgttgtacgtggagttttcgtcgttgtcgtttttagtcggttttggagtgcgggcgggggcgatagggtcgatttcggagtgggtgagtgcggtcgtcggggaggaggggagcgcgggttttcgcgggtcggtttcgtttcggggtttttttttttataagggttttttcgcggtcgtttttgtgttttgttttcgttggttttcggcgttgtgatttttattttcgttcgtggagatttgagggagtcgggtggggaggggcgggagagttgtgcggggagcgaaggggaggggcggggggcgagcggtttggagttcggggggatcgggtatcgtcgggattcgtgtcggacgggtcgtttgtcgtcgttttttttttttcgcgtttttttttcgttcgttcgtatt

SEQ ID NO: 19100 - DNA, 535 bp, Artificial Sequence
  chemically treated genomic DNA (Homo sapiens) CpG-island No: 19100
aatacgaacgaacgaaaaaaaaacgcgaaaaaaaaaaaacgacgacaaacgacccgtccgacacgaatcccgacgatacccgatccccccgaactccaaaccgctcgccccccgcccctccccttcgctccccgcacaactctcccgcccctccccacccgactccctcaaatctccacgaacgaaaataaaaatcacaacgccgaaaaccaacgaaaacaaaacacaaaaacgaccgcgaaaaaacccttataaaaaaaaaaaccccgaaacgaaaccgacccgcgaaaacccgcgctcccctcctccccgacgaccgcactcacccactccgaaatcgaccctatcgcccccgcccgcactccaaaaccgactaaaaacgacaacgacgaaaactccacgtacaacgtctctccgaataaaacctacaactcccgcgactaaaaatataaaatcccaaaacccttcccgcgaaatcgacgctaaaaaaccccaacccccctcccgcctcccaaacaccttcgaatccaaaact

SEQ ID NO: 19101 - DNA, 827 bp, Artificial Sequence
  chemically treated genomic DNA (Homo sapiens) CpG-island No: 19101
ttgcgtttttgggttcgtttttagtagagtgtcggcgtttcgttcggtcgcgtttgtttcgtttcggttcgtcgcgagcgagagagcgaacgagttttcgcggttatggttcggcgttcgttttagttttattgtatagatgttacggcggagtcggcgggtaggaatttggcgggggcgggggtcgggattggggtcgggattggggtcggggttggggttgcgtaatcgtttcgttttcgttgttcgtttgggtttttattttgttggcgtttttgtttaatcgttttttggtgggttttggcggtcgtttttcgtttcggcgtattaggcgtagtaggaagttcgtgggttgtggttttttcggcgttttcgcggaggaaatcggtcggcggcggggtgttgcgtttttatgtttagggcgggttggtattcggtttagcgttaggtgggcggttaagtcggtttgggcggcggcgcgcgggggcggtaggcgttggtgaagttcgtatacgcgttagcgtatttagttttattaagtttcgggttgggagttggttcgtgggggcgtgcgttgcgcgaaagcgaaagtcgttcgttagagtaattttgcggcggaaggcgtcgacgaggagttgtgtcgtgtcgtttttggggatggtgagttggtcgttcggtcgggtgggtagcgcgttcgggcgcggtgtttcgttagttataaataggtgttgtgcggggataggaagatggttttagttttttataagtatcggttcgttatgtgcgttgggttaggattttgtttcgtagcggagtgggaggagtga

SEQ ID NO: 19102 - DNA, 827 bp, Artificial Sequence
  chemically treated genomic DNA (Homo sapiens) CpG-island No: 19102
tcactcctcccactccgctacgaaacaaaatcctaacccaacgcacataacgaaccgatacttataaaaaactaaaaccatcttcctatccccgcacaacacctatttataactaacgaaacaccgcgcccgaacgcgctacccacccgaccgaacgaccaactcaccatccccaaaaacgacacgacacaactcctcgtcgacgccttccgccgcaaaattactctaacgaacgactttcgctttcgcgcaacgcacgcccccacgaaccaactcccaacccgaaacttaataaaactaaatacgctaacgcgtatacgaacttcaccaacgcctaccgcccccgcgcgccgccgcccaaaccgacttaaccgcccacctaacgctaaaccgaataccaacccgccctaaacataaaaacgcaacaccccgccgccgaccgatttcctccgcgaaaacgccgaaaaaaccacaacccacgaacttcctactacgcctaatacgccgaaacgaaaaacgaccgccaaaacccaccaaaaaacgattaaacaaaaacgccaacaaaataaaaacccaaacgaacaacgaaaacgaaacgattacgcaaccccaaccccgaccccaatcccgaccccaatcccgacccccgcccccgccaaattcctacccgccgactccgccgtaacatctatacaataaaactaaaacgaacgccgaaccataaccgcgaaaactcgttcgctctctcgctcgcgacgaaccgaaacgaaacaaacgcgaccgaacgaaacgccgacactctactaaaaacgaacccaaaaacgcaa

SEQ ID NO: 19103 - DNA, 827 bp, Artificial Sequence
  chemically treated genomic DNA (Homo sapiens) CpG-island No: 19103
ttattttttttatttcgttgcggggtaaggttttagtttagcgtatataacgggtcggtgtttgtaaagggttggaattatttttttgttttcgtatagtatttatttatagttagcgaagtatcgcgttcggacgcgttgtttattcggtcgggcggttagtttattatttttaagagcggtacggtatagtttttcgtcggcgtttttcgtcgtaaagttgttttggcgggcggttttcgttttcgcgtagcgtacgtttttacgagttagtttttagttcggggtttggtagggttggatgcgttggcgcgtgtgcgggttttattagcgtttgtcgttttcgcgcgtcgtcgtttaagtcggtttggtcgtttatttgacgttgaatcgggtgttagttcgttttgggtatgggggcgtagtatttcgtcgtcggtcgatttttttcgcgggggcgtcggggaaattatagtttacgggttttttgttgcgtttggtgcgtcgaggcggggggcggtcgttagagtttattaggggacgattgagtaaaagcgttagtaaagtggagatttagacgggtagcggaggcgaagcggttgcgtagttttagtttcggttttagtttcggttttagtttcggttttcgttttcgttaagtttttattcgtcggtttcgtcgtggtatttgtgtagtggagttagggcgagcgtcgggttatggtcgcggaggttcgttcgttttttcgttcgcggcgggtcggggcggggtaggcgcggtcggacggggcgtcggtattttattggaagcgggtttaggagcgtaa

SEQ ID NO: 19104 - DNA, 827 bp, Artificial Sequence
  chemically treated genomic DNA (Homo sapiens) CpG-island No: 19104
ttacgctcctaaacccgcttccaataaaataccgacgccccgtccgaccgcgcctaccccgccccgacccgccgcgaacgaaaaaacgaacgaacctccgcgaccataacccgacgctcgccctaactccactacacaaataccacgacgaaaccgacgaataaaaacttaacgaaaacgaaaaccgaaactaaaaccgaaactaaaaccgaaactaaaactacgcaaccgcttcgcctccgctacccgtctaaatctccactttactaacgcttttactcaatcgtcccctaataaactctaacgaccgccccccgcctcgacgcaccaaacgcaacaaaaaacccgtaaactataatttccccgacgcccccgcgaaaaaaatcgaccgacgacgaaatactacgcccccatacccaaaacgaactaacacccgattcaacgtcaaataaacgaccaaaccgacttaaacgacgacgcgcgaaaacgacaaacgctaataaaacccgcacacgcgccaacgcatccaaccctaccaaaccccgaactaaaaactaactcgtaaaaacgtacgctacgcgaaaacgaaaaccgcccgccaaaacaactttacgacgaaaaacgccgacgaaaaactataccgtaccgctcttaaaaataataaactaaccgcccgaccgaataaacaacgcgtccgaacgcgatacttcgctaactataaataaatactatacgaaaacaaaaaaataattccaaccctttacaaacaccgacccgttatatacgctaaactaaaaccttaccccgcaacgaaataaaaaaaataa

SEQ ID NO: 19105 - DNA, 775 bp, Artificial Sequence
  chemically treated genomic DNA (Homo sapiens) CpG-island No: 19105
cggttgcgcgatttagtgtcgagacggacgcgagtcggagatgggggaaggggagggggtggtggtgggggacggcggcgtttgcgtagtgaaggaatgtaggcggggtttttacgacgtttgcgtagacggtcgtagttttgttgggcgcgaaggggttggttaagggcggggttcgcgagggaggtcgggcggttcggtaagcggcgttgcggggtaggttgtttttttgaggtcggatttaacgggtttcggttgagttatcgggtgagtttatcgtttagtttaaattaggagattgcgagggagcgatgcggtgtagcgcggtaagagtagtagtcgggttttcgtagtgttcgttggcgggttggtttatcgttttagcgtcgttcgcgttgtcgcgttcgggcgttttcgtagatttcggtaggtttagcgtttgcgtcgtttttgtttttgggtttttttagtgtgtttcgcgtttgcgttttttttttttcgcgtcgttttcgttttgggtttcggggtttttggaataattcgtaggtttcgtcgtcgagatttattggttttcgttcgttggtgttggggtttagttggttttgggatttcgtttgcggtttgattgtgtgtagataggtcgggtgcgattttcgtgtttgttttttcgtcgtttcgggagaggttggggttgtcgttttatcgttcgggttttttgtttggggcggggatagcgttgtttagtggtttcgagggcgtagagcggaggagtagg

SEQ ID NO: 19106 - DNA, 775 bp, Artificial Sequence
  chemically treated genomic DNA (Homo sapiens) CpG-island No: 19106
cctactcctccgctctacgccctcgaaaccactaaacaacgctatccccgccccaaacaaaaaacccgaacgataaaacgacaaccccaacctctcccgaaacgacgaaaaaacaaacacgaaaatcgcacccgacctatctacacacaatcaaaccgcaaacgaaatcccaaaaccaactaaaccccaacaccaacgaacgaaaaccaataaatctcgacgacgaaacctacgaattattccaaaaaccccgaaacccaaaacgaaaacgacgcgaaaaaaaaaaaacgcaaacgcgaaacacactaaaaaaacccaaaaacaaaaacgacgcaaacgctaaacctaccgaaatctacgaaaacgcccgaacgcgacaacgcgaacgacgctaaaacgataaaccaacccgccaacgaacactacgaaaacccgactactactcttaccgcgctacaccgcatcgctccctcgcaatctcctaatttaaactaaacgataaactcacccgataactcaaccgaaacccgttaaatccgacctcaaaaaaacaacctaccccgcaacgccgcttaccgaaccgcccgacctccctcgcgaaccccgcccttaaccaaccccttcgcgcccaacaaaactacgaccgtctacgcaaacgtcgtaaaaaccccgcctacattccttcactacgcaaacgccgccgtcccccaccaccaccccctccccttcccccatctccgactcgcgtccgtctcgacactaaatcgcgcaaccg

SEQ ID NO: 19107 - DNA, 775 bp, Artificial Sequence
  chemically treated genomic DNA (Homo sapiens) CpG-island No: 19107
tttgttttttcgttttgcgttttcggggttattgaataacgttgttttcgttttaggtaagggattcgggcgatggggcggtagttttagtttttttcggagcggcggaaaggtaagtacgagggtcgtattcggtttgtttgtatatagttaagtcgtaagcggggttttagaattagttgaattttaatattaacggacgaaggttagtgggtttcggcggcgaagtttgcgggttgttttagaagtttcgaagtttagaacgaggacggcgcgggaagggaaaggcgtaggcgcgggatatattggaggggtttaggagtagagacggcgtaggcgttgggtttgtcggggtttgcggggacgttcgggcgcggtagcgcgggcggcgttgaggcgataaattaattcgttagcgaatattgcgggaattcggttgttgtttttatcgcgttgtatcgtatcgttttttcgtaattttttggtttgggttgggcggtgagtttattcggtggtttagtcgagattcgttgagttcggttttaggaaagtagtttatttcgtagcgtcgtttgtcgggtcgttcggtttttttcgcgggtttcgtttttggttagttttttcgcgtttagtagggttgcggtcgtttgcgtaggcgtcgtggaggtttcgtttatatttttttattgcgtaggcgtcgtcgttttttattattatttttttttttttttttattttcggttcgcgttcgtttcggtattgggtcgcgtagtcg

SEQ ID NO: 19108 - DNA, 775 bp, Artificial Sequence
  chemically treated genomic DNA (Homo sapiens) CpG-island No: 19108
cgactacgcgacccaataccgaaacgaacgcgaaccgaaaataaaaaaaaaaaaaaaaataataataaaaaacgacgacgcctacgcaataaaaaaatataaacgaaacctccacgacgcctacgcaaacgaccgcaaccctactaaacgcgaaaaaactaaccaaaaacgaaacccgcgaaaaaaaccgaacgacccgacaaacgacgctacgaaataaactactttcctaaaaccgaactcaacgaatctcgactaaaccaccgaataaactcaccgcccaacccaaaccaaaaaattacgaaaaaacgatacgatacaacgcgataaaaacaacaaccgaattcccgcaatattcgctaacgaattaatttatcgcctcaacgccgcccgcgctaccgcgcccgaacgtccccgcaaaccccgacaaacccaacgcctacgccgtctctactcctaaacccctccaatatatcccgcgcctacgcctttcccttcccgcgccgtcctcgttctaaacttcgaaacttctaaaacaacccgcaaacttcgccgccgaaacccactaaccttcgtccgttaatattaaaattcaactaattctaaaaccccgcttacgacttaactatatacaaacaaaccgaatacgaccctcgtacttacctttccgccgctccgaaaaaaactaaaactaccgccccatcgcccgaatcccttacctaaaacgaaaacaacgttattcaataaccccgaaaacgcaaaacgaaaaaacaaa

SEQ ID NO: 19109 - DNA, 1246 bp, Artificial Sequence
  chemically treated genomic DNA (Homo sapiens) CpG-island No: 19109
ggcgggacggatgcgagttcgggaggagcgcgttggggggtcgtaggcgggggatgtggcgcggtttaggttcgtcgcggtttcgttttgatagggatatttgcgggatcgtttttttaggatcgtttgcgggtttcgcgggtcgatgtttcgggttttttttcggtttcggttttttcgcgtagcggggcggggcgggggtagcgcgggttttaaagttgtttgtagggggcgttcgtgagcggcgcggtcggagtcggagatttagcggtcgtcgagatagcgggagtcggcgtgcgagcggtaggttagtcggggtgttaggtttggcgtgcggggttttgggtgtcgggttcggggtgcggggtgtcgggggttcggggttggtggtcgggcggcgtggggtcgtcgggggtgcggggtcgggaggattgggaggttggggttttgttttttttagggtttttttttcgtcgtttcgagattagtttttcggcgcggggttcgagttttgtttcgcggcggttgtcggtattgtttgtgaagggtttaggtatagttacgttttaggcgtagttgcggcgtcgcgtgcgggatttttcgagttgttttaaattgtatcggaaggcgcgtaggggtaggcggggagggaaggtaagtgcggcggtcggcgcggcgcggggtgcggagtcgtaggtagcgggcggggagcgttcgttcgttagttcgttcgttcgtttatgcgtcgtagatcggtttcgcgcgttcgtatgaattttcgcgagtttttttagtagggatggatcgggggcgtagaggcgttttttgaggggtggcgggtcgggtttcggggcgagggagattttttaggtggaggagtcgggcggagatcggtttttcgggaaggtgaggcgcgggtagagatattcgagcgttcgggacgcgtcgagaaagggggaattaggaacgttgggtcgagcgttggcgtttttcgtggatagtggtggcgggaattgggtttgggggatttaggagacgacgggggacggatgggggtgggtgcgcgtttcggattggtttcggtcgtttgtttggttgttcggagcggaggtaggaatggcgggaatggtggcggttttcgagggatttggcgtaaggcggtttaagggtttgaggaggaggtcgcgggtcggtagagttgaggtttttgtgtttcgtatttagattttagttgtttcgattgtat

SEQ ID NO: 19110 - DNA, 1246 bp, Artificial Sequence
  chemically treated genomic DNA (Homo sapiens) CpG-island No: 19110
atacaatcgaaacaactaaaatctaaatacgaaacacaaaaacctcaactctaccgacccgcgacctcctcctcaaacccttaaaccgccttacgccaaatccctcgaaaaccgccaccattcccgccattcctacctccgctccgaacaaccaaacaaacgaccgaaaccaatccgaaacgcgcacccacccccatccgtcccccgtcgtctcctaaatcccccaaacccaattcccgccaccactatccacgaaaaacgccaacgctcgacccaacgttcctaattccccctttctcgacgcgtcccgaacgctcgaatatctctacccgcgcctcaccttcccgaaaaaccgatctccgcccgactcctccacctaaaaaatctccctcgccccgaaacccgacccgccacccctcaaaaaacgcctctacgcccccgatccatccctactaaaaaaactcgcgaaaattcatacgaacgcgcgaaaccgatctacgacgcataaacgaacgaacgaactaacgaacgaacgctccccgcccgctacctacgactccgcaccccgcgccgcgccgaccgccgcacttaccttccctccccgcctacccctacgcgccttccgatacaatttaaaacaactcgaaaaatcccgcacgcgacgccgcaactacgcctaaaacgtaactatacctaaacccttcacaaacaataccgacaaccgccgcgaaacaaaactcgaaccccgcgccgaaaaactaatctcgaaacgacgaaaaaaaaaccctaaaaaaaacaaaaccccaacctcccaatcctcccgaccccgcacccccgacgaccccacgccgcccgaccaccaaccccgaacccccgacaccccgcaccccgaacccgacacccaaaaccccgcacgccaaacctaacaccccgactaacctaccgctcgcacgccgactcccgctatctcgacgaccgctaaatctccgactccgaccgcgccgctcacgaacgccccctacaaacaactttaaaacccgcgctacccccgccccgccccgctacgcgaaaaaaccgaaaccgaaaaaaaacccgaaacatcgacccgcgaaacccgcaaacgatcctaaaaaaacgatcccgcaaatatccctatcaaaacgaaaccgcgacgaacctaaaccgcgccacatcccccgcctacgaccccccaacgcgctcctcccgaactcgcatccgtcccgcc

SEQ ID NO: 19111 - DNA, 1246 bp, Artificial Sequence
  chemically treated genomic DNA (Homo sapiens) CpG-island No: 19111
gtatagtcggggtaattaaagtttgagtgcgggatatagggattttagttttgtcggttcgcggttttttttttaagtttttgggtcgttttgcgttaaatttttcgagagtcgttattattttcgttatttttattttcgtttcgggtagttagatagacggtcggggttagttcgaggcgcgtatttatttttattcgtttttcgtcgttttttgggttttttaaatttagttttcgttattattgtttacggaagacgttagcgttcggtttagcgtttttgattttttttttttcggcgcgtttcgggcgttcgggtatttttgttcgcgttttattttttcggggaatcggttttcgttcggtttttttatttggggaatttttttcgtttcggggttcggttcgttattttttaggaagcgtttttgcgttttcggtttatttttgttggaggagttcgcgaaggtttatgcgagcgcgcggggtcggtttgcggcgtatggacggacggacggattgacggacggacgtttttcgttcgttatttgcggtttcgtatttcgcgtcgcgtcggtcgtcgtatttgtttttttttttcgtttatttttgcgcgtttttcggtgtagtttgggatagttcggagggtttcgtacgcggcgtcgtaattgcgtttgggacgtgattgtgtttgggttttttataggtagtgtcggtagtcgtcgcggggtaggattcggatttcgcgtcggggaattggtttcggggcggcgggaaaggaattttgaggggagtagaattttagttttttagttttttcggtttcgtattttcgacggttttacgtcgttcggttattagtttcggattttcggtatttcgtatttcggattcggtatttaggatttcgtacgttagatttagtatttcggttgatttgtcgttcgtacgtcggttttcgttgtttcggcggtcgttgggttttcggtttcggtcgcgtcgtttacgggcgttttttgtaggtagttttgagattcgcgttgttttcgtttcgtttcgttgcgcggagaaatcgaggtcggagggggattcgaggtatcggttcgcgaggttcgtaggcgattttggaaggacgatttcgtaggtgtttttgttaggacgaggtcgcgacgggtttggatcgcgttatatttttcgtttgcggttttttagcgcgtttttttcgggttcgtattcgtttcgtt

SEQ ID NO: 19112 - DNA, 1246 bp, Artificial Sequence
  chemically treated genomic DNA (Homo sapiens) CpG-island No: 19112
aacgaaacgaatacgaacccgaaaaaaacgcgctaaaaaaccgcaaacgaaaaatataacgcgatccaaacccgtcgcgacctcgtcctaacaaaaacacctacgaaatcgtccttccaaaatcgcctacgaacctcgcgaaccgatacctcgaatccccctccgacctcgatttctccgcgcaacgaaacgaaacgaaaacaacgcgaatctcaaaactacctacaaaaaacgcccgtaaacgacgcgaccgaaaccgaaaacccaacgaccgccgaaacaacgaaaaccgacgtacgaacgacaaatcaaccgaaatactaaatctaacgtacgaaatcctaaataccgaatccgaaatacgaaataccgaaaatccgaaactaataaccgaacgacgtaaaaccgtcgaaaatacgaaaccgaaaaaactaaaaaactaaaattctactcccctcaaaattcctttcccgccgccccgaaaccaattccccgacgcgaaatccgaatcctaccccgcgacgactaccgacactacctataaaaaacccaaacacaatcacgtcccaaacgcaattacgacgccgcgtacgaaaccctccgaactatcccaaactacaccgaaaaacgcgcaaaaataaacgaaaaaaaaaaacaaatacgacgaccgacgcgacgcgaaatacgaaaccgcaaataacgaacgaaaaacgtccgtccgtcaatccgtccgtccgtccatacgccgcaaaccgaccccgcgcgctcgcataaaccttcgcgaactcctccaacaaaaataaaccgaaaacgcaaaaacgcttcctaaaaaataacgaaccgaaccccgaaacgaaaaaaattccccaaataaaaaaaccgaacgaaaaccgattccccgaaaaaataaaacgcgaacaaaaatacccgaacgcccgaaacgcgccgaaaaaaaaaaaatcaaaaacgctaaaccgaacgctaacgtcttccgtaaacaataataacgaaaactaaatttaaaaaacccaaaaaacgacgaaaaacgaataaaaataaatacgcgcctcgaactaaccccgaccgtctatctaactacccgaaacgaaaataaaaataacgaaaataataacgactctcgaaaaatttaacgcaaaacgacccaaaaacttaaaaaaaaaaccgcgaaccgacaaaactaaaatccctatatcccgcactcaaactttaattaccccgactatac

SEQ ID NO: 19113 - DNA, 526 bp, Artificial Sequence
  chemically treated genomic DNA (Homo sapiens) CpG-island No: 19113
cgcgtcgaggatcgaaagtcgttttggggtcggcgttcgttttttcgtagttaggtttatatttaggcgtcgtcgtttcggtcgggtttggtcgcgggataacgttaggcgtgtagggcgagggcggcgcgggttttcgggaggatgaatgttttatggaattaggtggtttgatattcgaggaattcgtttagtttttttgggtcggttagggcgggtcgggggcggattcgggttgggtttcgcggtgggcggggcgtttatttgggcgtcggcgcgggcgcgggttcgggttggggttggggagtacgggtcggcgggagcgcgggcgcgaggggggcggaggggggtttttgggcggcgtagcgggtcggggcgcgttgtaggttaggtagtaggaggcgtttagttagcgtagtgtattcgcgtcgcgcgggtttagataaaggtggtgtatttttaaagaggcggcggtttttgtaggaggtcgaggggatggcggttcgggtcgtagtgggttaggttt

SEQ ID NO: 19114 - DNA, 526 bp, Artificial Sequence
  chemically treated genomic DNA (Homo sapiens) CpG-island No: 19114
aaacctaacccactacgacccgaaccgccatcccctcgacctcctacaaaaaccgccgcctctttaaaaatacaccacctttatctaaacccgcgcgacgcgaatacactacgctaactaaacgcctcctactacctaacctacaacgcgccccgacccgctacgccgcccaaaaacccccctccgcccccctcgcgcccgcgctcccgccgacccgtactccccaaccccaacccgaacccgcgcccgcgccgacgcccaaataaacgccccgcccaccgcgaaacccaacccgaatccgcccccgacccgccctaaccgacccaaaaaaactaaacgaattcctcgaatatcaaaccacctaattccataaaacattcatcctcccgaaaacccgcgccgccctcgccctacacgcctaacgttatcccgcgaccaaacccgaccgaaacgacgacgcctaaatataaacctaactacgaaaaaacgaacgccgaccccaaaacgactttcgatcctcgacgcg

SEQ ID NO: 19115 - DNA, 526 bp, Artificial Sequence
  chemically treated genomic DNA (Homo sapiens) CpG-island No: 19115
gggtttggtttattgcggttcgggtcgttattttttcggttttttgtaggggtcgtcgtttttttaggaatatattatttttgtttgggttcgcgcggcgcgggtgtattgcgttggttgagcgttttttgttgtttggtttgtagcgcgtttcggttcgttgcgtcgtttaagaattttttttcgtttttttcgcgttcgcgttttcgtcggttcgtgttttttagttttagttcgggttcgcgttcgcgtcggcgtttaggtgagcgtttcgtttatcgcgaggtttagttcgggttcgttttcggttcgttttggtcggtttaggggaattgggcggatttttcgagtgttaaattatttgattttataagatatttattttttcggaggttcgcgtcgttttcgttttgtacgtttagcgttgtttcgcggttaggttcggtcggagcggcggcgtttggatgtggatttggttgcggggagacgggcgtcggttttaaagcgattttcggttttcgacgcg

SEQ ID NO: 19116 - DNA, 526 bp, Artificial Sequence
  chemically treated genomic DNA (Homo sapiens) CpG-island No: 19116
cgcgtcgaaaaccgaaaatcgctttaaaaccgacgcccgtctccccgcaaccaaatccacatccaaacgccgccgctccgaccgaacctaaccgcgaaacaacgctaaacgtacaaaacgaaaacgacgcgaacctccgaaaaaataaatatcttataaaatcaaataatttaacactcgaaaaatccgcccaattcccctaaaccgaccaaaacgaaccgaaaacgaacccgaactaaacctcgcgataaacgaaacgctcacctaaacgccgacgcgaacgcgaacccgaactaaaactaaaaaacacgaaccgacgaaaacgcgaacgcgaaaaaaacgaaaaaaaattcttaaacgacgcaacgaaccgaaacgcgctacaaaccaaacaacaaaaaacgctcaaccaacgcaatacacccgcgccgcgcgaacccaaacaaaaataatatattcctaaaaaaacgacgacccctacaaaaaaccgaaaaaataacgacccgaaccgcaataaaccaaaccc

SEQ ID NO: 19117 - DNA, 616 bp, Artificial Sequence
  chemically treated genomic DNA (Homo sapiens) CpG-island No: 19117
tcgtttttatcgtttcggttttcgcgggttttttaggtattttcgttttttaatttcgcgtttttaagttcgttgatttttaatttttttcgggtttttagtttcggggtattacggtgaaggaggttgtagggcgtcggggtttattttatttttatcgtcgggttttcgggcgatttttggttttgtttcgagttcgcgttttcgatagcggtcgtcggtatttttgtttttcgaagtttcggcgtcggttgtcggagaagtcggcgcggaagttttagaggtcgtttagttgtttgcgttgttacgacgggttttttcggggatatagtatttcgttcggtagcgttaacgtgtagttatataatagtagtcggagagtcgtttaggttattgtcgttttttaggcgaggttttttttttttcgtttcggtcgtagtttacggggataagagttgcgcgggaggagtattgcggtaaggtcgcgtgacgcgtcggtagcgtgacgcgatttaggtcgttcgcgttatttttgttgagggcgattgttaggtttggaggggcggggcggcgtttgtggttggaattttgggttaggtttttagggaagcgggat

SEQ ID NO: 19118 - DNA, 616 bp, Artificial Sequence
  chemically treated genomic DNA (Homo sapiens) CpG-island No: 19118
atcccgcttccctaaaaacctaacccaaaattccaaccacaaacgccgccccgcccctccaaacctaacaatcgccctcaacaaaaataacgcgaacgacctaaatcgcgtcacgctaccgacgcgtcacgcgaccttaccgcaatactcctcccgcgcaactcttatccccgtaaactacgaccgaaacgaaaaaaaaaaaacctcgcctaaaaaacgacaataacctaaacgactctccgactactattatataactacacgttaacgctaccgaacgaaatactatatccccgaaaaaacccgtcgtaacaacgcaaacaactaaacgacctctaaaacttccgcgccgacttctccgacaaccgacgccgaaacttcgaaaaacaaaaataccgacgaccgctatcgaaaacgcgaactcgaaacaaaaccaaaaatcgcccgaaaacccgacgataaaaataaaataaaccccgacgccctacaacctccttcaccgtaataccccgaaactaaaaacccgaaaaaaattaaaaatcaacgaacttaaaaacgcgaaattaaaaaacgaaaatacctaaaaaacccgcgaaaaccgaaacgataaaaacga

SEQ ID NO: 19119 - DNA, 616 bp, Artificial Sequence
  chemically treated genomic DNA (Homo sapiens) CpG-island No: 19119
gtttcgtttttttaaaggtttagtttagggttttagttataggcgtcgtttcgtttttttaggtttggtaatcgtttttaataaagatggcgcggacgatttaagtcgcgttacgttatcggcgcgttacgcgattttgtcgtaatgtttttttcgcgtagtttttattttcgtagattgcggtcgagacggggagggggaagtttcgtttggggggcggtagtggtttgggcggtttttcggttgttgttgtatggttgtacgttggcgttatcggacgggatgttgtattttcgagagagttcgtcgtggtagcgtaagtagttggacggtttttgaagttttcgcgtcgattttttcgataatcgacgtcggggtttcgaggagtagaggtatcggcgatcgttgtcggaggcgcggattcggggtagggttaggagtcgttcggaagttcggcggtgggaatggggtaagtttcggcgttttgtagttttttttatcgtagtgtttcggagttgggggttcggaggaggttaaaggttaacgggtttgggggcgcgggattggagaacgggagtatttgggggattcgcgagggtcggagcggtggaggcgg

SEQ ID NO: 19120 - DNA, 616 bp, Artificial Sequence
  chemically treated genomic DNA (Homo sapiens) CpG-island No: 19120
ccgcctccaccgctccgaccctcgcgaatcccccaaatactcccgttctccaatcccgcgcccccaaacccgttaacctttaacctcctccgaacccccaactccgaaacactacgataaaaaaaactacaaaacgccgaaacttaccccattcccaccgccgaacttccgaacgactcctaaccctaccccgaatccgcgcctccgacaacgatcgccgatacctctactcctcgaaaccccgacgtcgattatcgaaaaaatcgacgcgaaaacttcaaaaaccgtccaactacttacgctaccacgacgaactctctcgaaaatacaacatcccgtccgataacgccaacgtacaaccatacaacaacaaccgaaaaaccgcccaaaccactaccgccccccaaacgaaacttccccctccccgtctcgaccgcaatctacgaaaataaaaactacgcgaaaaaaacattacgacaaaatcgcgtaacgcgccgataacgtaacgcgacttaaatcgtccgcgccatctttattaaaaacgattaccaaacctaaaaaaacgaaacgacgcctataactaaaaccctaaactaaacctttaaaaaaacgaaac

SEQ ID NO: 19121 - DNA, 1020 bp, Artificial Sequence
  chemically treated genomic DNA (Homo sapiens) CpG-island No: 19121
tagcgaagtttcggttgttttcgttttgcgggcgtatatttgtttttcgcgtcgggttgcgtcgggcgttcgcgtcgtttcggcgtgtgttcgcggttttttttcgttttcgttcgtagtttttcgatttcgatttcggatttttgggtttatagtttggttttttttcgagtcggagtcggagtcggagtcgaagtcgcggttgggttcggtcgtttcgttatagggggagggaatttatggggagggggaggggcggtgaggttagcggcggcggcgcgttcgcgggcggcgggagtttcgtatgcgcggagcgaggttcgtgagtggtagcggcggcgcgcggggggcgggcgaggggtcgagagtgggggagcgggcgggggtcgtcgaggaggcgttgtgtgggcgcgacggttgcgagttggggaggtttgtggtgcgggtcgtttcgggggattttcggcgcgggtttcgcgcgacggttacggtcgcgcggcgtgtgtggggggtttacgtatattcgtaaaattttttttttttttgtttcgggagagcgagcgagcgtgtgtgagagcgagtgtgaggagcgagtcgcggttcgacgtttagcgtcgtcgttggagtagttgttaaaatttcgtcgtcgttcgggtttcgcggttcgtttttttcgcgtcgggtttttttttttttttgttgcgggcggttcgggggaggggtcgcgggcggagatttcggaggtcggcgttttttacgtcgttcgttcgttcgtttttcgttcggtttttgcgcgcgtgcgtgttttgttcgttttatgttgtcgtttttttcggtatttgttgttgttttcggggtttcgggaaatgcgagagtttgagtcggggaggaggaattcgagtagcggcggcggcggtcgcggcggcgggagttttttaagaggaggatcgggatttatgtgttttttttggtgattaggatgtcgtcggaggagaataagtgcgtggagtagtcgtagtt

SEQ ID NO: 19122 - DNA, 1020 bp, Artificial Sequence
  chemically treated genomic DNA (Homo sapiens) CpG-island No: 19122
aactacgactactccacgcacttattctcctccgacgacatcctaatcaccaaaaaaaacacataaatcccgatcctcctcttaaaaaactcccgccgccgcgaccgccgccgccgctactcgaattcctcctccccgactcaaactctcgcatttcccgaaaccccgaaaacaacaacaaataccgaaaaaaacgacaacataaaacgaacaaaacacgcacgcgcgcaaaaaccgaacgaaaaacgaacgaacgaacgacgtaaaaaacgccgacctccgaaatctccgcccgcgacccctcccccgaaccgcccgcaacaaaaaaaaaaaaaaacccgacgcgaaaaaaacgaaccgcgaaacccgaacgacgacgaaattttaacaactactccaacgacgacgctaaacgtcgaaccgcgactcgctcctcacactcgctctcacacacgctcgctcgctctcccgaaacaaaaaaaaaaaaaattttacgaatatacgtaaaccccccacacacgccgcgcgaccgtaaccgtcgcgcgaaacccgcgccgaaaatcccccgaaacgacccgcaccacaaacctccccaactcgcaaccgtcgcgcccacacaacgcctcctcgacgacccccgcccgctcccccactctcgacccctcgcccgccccccgcgcgccgccgctaccactcacgaacctcgctccgcgcatacgaaactcccgccgcccgcgaacgcgccgccgccgctaacctcaccgcccctccccctccccataaattccctccccctataacgaaacgaccgaacccaaccgcgacttcgactccgactccgactccgactcgaaaaaaaaccaaactataaacccaaaaatccgaaatcgaaatcgaaaaactacgaacgaaaacgaaaaaaaaccgcgaacacacgccgaaacgacgcgaacgcccgacgcaacccgacgcgaaaaacaaatatacgcccgcaaaacgaaaacaaccgaaacttcgcta

SEQ ID NO: 19123 - DNA, 1020 bp, Artificial Sequence
  chemically treated genomic DNA (Homo sapiens) CpG-island No: 19123
ggttgcggttgttttacgtatttgttttttttcgacgatattttagttattaggaaagatatatggatttcggttttttttttggggggttttcgtcgtcgcggtcgtcgtcgtcgttgttcgggtttttttttttcggtttagattttcgtatttttcgaagtttcgggagtagtagtaggtatcgggagaggcggtaatatggagcgagtaggatacgtacgcgcgtaggggtcgggcggggagcgggcgggcgggcggcgtgaggggcgtcggttttcggggttttcgttcgcggtttttttttcgggtcgttcgtagtaggaagagaaaggggttcggcgcggggagggcgggtcgcggggttcgggcggcggcgaagttttgatagttgttttagcggcggcgttgggcgtcgggtcgcggttcgttttttatattcgtttttatatacgttcgttcgttttttcggagtaggggaggaggaagttttgcgggtgtgcgtggattttttatatacgtcgcgcgatcgtggtcgtcgcgcgaggttcgcgtcggggatttttcggggcgattcgtattatagatttttttaattcgtagtcgtcgcgtttatataacgttttttcgacggttttcgttcgtttttttattttcggtttttcgttcgtttttcgcgcgtcgtcgttgttatttacgggtttcgtttcgcgtatgcgaagttttcgtcgttcgcggacgcgtcgtcgtcgttgattttatcgtttttttttttttttatgggttttttttttttgtgacggggcggtcgggtttagtcgcgatttcggtttcggtttcggtttcggttcgggagggagttaagttgtggatttagagattcgggatcgggatcgggggattgcgggcgagggcgggagggagtcgcggatatacgtcgaggcggcgcgggcgttcggcgtagttcggcgcgaggagtaagtgtgcgttcgtagggcgagggtagtcggggtttcgttg

SEQ ID NO: 19124 - DNA, 1020 bp, Artificial Sequence
  chemically treated genomic DNA (Homo sapiens) CpG-island No: 19124
caacgaaaccccgactaccctcgccctacgaacgcacacttactcctcgcgccgaactacgccgaacgcccgcgccgcctcgacgtatatccgcgactccctcccgccctcgcccgcaatcccccgatcccgatcccgaatctctaaatccacaacttaactccctcccgaaccgaaaccgaaaccgaaaccgaaatcgcgactaaacccgaccgccccgtcacaaaaaaaaaaaacccataaaaaaaaaaaaaaacgataaaatcaacgacgacgacgcgtccgcgaacgacgaaaacttcgcatacgcgaaacgaaacccgtaaataacaacgacgacgcgcgaaaaacgaacgaaaaaccgaaaataaaaaaacgaacgaaaaccgtcgaaaaaacgttatataaacgcgacgactacgaattaaaaaaatctataatacgaatcgccccgaaaaatccccgacgcgaacctcgcgcgacgaccacgatcgcgcgacgtatataaaaaatccacgcacacccgcaaaacttcctcctcccctactccgaaaaaacgaacgaacgtatataaaaacgaatataaaaaacgaaccgcgacccgacgcccaacgccgccgctaaaacaactatcaaaacttcgccgccgcccgaaccccgcgacccgccctccccgcgccgaacccctttctcttcctactacgaacgacccgaaaaaaaaaccgcgaacgaaaaccccgaaaaccgacgcccctcacgccgcccgcccgcccgctccccgcccgacccctacgcgcgtacgtatcctactcgctccatattaccgcctctcccgatacctactactactcccgaaacttcgaaaaatacgaaaatctaaaccgaaaaaaaaaaacccgaacaacgacgacgacgaccgcgacgacgaaaaccccccaaaaaaaaaaccgaaatccatatatctttcctaataactaaaatatcgtcgaaaaaaaacaaatacgtaaaacaaccgcaacc

SEQ ID NO: 19125 - DNA, 806 bp, Artificial Sequence
  chemically treated genomic DNA (Homo sapiens) CpG-island No: 19125
gcgcgtgtcggggttcgcggtgaggtttagttttttcggcggttttttagacgcgttttttgttcggtcggtgtggatcgtttcggttattgtttacgggggatgttcgtttagacgtattgttttggtcgtttttaatttgtttcggtttttttcggggtatcgcgggggattttatatcgacgtttttttttcgttcgcgttttaagggttgattgggtaaattggtagattcgtttcgcggggcgatttaatttttcggaatagttttttatcgtttatttttgtagattttcggattttcgttttcggcggagatttagggaatttcgtattttaagtttttttaaatcgtgcggtttgagtgtgacggttaagagcggatgtagttcgggatcgttcgtattttttcgtgggcggaagcgtaggagtcggttggggagggggcgttttagagaagcggttagaaagttgagacggggaattgaggttattttgggggggataagataatgagagtcgggcgttttgggggcggcgcgggagttttcgtaggattaggcgggcgttttttttatttgcggtttcggcgtttcggtcgttttttcgcgcggcggcggtcgggattgagttgatattatttagtcggcggggtttgaatgaggaggagcgggcgcggaggggagggggcggggagggagggagggaggcgtcgcggagtttttttcggttttttgtgttattcgtcgaggcgttttgagtataaatttagatagtgtagtttttgttgtgtttgtgttgattaa

SEQ ID NO: 19126 - DNA, 806 bp, Artificial Sequence
  chemically treated genomic DNA (Homo sapiens) CpG-island No: 19126
ttaatcaacacaaacacaacaaaaactacactatctaaatttatactcaaaacgcctcgacgaataacacaaaaaaccgaaaaaaactccgcgacgcctccctccctccctccccgccccctcccctccgcgcccgctcctcctcattcaaaccccgccgactaaataatatcaactcaatcccgaccgccgccgcgcgaaaaaacgaccgaaacgccgaaaccgcaaataaaaaaaacgcccgcctaatcctacgaaaactcccgcgccgcccccaaaacgcccgactctcattatcttatcccccccaaaataacctcaattccccgtctcaactttctaaccgcttctctaaaacgccccctccccaaccgactcctacgcttccgcccacgaaaaaatacgaacgatcccgaactacatccgctcttaaccgtcacactcaaaccgcacgatttaaaaaaacttaaaatacgaaattccctaaatctccgccgaaaacgaaaatccgaaaatctacaaaaataaacgataaaaaactattccgaaaaattaaatcgccccgcgaaacgaatctaccaatttacccaatcaacccttaaaacgcgaacgaaaaaaaaacgtcgatataaaatcccccgcgataccccgaaaaaaaccgaaacaaattaaaaacgaccaaaacaatacgtctaaacgaacatcccccgtaaacaataaccgaaacgatccacaccgaccgaacaaaaaacgcgtctaaaaaaccgccgaaaaaactaaacctcaccgcgaaccccgacacgcgc

SEQ ID NO: 19127 - DNA, 806 bp, Artificial Sequence
  chemically treated genomic DNA (Homo sapiens) CpG-island No: 19127
ttgattagtataagtataataaaaattgtattatttggatttatatttaaggcgtttcggcggatggtataaaaggtcgagagaaatttcgcgacgttttttttttttttttttcgttttttttttttcgcgttcgtttttttttatttaaatttcgtcggttgagtggtgttagtttagtttcggtcgtcgtcgcgcgaggaaacggtcgaggcgtcggagtcgtaggtaaagggggcgttcgtttggttttgcggaggttttcgcgtcgtttttaaggcgttcggtttttattgttttgttttttttaggatgattttagtttttcgttttagttttttagtcgtttttttagggcgttttttttttagtcggtttttgcgttttcgtttacgggaaggtgcgggcgatttcgggttgtattcgtttttggtcgttatatttaggtcgtacgatttagaagggtttgggatgcggggttttttgaattttcgtcgggagcgggggttcggggatttgtaggggtgggcggtggggggttgtttcgaaaagttgggtcgtttcgcggggcggatttgttaatttgtttagttagtttttggggcgcgggcggaggggggacgtcggtgtagggtttttcgcgatgtttcggaaagggtcggggtaagttggaaacggttaaaataatgcgtttggacgggtatttttcgtaaataatggtcgggacggtttatatcggtcgggtagagggcgcgtttaagggatcgtcggaggggttgggttttatcgcggatttcgatacgcgt

SEQ ID NO: 19128 - DNA, 806 bp, Artificial Sequence
  chemically treated genomic DNA (Homo sapiens) CpG-island No: 19128
acgcgtatcgaaatccgcgataaaacccaacccctccgacgatcccttaaacgcgccctctacccgaccgatataaaccgtcccgaccattatttacgaaaaatacccgtccaaacgcattattttaaccgtttccaacttaccccgaccctttccgaaacatcgcgaaaaaccctacaccgacgtcccccctccgcccgcgccccaaaaactaactaaacaaattaacaaatccgccccgcgaaacgacccaacttttcgaaacaaccccccaccgcccacccctacaaatccccgaacccccgctcccgacgaaaattcaaaaaaccccgcatcccaaacccttctaaatcgtacgacctaaatataacgaccaaaaacgaatacaacccgaaatcgcccgcaccttcccgtaaacgaaaacgcaaaaaccgactaaaaaaaaaacgccctaaaaaaacgactaaaaaactaaaacgaaaaactaaaatcatcctaaaaaaaacaaaacaataaaaaccgaacgccttaaaaacgacgcgaaaacctccgcaaaaccaaacgaacgccccctttacctacgactccgacgcctcgaccgtttcctcgcgcgacgacgaccgaaactaaactaacaccactcaaccgacgaaatttaaataaaaaaaaacgaacgcgaaaaaaaaaaaacgaaaaaaaaaaaaaaaaaacgtcgcgaaatttctctcgaccttttataccatccgccgaaacgccttaaatataaatccaaataatacaatttttattatacttatactaatcaa

SEQ ID NO: 19129 - DNA, 579 bp, Artificial Sequence
  chemically treated genomic DNA (Homo sapiens) CpG-island No: 19129
tcgggtcgcggttgttaggagagtttagaataaaaggcggcggggggcggggtcgaggcgggtcgggggtggggcggaagttataaggggcggcggttcggagcggtttagtaagtttagtagtttcggggcggatggtttcggtcgtttggtttcgtagcgcggtcgcgcgcgtttttttgttttcgatgttgttgttgttgttttagtcgtcgtcgttgttggttcgggttttgtcgtcggtgagtgttcgttattcgtcggtcgtttttcgttgagggggcgtcgggtacgcgggttgggtttagcggcggattcggatcgaagggggcgtttcgggtggtttttagcgttcggtattcgaaacgttttttggttttttttaggcgtgatagatagcgagtttgtagtttttgggggtgtgaaggggagtcggcgtcggtatcgttcgggttggtgggacgggattttacgttggatttacgtttgtttttagcgtggggatttgtttttcgcgttttagtcgcgggtgttggagtgtgcgttgaaggaagtagtagagggagtggtaatagggtt

SEQ ID NO: 19130 - DNA, 579 bp, Artificial Sequence
  chemically treated genomic DNA (Homo sapiens) CpG-island No: 19130
aaccctattaccactccctctactacttccttcaacgcacactccaacacccgcgactaaaacgcgaaaaacaaatccccacgctaaaaacaaacgtaaatccaacgtaaaatcccgtcccaccaacccgaacgataccgacgccgactccccttcacacccccaaaaactacaaactcgctatctatcacgcctaaaaaaaaccaaaaaacgtttcgaataccgaacgctaaaaaccacccgaaacgcccccttcgatccgaatccgccgctaaacccaacccgcgtacccgacgccccctcaacgaaaaacgaccgacgaataacgaacactcaccgacgacaaaacccgaaccaacaacgacgacgactaaaacaacaacaacaacatcgaaaacaaaaaaacgcgcgcgaccgcgctacgaaaccaaacgaccgaaaccatccgccccgaaactactaaacttactaaaccgctccgaaccgccgccccttataacttccgccccacccccgacccgcctcgaccccgccccccgccgccttttattctaaactctcctaacaaccgcgacccga

SEQ ID NO: 19131 - DNA, 579 bp, Artificial Sequence
  chemically treated genomic DNA (Homo sapiens) CpG-island No: 19131
ggttttgttattattttttttgttgttttttttaacgtatattttagtattcgcggttggagcgcgagaggtaggtttttacgttgggagtaagcgtgagtttagcgtggagtttcgttttattagttcgaacgatgtcggcgtcggtttttttttatatttttagggattgtaagttcgttgtttattacgtttagagggaattagaaagcgtttcgggtatcgggcgttggaggttattcggggcgtttttttcggttcggattcgtcgttgggtttagttcgcgtgttcggcgtttttttagcgaggagcggtcggcgagtggcgggtatttatcggcggtagagttcgggttagtagcggcggcggttggagtagtagtagtagtatcgggggtaggagggcgcgcgcggtcgcgttgcggagttaggcggtcggagttattcgtttcggggttgttgggtttgttgggtcgtttcgggtcgtcgttttttatagttttcgttttattttcggttcgtttcggtttcgtttttcgtcgttttttgttttgaatttttttagtagtcgcggttcgg

SEQ ID NO: 19132 - DNA, 579 bp, Artificial Sequence
  chemically treated genomic DNA (Homo sapiens) CpG-island No: 19132
ccgaaccgcgactactaaaaaaattcaaaacaaaaaacgacgaaaaacgaaaccgaaacgaaccgaaaataaaacgaaaactataaaaaacgacgacccgaaacgacccaacaaacccaacaaccccgaaacgaataactccgaccgcctaactccgcaacgcgaccgcgcgcgccctcctacccccgatactactactactactccaaccgccgccgctactaacccgaactctaccgccgataaatacccgccactcgccgaccgctcctcgctaaaaaaacgccgaacacgcgaactaaacccaacgacgaatccgaaccgaaaaaaacgccccgaataacctccaacgcccgatacccgaaacgctttctaattccctctaaacgtaataaacaacgaacttacaatccctaaaaatataaaaaaaaaccgacgccgacatcgttcgaactaataaaacgaaactccacgctaaactcacgcttactcccaacgtaaaaacctacctctcgcgctccaaccgcgaatactaaaatatacgttaaaaaaaacaacaaaaaaaataataacaaaacc

SEQ ID NO: 19133 - DNA, 728 bp, Artificial Sequence
  chemically treated genomic DNA (Homo sapiens) CpG-island No: 19133
gttcgcggaggcgcgttcggttttttgtttgagcggcggcgcgcgcgttagcgttaacgttagcgtttgcgtattgagggcggtttggtcgtcgtttgcggcggcggcggcggttgaggagttcggttgaggcgttagtattcggttcggttcgtatttcgtttttcggtttcggtttttttcggtttagtacgtttcggtttcgttttagtttttttgatttttcgtagttcggtttcggtcgttcgtttttgtcgtcgtaatgatgatgatggcgttgagtaagattttcgggtagaagttcgtgaagttttagttggaggacgacggcgagttttatatgatcggtttcgaggtagttcggggcgcgttttcgtttttttcgggttcggtttcgcgggagtttcggggcgggtttatgcgtcgagagcgcgcgtttttatttatcggggcgggcgggcgcgcgcgcgcgcgttcggggttgtggggcgtggtttagtgggcgtgtcgggtgtggttttcgtttttttatcgatttgggatttttttatttatttcgtcgaggttcgtcgtttttagtgttgttaagattttggcgtcgcgaggggttttagtggtttcgcgttgggttggtttttagttagacgtaaagaaacgggatattgagttagtttttgcgacgtttgggggattgtattgttgtttttgattttttttagatgtcgtaa

SEQ ID NO: 19134 - DNA, 728 bp, Artificial Sequence
  chemically treated genomic DNA (Homo sapiens) CpG-island No: 19134
ttacgacatctaaaaaaaatcaaaaacaacaatacaatcccccaaacgtcgcaaaaactaactcaatatcccgtttctttacgtctaactaaaaaccaacccaacgcgaaaccactaaaacccctcgcgacgccaaaatcttaacaacactaaaaacgacgaacctcgacgaaataaataaaaaaatcccaaatcgataaaaaaacgaaaaccacacccgacacgcccactaaaccacgccccacaaccccgaacgcgcgcgcgcgcgcccgcccgccccgataaataaaaacgcgcgctctcgacgcataaacccgccccgaaactcccgcgaaaccgaacccgaaaaaaacgaaaacgcgccccgaactacctcgaaaccgatcatataaaactcgccgtcgtcctccaactaaaacttcacgaacttctacccgaaaatcttactcaacgccatcatcatcattacgacgacaaaaacgaacgaccgaaaccgaactacgaaaaatcaaaaaaactaaaacgaaaccgaaacgtactaaaccgaaaaaaaccgaaaccgaaaaacgaaatacgaaccgaaccgaatactaacgcctcaaccgaactcctcaaccgccgccgccgccgcaaacgacgaccaaaccgccctcaatacgcaaacgctaacgttaacgctaacgcgcgcgccgccgctcaaacaaaaaaccgaacgcgcctccgcgaac

SEQ ID NO: 19135 - DNA, 728 bp, Artificial Sequence
  chemically treated genomic DNA (Homo sapiens) CpG-island No: 19135
ttacgatatttaaaaagggttaaaggtagtagtgtagttttttaagcgtcgtaggggttaatttaatatttcgtttttttgcgtttgattggaaattaatttagcgcggaattattggggtttttcgcggcgttaaaattttggtagtattgaaggcggcggatttcggcgaaataagtaaggaaattttaggtcgatgagggggcgggggttatattcgatacgtttattaggttacgttttatagtttcgagcgcgcgcgcgcgcgttcgttcgtttcgatgaatggagacgcgcgttttcggcgtatgggttcgtttcggggttttcgcggggtcgagttcggggagggcgagaacgcgtttcgggttatttcggagtcgattatgtagaattcgtcgtcgttttttagttggaattttacgggtttttgttcgaaggttttgtttagcgttattattattattgcggcggtagaggcgggcggtcggagtcgggttgcgagggattaggagggttggggcggggtcggggcgtgttgggtcgagggaaatcgaagtcggaaggcgaaatgcggatcgggtcgggtattggcgttttagtcgggttttttagtcgtcgtcgtcgtcgtagacgacgattaggtcgtttttagtgcgtaggcgttggcgttgacgttgacgcgcgcgtcgtcgtttaaataaaaggtcgggcgcgttttcgcggat

SEQ ID NO: 19136 - DNA, 728 bp, Artificial Sequence
  chemically treated genomic DNA (Homo sapiens) CpG-island No: 19136
atccgcgaaaacgcgcccgaccttttatttaaacgacgacgcgcgcgtcaacgtcaacgccaacgcctacgcactaaaaacgacctaatcgtcgtctacgacgacgacgacgactaaaaaacccgactaaaacgccaatacccgacccgatccgcatttcgccttccgacttcgatttccctcgacccaacacgccccgaccccgccccaaccctcctaatccctcgcaacccgactccgaccgcccgcctctaccgccgcaataataataataacgctaaacaaaaccttcgaacaaaaacccgtaaaattccaactaaaaaacgacgacgaattctacataatcgactccgaaataacccgaaacgcgttctcgccctccccgaactcgaccccgcgaaaaccccgaaacgaacccatacgccgaaaacgcgcgtctccattcatcgaaacgaacgaacgcgcgcgcgcgcgctcgaaactataaaacgtaacctaataaacgtatcgaatataacccccgccccctcatcgacctaaaatttccttacttatttcgccgaaatccgccgccttcaatactaccaaaattttaacgccgcgaaaaaccccaataattccgcgctaaattaatttccaatcaaacgcaaaaaaacgaaatattaaattaacccctacgacgcttaaaaaactacactactacctttaaccctttttaaatatcgtaa

SEQ ID NO: 19137 - DNA, 544 bp, Artificial Sequence
  chemically treated genomic DNA (Homo sapiens) CpG-island No: 19137
ttggagtcgtttttacggtttcggacgtaggtgagtttttagcggcggcgataaatttcgcggcggtgattttaaatttttttttcgcggcggcgatttttttttaatacgttggggcgaattttttagtatttttagttttttttaaaaacgttgagttcgcgtatgcgttttaggcgtttttcgcgatattttagcggttttgcgttttattgcgtttgagtttgagttttaggttttagtttcggttatcgtttagcgttgcgcgaatttttagttggtgcggtcgtttttaatatttattgcgtttgcgttatagtttcgtttcgacgggtttgttttttttaaacgtttattgcgcgtgcgttagcgttttttttattattgggcgttgcgcgttgttttttttttcgcgtataggttgtcggtttatcgtttgttaatggtagtcggggtttttttgggatagtaagattttcgtttaggtttttttttcgaatgttttacgtttttttgcgatttagaatggtatgaatttttatat

SEQ ID NO: 19138 - DNA, 544 bp, Artificial Sequence
  chemically treated genomic DNA (Homo sapiens) CpG-island No: 19138
atataaaaattcataccattctaaatcgcaaaaaaacgtaaaacattcgaaaaaaaaacctaaacgaaaatcttactatcccaaaaaaaccccgactaccattaacaaacgataaaccgacaacctatacgcgaaaaaaaaaacaacgcgcaacgcccaataataaaaaaaacgctaacgcacgcgcaataaacgtttaaaaaaaacaaacccgtcgaaacgaaactataacgcaaacgcaataaatattaaaaacgaccgcaccaactaaaaattcgcgcaacgctaaacgataaccgaaactaaaacctaaaactcaaactcaaacgcaataaaacgcaaaaccgctaaaatatcgcgaaaaacgcctaaaacgcatacgcgaactcaacgtttttaaaaaaaactaaaaatactaaaaaattcgccccaacgtattaaaaaaaaatcgccgccgcgaaaaaaaaatttaaaatcaccgccgcgaaatttatcgccgccgctaaaaactcacctacgtccgaaaccgtaaaaacgactccaa

SEQ ID NO: 19139 - DNA, 544 bp, Artificial Sequence
  chemically treated genomic DNA (Homo sapiens) CpG-island No: 19139
gtatgagaatttatattattttagatcgtaggagggcgtggagtattcgaaagaggggtttgagcggaggttttgttgttttagggagatttcggttgttattagtaagcggtgagtcggtagtttgtgcgcggagggaagggtagcgcgtagcgtttagtggtgaaagaggcgttagcgtacgcgtagtgagcgtttgagaggagtaaattcgtcgagacgaagttgtagcgtaagcgtagtgggtattgagagcggtcgtattagttgagggttcgcgtaacgttaaacgatggtcgggattaaggtttgagatttaagtttaggcgtagtgaagcgtagagtcgttagagtgtcgcggagggcgtttgaggcgtatgcgcggatttagcgtttttaagaagggttgggggtgttggggagttcgttttagcgtgttgggggggagtcgtcgtcgcggggggggggtttggggttatcgtcgcggggtttgtcgtcgtcgttgggagtttatttgcgttcgaggtcgtaaggacggttttag

SEQ ID NO: 19140 - DNA, 544 bp, Artificial Sequence
  chemically treated genomic DNA (Homo sapiens) CpG-island No: 19140
ctaaaaccgtccttacgacctcgaacgcaaataaactcccaacgacgacgacaaaccccgcgacgataaccccaaaccccccccccgcgacgacgactcccccccaacacgctaaaacgaactccccaacacccccaacccttcttaaaaacgctaaatccgcgcatacgcctcaaacgccctccgcgacactctaacgactctacgcttcactacgcctaaacttaaatctcaaaccttaatcccgaccatcgtttaacgttacgcgaaccctcaactaatacgaccgctctcaatacccactacgcttacgctacaacttcgtctcgacgaatttactcctctcaaacgctcactacgcgtacgctaacgcctctttcaccactaaacgctacgcgctacccttccctccgcgcacaaactaccgactcaccgcttactaataacaaccgaaatctccctaaaacaacaaaacctccgctcaaacccctctttcgaatactccacgccctcctacgatctaaaataatataaattctcatac

SEQ ID NO: 19141 - DNA, 583 bp, Artificial Sequence
  chemically treated genomic DNA (Homo sapiens) CpG-island No: 19141
tggggggcggggcggggggaggacggtggttcgggttcgaagtggacgttcggggttcgacgaggtcgttggggcgggttgatcgcgtttttttttcgtagtatatcgcggtgtacgtggtttcggattagtttatggttttcggcggttttagcgagtcgtgcgcgttttgtagtttgtatagtatcggtaagatcggcggcgcgtagaatcgtttttatagtaagttgttgtgcggtttgttggtcgagcgtttgcgtattagttcggataggtacgcggagtcgcggaggggcgggggaggggcggcggcgcgcggttaggttcgggattgagttattcgttgagttcggtttttttttttcgtagggtttatattaattattacgatatgaacgcggttaatgtgggttggaataattttattttcgtttaagagtcgtagggatttacgttgtttgcgttggttttattcgggaattcgtcgtacgttgtgttttaggttcgtttattttaattttttggtggggagaaataaacggtttagagattaggagtgtttcggggttttttggtttgcggg

SEQ ID NO: 19142 - DNA, 583 bp, Artificial Sequence
  chemically treated genomic DNA (Homo sapiens) CpG-island No: 19142
cccgcaaaccaaaaaaccccgaaacactcctaatctctaaaccgtttatttctccccaccaaaaaattaaaataaacgaacctaaaacacaacgtacgacgaattcccgaataaaaccaacgcaaacaacgtaaatccctacgactcttaaacgaaaataaaattattccaacccacattaaccgcgttcatatcgtaataattaatataaaccctacgaaaaaaaaaaaccgaactcaacgaataactcaatcccgaacctaaccgcgcgccgccgcccctcccccgcccctccgcgactccgcgtacctatccgaactaatacgcaaacgctcgaccaacaaaccgcacaacaacttactataaaaacgattctacgcgccgccgatcttaccgatactatacaaactacaaaacgcgcacgactcgctaaaaccgccgaaaaccataaactaatccgaaaccacgtacaccgcgatatactacgaaaaaaaaacgcgatcaacccgccccaacgacctcgtcgaaccccgaacgtccacttcgaacccgaaccaccgtcctccccccgccccgcccccca

SEQ ID NO: 19143 - DNA, 583 bp, Artificial Sequence
  chemically treated genomic DNA (Homo sapiens) CpG-island No: 19143
ttcgtaagttaaggaatttcgaggtatttttagtttttaaatcgtttatttttttttattagaaggttggggtgggcgggtttagaatatagcgtgcggcgggttttcgggtggagttagcgtagatagcgtgggtttttgcggtttttaggcgaaggtggagttgttttagtttatattggtcgcgtttatgtcgtaatagttgatgtagattttgcggggggaggaggtcggatttagcgggtggtttagtttcgggtttggtcgcgcgtcgtcgtttttttttcgttttttcgcgatttcgcgtatttgttcgggttgatgcgtaggcgttcggttagtaggtcgtatagtagtttgttgtaggagcggttttgcgcgtcgtcgattttgtcgatgttgtgtaggttgtagagcgcgtacggttcgttggagtcgtcgaaggttatgagttggttcgggattacgtgtatcgcgatgtattgcgaggaaagggcgcggttagttcgttttagcgatttcgtcgggtttcgaacgtttatttcgggttcgagttatcgtttttttttcgtttcgtttttta

SEQ ID NO: 19144 - DNA, 583 bp, Artificial Sequence
  chemically treated genomic DNA (Homo sapiens) CpG-island No: 19144
taaaaaacgaaacgaaaaaaaaacgataactcgaacccgaaataaacgttcgaaacccgacgaaatcgctaaaacgaactaaccgcgccctttcctcgcaatacatcgcgatacacgtaatcccgaaccaactcataaccttcgacgactccaacgaaccgtacgcgctctacaacctacacaacatcgacaaaatcgacgacgcgcaaaaccgctcctacaacaaactactatacgacctactaaccgaacgcctacgcatcaacccgaacaaatacgcgaaatcgcgaaaaaacgaaaaaaaaacgacgacgcgcgaccaaacccgaaactaaaccacccgctaaatccgacctcctccccccgcaaaatctacatcaactattacgacataaacgcgaccaatataaactaaaacaactccaccttcgcctaaaaaccgcaaaaacccacgctatctacgctaactccacccgaaaacccgccgcacgctatattctaaacccgcccaccccaaccttctaataaaaaaaaataaacgatttaaaaactaaaaatacctcgaaattccttaacttacgaa

SEQ ID NO: 19145 - DNA, 1028 bp, Artificial Sequence
  chemically treated genomic DNA (Homo sapiens) CpG-island No: 19145
tcgcggtttttttattttcgtcgtttgcggttttcgtttcggggtagtagtttgtattaggttgaagggagaggtggaacggattcgtttatttacgtatttcgaggaggggtgtgtgaggagttacgttttagagaacggtaagaaatttcggttaggaaatacgggattataggagaattcgaggcgaaggtgcggcgtcggtgtaggagcggaggggcggatttatagtagttcggcgagcgcgtaggtgtgttcgcggtcgcgttatttttttcgtagtttttacgggatggagtcggcgggagagggcggggttaggcgcgcggcggtcgtttttgttgcggtcggaaataatagtggaggaattcgagtcgtacggaacggcggtggtggttcgcggagtcggacggtaaagatttcgtagttttgtttttattttatttgagtttcgatttttagttttatcgtttcgtttttttcgagtttcgagtttcgtggtttttcgcgttgttgcgcgttaggcgtttcgacggatagatcgacggaaagacggatttgggttcgcgattttttgggggcggtcgcgcgtttttaacgtcgaaggtcgggttaggattcggtttttcgagacgttgaggttgggcggatcggtcgtcgtggttttcggacgtttttttttttttgggaggaatttcggagcgatgggacgaggttttttcgttcgtcgggttttaggatgtcgcggtttttttagtttcggtttgggttttttcggcggtgttcggtcggtatcgtgaagtcgtcgttcggttttcggtgtagttgtttcggatacggcgggacgtttttttcgggtattcggtatttacgtgtattttgttgtcgtcgattttcgttcgatgcgaagttcgtaatttcgagttcgcgaggcgtatttgaggtttttttaatgaagttagtaaagtagtgtttcgtgtaggtcgttttttttgttttttatagcgttaattaggttgatagaattt

SEQ ID NO: 19146 - DNA, 1028 bp, Artificial Sequence
  chemically treated genomic DNA (Homo sapiens) CpG-island No: 19146
aaattctatcaacctaattaacgctataaaaaacaaaaaaaacgacctacacgaaacactactttactaacttcattaaaaaaacctcaaatacgcctcgcgaactcgaaattacgaacttcgcatcgaacgaaaatcgacgacaacaaaatacacgtaaataccgaatacccgaaaaaaacgtcccgccgtatccgaaacaactacaccgaaaaccgaacgacgacttcacgataccgaccgaacaccgccgaaaaaacccaaaccgaaactaaaaaaaccgcgacatcctaaaacccgacgaacgaaaaaacctcgtcccatcgctccgaaattcctcccaaaaaaaaaaaaacgtccgaaaaccacgacgaccgatccgcccaacctcaacgtctcgaaaaaccgaatcctaacccgaccttcgacgttaaaaacgcgcgaccgcccccaaaaaatcgcgaacccaaatccgtctttccgtcgatctatccgtcgaaacgcctaacgcgcaacaacgcgaaaaaccacgaaactcgaaactcgaaaaaaacgaaacgataaaactaaaaatcgaaactcaaataaaataaaaacaaaactacgaaatctttaccgtccgactccgcgaaccaccaccgccgttccgtacgactcgaattcctccactattatttccgaccgcaacaaaaacgaccgccgcgcgcctaaccccgccctctcccgccgactccatcccgtaaaaactacgaaaaaaataacgcgaccgcgaacacacctacgcgctcgccgaactactataaatccgcccctccgctcctacaccgacgccgcaccttcgcctcgaattctcctataatcccgtatttcctaaccgaaatttcttaccgttctctaaaacgtaactcctcacacacccctcctcgaaatacgtaaataaacgaatccgttccacctctcccttcaacctaatacaaactactaccccgaaacgaaaaccgcaaacgacgaaaataaaaaaaccgcga

SEQ ID NO: 19147 - DNA, 1028 bp, Artificial Sequence
  chemically treated genomic DNA (Homo sapiens) CpG-island No: 19147
aggttttgttaatttagttaacgttgtgagaaataggaaaaacgatttgtacgggatattgttttgttaattttattgggggaattttagatgcgtttcgcgaattcggagttgcgaatttcgtatcgaacggagatcggcggtagtaaaatgtacgtgggtatcgaatattcggggagggcgtttcgtcgtgttcggggtaattatatcgaaggtcgagcggcggttttacggtatcggtcgggtatcgtcggaggggtttaagtcggagttgggagagtcgcggtattttggagttcggcgggcgggagagtttcgttttatcgtttcgggattttttttagagggaagaaagcgttcgagggttacggcggtcggttcgtttagttttagcgtttcggggagtcgggttttggttcggttttcggcgttgggggcgcgcggtcgtttttagggagtcgcggatttaagttcgttttttcgtcggtttgttcgtcggggcgtttggcgcgtagtagcgcgaggggttacggggttcggaattcgaaggaggcggaacgatgggattgggggtcggggtttaggtgggatgggagtagggttgcggggtttttatcgttcggtttcgcgggttattatcgtcgtttcgtgcggttcgggtttttttattattgttttcggtcgtagtagaggcggtcgtcgcgcgtttggtttcgttttttttcgtcggttttatttcgtaaaggttgcggggagggtggcgcggtcgcgggtatatttgcgcgttcgtcgggttgttgtgggttcgttttttcgtttttgtatcgacgtcgtattttcgtttcgagtttttttgtgatttcgtgttttttggtcggagttttttatcgttttttggaacgtagttttttatatattttttttcgaggtgcgtagatagacgaattcgttttatttttttttttagtttagtgtaaattattgtttcggggcgggggtcgtaggcggcgggggtaggaaagtcgcgg

SEQ ID NO: 19148 - DNA, 1028 bp, Artificial Sequence
  chemically treated genomic DNA (Homo sapiens) CpG-island No: 19148
ccgcgactttcctacccccgccgcctacgacccccgccccgaaacaataatttacactaaactaaaaaaaaaaataaaacgaattcgtctatctacgcacctcgaaaaaaaatatataaaaaactacgttccaaaaaacgataaaaaactccgaccaaaaaacacgaaatcacaaaaaaactcgaaacgaaaatacgacgtcgatacaaaaacgaaaaaacgaacccacaacaacccgacgaacgcgcaaatatacccgcgaccgcgccaccctccccgcaacctttacgaaataaaaccgacgaaaaaaaacgaaaccaaacgcgcgacgaccgcctctactacgaccgaaaacaataataaaaaaacccgaaccgcacgaaacgacgataataacccgcgaaaccgaacgataaaaaccccgcaaccctactcccatcccacctaaaccccgacccccaatcccatcgttccgcctccttcgaattccgaaccccgtaacccctcgcgctactacgcgccaaacgccccgacgaacaaaccgacgaaaaaacgaacttaaatccgcgactccctaaaaacgaccgcgcgcccccaacgccgaaaaccgaaccaaaacccgactccccgaaacgctaaaactaaacgaaccgaccgccgtaaccctcgaacgctttcttccctctaaaaaaaatcccgaaacgataaaacgaaactctcccgcccgccgaactccaaaataccgcgactctcccaactccgacttaaacccctccgacgatacccgaccgataccgtaaaaccgccgctcgaccttcgatataattaccccgaacacgacgaaacgccctccccgaatattcgatacccacgtacattttactaccgccgatctccgttcgatacgaaattcgcaactccgaattcgcgaaacgcatctaaaattcccccaataaaattaacaaaacaatatcccgtacaaatcgtttttcctatttctcacaacgttaactaaattaacaaaacct

SEQ ID NO: 19149 - DNA, 615 bp, Artificial Sequence
  chemically treated genomic DNA (Homo sapiens) CpG-island No: 19149
gtttttcgtttagcgtttttattaatagtcgtagttcgtagtttcgttggatatcggttttttattttcgtagcgtagttcggaatatggtagttgttatttttatttgttacgttagttttttgtgcgcgtaattgtttggtttcgtttcgttttgcgcgagttgtttgtttaggtaggttcgtcggtgcgagcgtaaaggggcggagttaggattgttttgggcggtataaatagtagggaatcgcgcggtcgtttagtagtgacgtgatacgtagtttacggtttgtattgacgcgttttcgtttttttttttttttcgattttattttcgcggtagttgggatcgtcgtttaggtaagaatggggttttggttggattcgaagggtttgtagtaggttggttgcggggttagaaggcgcggggggaatcgaagaacggggtttgtttcgtggttttgttttagtttttattcgaattttttgggaggtttggtttttcgtacgtgagtcgtcgcgattattatttcgtcgcgatcgtttttggatcgttttttatttttaaattttttttattttagagtattttttggttttttttataagtcgtttttt

SEQ ID NO: 19150 - DNA, 615 bp, Artificial Sequence
  chemically treated genomic DNA (Homo sapiens) CpG-island No: 19150
aaaaaacgacttataaaaaaaaccaaaaaatactctaaaataaaaaaaatttaaaaataaaaaacgatccaaaaacgatcgcgacgaaataataatcgcgacgactcacgtacgaaaaaccaaacctcccaaaaaattcgaataaaaactaaaacaaaaccacgaaacaaaccccgttcttcgattccccccgcgccttctaaccccgcaaccaacctactacaaacccttcgaatccaaccaaaaccccattcttacctaaacgacgatcccaactaccgcgaaaataaaatcgaaaaaaaaaaaaaaacgaaaacgcgtcaatacaaaccgtaaactacgtatcacgtcactactaaacgaccgcgcgattccctactatttataccgcccaaaacaatcctaactccgcccctttacgctcgcaccgacgaacctacctaaacaaacaactcgcgcaaaacgaaacgaaaccaaacaattacgcgcacaaaaaactaacgtaacaaataaaaataacaactaccatattccgaactacgctacgaaaataaaaaaccgatatccaacgaaactacgaactacgactattaataaaaacgctaaacgaaaaac

SEQ ID NO: 19151 - DNA, 615 bp, Artificial Sequence
  chemically treated genomic DNA (Homo sapiens) CpG-island No: 19151
aaaagacggtttgtaagagaagttaagaaatgttttgggataaaggagatttgggagtggaaagcggtttagaaacgatcgcgacgggatggtggtcgcggcggtttacgtgcggaaggttaggttttttaaggagttcggatagggattggagtagggttacggagtaggtttcgtttttcggtttttttcgcgttttttgatttcgtagttaatttgttataagtttttcggatttagttaaggttttatttttatttgaacggcggttttagttatcgcgaagatggagtcgagaaagaggaagaagcgagggcgcgttagtatagatcgtgggttgcgtgttacgttattgttgagcgatcgcgcggttttttgttatttgtatcgtttaaggtagttttagtttcgtttttttacgttcgtatcggcgaatttgtttgggtaggtagttcgcgtaggacggggcgggattagatagttgcgcgtatagaaggttggcgtagtaggtaaagatggtagttattatgtttcgggttacgttgcggggatggagaatcggtgtttagcggggttgcgggttacggttgttggtgagagcgttgagcgaggagt

SEQ ID NO: 19152 - DNA, 615 bp, Artificial Sequence
  chemically treated genomic DNA (Homo sapiens) CpG-island No: 19152
actcctcgctcaacgctctcaccaacaaccgtaacccgcaaccccgctaaacaccgattctccatccccgcaacgtaacccgaaacataataactaccatctttacctactacgccaaccttctatacgcgcaactatctaatcccgccccgtcctacgcgaactacctacccaaacaaattcgccgatacgaacgtaaaaaaacgaaactaaaactaccttaaacgatacaaataacaaaaaaccgcgcgatcgctcaacaataacgtaacacgcaacccacgatctatactaacgcgccctcgcttcttcctctttctcgactccatcttcgcgataactaaaaccgccgttcaaataaaaataaaaccttaactaaatccgaaaaacttataacaaattaactacgaaatcaaaaaacgcgaaaaaaaccgaaaaacgaaacctactccgtaaccctactccaatccctatccgaactccttaaaaaacctaaccttccgcacgtaaaccgccgcgaccaccatcccgtcgcgatcgtttctaaaccgctttccactcccaaatctcctttatcccaaaacatttcttaacttctcttacaaaccgtctttt

SEQ ID NO: 19153 - DNA, 1101 bp, Artificial Sequence
  chemically treated genomic DNA (Homo sapiens) CpG-island No: 19153
tcgcgggttcgttgttttcggcgggcggttttgggttcgaggattcggtttttcggaggcgcgattttttagtaaataagcggagttttagaaaaaatatcgacgcgaagggggtggatagagggtgggaagtcgcggggttgtcgtttattcggaggcggaatgtaacgcgttgtgggaaacgtggtaggagttttgaggcggcgtttttttttttaggcgttcgtcgagggtttcgcggaaagtttcgcgggtcgttttcgcggttcgtagtttcgttttggcgtcgagtcggagtttatgtaatttggttttattttttgttttttttttgttttcggtgcgtcgttcgttagcgagttttcgacgtggtcgtaggggcgacgggattattttttttcgatatttatagtttcgttatgtttgttttttttcggttcggtttttttatcgtcgttgtcgtcgtcgtttttcggtcggagattcggcggtttagatcgtgttttggtcgggaattgagggtttcgttttaacgggttcgcgttgggtaatagggagcgtagcgagtttcgttcggcgcgtgcggttttcgcgtcgtcgggcggttaagcgcgcgttgagaggattggcgggcggacgagcgcgtatacgagtgagcgtagttttaaagcggcgcgtagggggttcgcggttcggaagaggggaggggcgatgattcgggaaagggttggcgcgcgcgggatcggttcgcgcgtttgaggggcggtgtcgggggcggggtttcgtcgcgaggttattttcgagtttcgggtttagtcgtacgggaggcgatatattttcgttttattttgagtttggcgtagattttcgatcgcgacggcgcggttcgtagaatcgcgggttttttttttcggtaaaaagcggcgttgaaggtttgtgggattttcgttcggtcgttttacgtgcgttagcgttttcgggggtcgcgcgggtttggttttttcggttgtttcggtttttttgttttttttttaggtttttttacgttgtatttgatatttttagggcggaatggcgagttttagatttagttttttagat

SEQ ID NO: 19154 - DNA, 1101 bp, Artificial Sequence
  chemically treated genomic DNA (Homo sapiens) CpG-island No: 19154
atctaaaaaactaaatctaaaactcgccattccgccctaaaaatatcaaatacaacgtaaaaaaacctaaaaaaaaaacaaaaaaaccgaaacaaccgaaaaaaccaaacccgcgcgacccccgaaaacgctaacgcacgtaaaacgaccgaacgaaaatcccacaaaccttcaacgccgctttttaccgaaaaaaaaaacccgcgattctacgaaccgcgccgtcgcgatcgaaaatctacgccaaactcaaaataaaacgaaaatatatcgcctcccgtacgactaaacccgaaactcgaaaataacctcgcgacgaaaccccgcccccgacaccgcccctcaaacgcgcgaaccgatcccgcgcgcgccaaccctttcccgaatcatcgcccctcccctcttccgaaccgcgaaccccctacgcgccgctttaaaactacgctcactcgtatacgcgctcgtccgcccgccaatcctctcaacgcgcgcttaaccgcccgacgacgcgaaaaccgcacgcgccgaacgaaactcgctacgctccctattacccaacgcgaacccgttaaaacgaaaccctcaattcccgaccaaaacacgatctaaaccgccgaatctccgaccgaaaaacgacgacgacaacgacgataaaaaaaccgaaccgaaaaaaaacaaacataacgaaactataaatatcgaaaaaaaataatcccgtcgcccctacgaccacgtcgaaaactcgctaacgaacgacgcaccgaaaacaaaaaaaaaacaaaaaataaaaccaaattacataaactccgactcgacgccaaaacgaaactacgaaccgcgaaaacgacccgcgaaactttccgcgaaaccctcgacgaacgcctaaaaaaaaaaacgccgcctcaaaactcctaccacgtttcccacaacgcgttacattccgcctccgaataaacgacaaccccgcgacttcccaccctctatccacccccttcgcgtcgatattttttctaaaactccgcttatttactaaaaaatcgcgcctccgaaaaaccgaatcctcgaacccaaaaccgcccgccgaaaacaacgaacccgcga

SEQ ID NO: 19155 - DNA, 1101 bp, Artificial Sequence
  chemically treated genomic DNA (Homo sapiens) CpG-island No: 19155
gtttagagagttgggtttagaattcgttatttcgttttgagggtgttaagtgtagcgtggagagatttgagggggaaataaaaaggtcgagatagtcgaaaggattaagttcgcgcgattttcgaaggcgttgacgtacgtagggcggtcgggcgggggttttataggtttttagcgtcgttttttgtcggggagggaagttcgcggttttgcggatcgcgtcgtcgcggtcgagggtttgcgttaggtttagggtagggcgagggtgtgtcgtttttcgtgcggttaggttcggggttcgggggtggtttcgcggcgaagtttcgttttcggtatcgttttttaggcgcgcgagtcgatttcgcgcgcgttaattttttttcgggttatcgttttttttttttttcgggtcgcgagttttttgcgcgtcgttttggggttgcgtttattcgtgtgcgcgttcgttcgttcgttagtttttttaacgcgcgtttggtcgttcgacgacgcgggagtcgtacgcgtcggacgaggttcgttgcgttttttgttgtttagcgcgggttcgttgaggcggagtttttagttttcggttaggatacggtttgggtcgtcgaattttcggtcgaagagcggcggcggtagcggcggtgaggagatcgggtcggggaaaggtagatatggcggggttgtgggtatcgggggagggtggtttcgtcgtttttgcggttacgtcgaaggttcgttggcgggcggcgtatcggggataggggaggggtaggggatggaattaggttgtatgggtttcggttcggcgttagagcggggttgcgggtcgcgagggcggttcgcgaggtttttcgcgggattttcggcgggcgtttgaggaaaaagacgtcgttttagggtttttgttacgttttttatagcgcgttatatttcgttttcgggtgggcgataatttcgcggttttttattttttgtttatttttttcgcgtcggtgttttttttggagtttcgtttgtttgttggagagtcgcgttttcgggaagtcgggttttcgaatttagggtcgttcgtcggggatagcggattcgcgg

SEQ ID NO: 19156 - DNA, 1101 bp, Artificial Sequence
  chemically treated genomic DNA (Homo sapiens) CpG-island No: 19156
ccgcgaatccgctatccccgacgaacgaccctaaattcgaaaacccgacttcccgaaaacgcgactctccaacaaacaaacgaaactccaaaaaaaacaccgacgcgaaaaaaataaacaaaaaataaaaaaccgcgaaattatcgcccacccgaaaacgaaatataacgcgctataaaaaacgtaacaaaaaccctaaaacgacgtctttttcctcaaacgcccgccgaaaatcccgcgaaaaacctcgcgaaccgccctcgcgacccgcaaccccgctctaacgccgaaccgaaacccatacaacctaattccatcccctacccctcccctatccccgatacgccgcccgccaacgaaccttcgacgtaaccgcaaaaacgacgaaaccaccctcccccgatacccacaaccccgccatatctacctttccccgacccgatctcctcaccgccgctaccgccgccgctcttcgaccgaaaattcgacgacccaaaccgtatcctaaccgaaaactaaaaactccgcctcaacgaacccgcgctaaacaacaaaaaacgcaacgaacctcgtccgacgcgtacgactcccgcgtcgtcgaacgaccaaacgcgcgttaaaaaaactaacgaacgaacgaacgcgcacacgaataaacgcaaccccaaaacgacgcgcaaaaaactcgcgacccgaaaaaaaaaaaaaacgataacccgaaaaaaaattaacgcgcgcgaaatcgactcgcgcgcctaaaaaacgataccgaaaacgaaacttcgccgcgaaaccacccccgaaccccgaacctaaccgcacgaaaaacgacacaccctcgccctaccctaaacctaacgcaaaccctcgaccgcgacgacgcgatccgcaaaaccgcgaacttccctccccgacaaaaaacgacgctaaaaacctataaaacccccgcccgaccgccctacgtacgtcaacgccttcgaaaatcgcgcgaacttaatcctttcgactatctcgacctttttatttccccctcaaatctctccacgctacacttaacaccctcaaaacgaaataacgaattctaaacccaactctctaaac

SEQ ID NO: 19157 - DNA, 1653 bp, Artificial Sequence
  chemically treated genomic DNA (Homo sapiens) CpG-island No: 19157
gtttgagcgggagaaaacggtttggttttgttcgggtggttgttgagtatcgttcggcgtcgttcgcgtttgtagggagttcggttcgttgttttggtggatataaagtttaggggtcgttcgcgcgggattagtagcgcgaattttttgtcgttcggttagtttggtaggggattttaaaatcggttaattatagcgggcgttaggttttcgtttttcgtttattggttttgtcgtaggaggcgggtacgtgagcgtattaatttgtggtcggcgagcgtaaagggcggggtttcgtttaggttgtatcgtttagagcgcgcgtgcgcgagatcggaaacgtagttttttgattggcggcgcgtgtcgggggcggggtcgcggttgcgtgatagttgtcgcggggggagggcgagtttaagcgcgggggagggagtgtaaatagagcgaaggttgttttgtgttagtttcgttatcgtcgggcggttcgcgcggagtttgagggagatggaagttgagtaagagtagcggcgtagaaaggtggaggtcgggaggacgaaggtaaatattaggggttttttttttagttgttttggcgtgaagttttaagggcggtttcggtgttcgttatcgttttttgttaggagaggacgcggttcggcggaagtcgtcgcggaggtttcgttttttttcgtcggtttcgttggaagtcgttttttggtcgtcgttattttgaattcgtcgtttttcgttaggtttcgttttcgtcgcggttatagttaattagcggtcgggacgcgcggcgtttttcgggcgggtcggggcggggttgcgtttgcgtcggggggggtggggcgcgggttgggcgcggtgtacgtcggggcggggtgtggttgtagggcggggttataggggcgtggcgtggttgtacggagggggtggggcgcggtaggcgttggattttaggttggattttttagtggttttcgcgtttttcgggatcgggtggtttggggcgggcggtcggtattcgggtggttgtttggtttagggttagttttttgcgcggtcggggtcgggggcgtggcgcgggtggtttgtagcgtttttttagggtgcgttttcgtttcgttcgtcggagatgtttttttcgcgcgtttttcgcggcgttgtagtttttattgtgtgaaaggttttcgcggcgttttcggtcgtcgtttttttttcgcgtttttgggttcgcgttttgttcgttcgggtttggcgtacgttgtcgggaatttacgcggcgttggcgtcgggcgtttttaagggacgcgttttcgtttttttttcgtttcgggttttttcgtgaaaaagcgttcggtttgatggttattgttttaggtttcgtgggaataaagcgcgtagagtttatgattcgggggtaggagaaagggagtttcgaaagcgcgaggcggaatcgcgggagtaggtcggtttttgcgaggtgcgcgtcgtttttttttaggatgttttggttggggtgttggggaagagcggggttttcgggtacggcggataggggacgcggggttaggtcggggaagggttgaggcgggtaggaggggaaggggagttcggagtttgtagggagttgcgaataggagtaga

SEQ ID NO: 19158 - DNA, 1653 bp, Artificial Sequence
  chemically treated genomic DNA (Homo sapiens) CpG-island No: 19158
tctactcctattcgcaactccctacaaactccgaactccccttcccctcctacccgcctcaacccttccccgacctaaccccgcgtcccctatccgccgtacccgaaaaccccgctcttccccaacaccccaaccaaaacatcctaaaaaaaaacgacgcgcacctcgcaaaaaccgacctactcccgcgattccgcctcgcgctttcgaaactccctttctcctacccccgaatcataaactctacgcgctttattcccacgaaacctaaaacaataaccatcaaaccgaacgctttttcacgaaaaaacccgaaacgaaaaaaaaacgaaaacgcgtcccttaaaaacgcccgacgccaacgccgcgtaaattcccgacaacgtacgccaaacccgaacgaacaaaacgcgaacccaaaaacgcgaaaaaaaaacgacgaccgaaaacgccgcgaaaacctttcacacaataaaaactacaacgccgcgaaaaacgcgcgaaaaaaacatctccgacgaacgaaacgaaaacgcaccctaaaaaaacgctacaaaccacccgcgccacgcccccgaccccgaccgcgcaaaaaactaaccctaaaccaaacaaccacccgaataccgaccgcccgccccaaaccacccgatcccgaaaaacgcgaaaaccactaaaaaatccaacctaaaatccaacgcctaccgcgccccaccccctccgtacaaccacgccacgcccctataaccccgccctacaaccacaccccgccccgacgtacaccgcgcccaacccgcgccccaccccccccgacgcaaacgcaaccccgccccgacccgcccgaaaaacgccgcgcgtcccgaccgctaattaactataaccgcgacgaaaacgaaacctaacgaaaaacgacgaattcaaaataacgacgaccaaaaaacgacttccaacgaaaccgacgaaaaaaaacgaaacctccgcgacgacttccgccgaaccgcgtcctctcctaacaaaaaacgataacgaacaccgaaaccgcccttaaaacttcacgccaaaacaactaaaaaaaaaacccctaatatttaccttcgtcctcccgacctccacctttctacgccgctactcttactcaacttccatctccctcaaactccgcgcgaaccgcccgacgataacgaaactaacacaaaacaaccttcgctctatttacactccctcccccgcgcttaaactcgccctccccccgcgacaactatcacgcaaccgcgaccccgcccccgacacgcgccgccaatcaaaaaactacgtttccgatctcgcgcacgcgcgctctaaacgatacaacctaaacgaaaccccgccctttacgctcgccgaccacaaattaatacgctcacgtacccgcctcctacgacaaaaccaataaacgaaaaacgaaaacctaacgcccgctataattaaccgattttaaaatcccctaccaaactaaccgaacgacaaaaaattcgcgctactaatcccgcgcgaacgacccctaaactttatatccaccaaaacaacgaaccgaactccctacaaacgcgaacgacgccgaacgatactcaacaaccacccgaacaaaaccaaaccgttttctcccgctcaaac

SEQ ID NO: 19159 - DNA, 1653 bp, Artificial Sequence
  chemically treated genomic DNA (Homo sapiens) CpG-island No: 19159
tttgtttttgttcgtagttttttgtaggtttcgggttttttttttttttttgttcgttttagttttttttcggtttagtttcgcgttttttgttcgtcgtgttcgggagtttcgtttttttttagtattttagttagaatattttgggggggagcggcgcgtatttcgtagaggtcggtttgttttcgcggtttcgtttcgcgttttcgggatttttttttttttgttttcgagttatgggttttgcgcgttttatttttacgaaatttaggatagtggttattaaatcgagcgtttttttacggagaaattcggggcgggagaaagacgggagcgcgttttttgaaggcgttcggcgttagcgtcgcgtgggttttcggtagcgtacgttaggttcggacgggtaggacgcgagtttaagggcgcgggaagaagacggcggtcgggagcgtcgcgggggttttttatatagtaaggattgtaacgtcgcgagaaacgcgcggggaaagtattttcgacggacgaggcgaaggcgtattttggggaggcgttgtaggttattcgcgttacgttttcggtttcggtcgcgtaggaaattggttttagattaagtagttattcgaatatcggtcgttcgttttaggttattcggtttcggaggacgcgggagttattggaagatttagtttggggtttagcgtttgtcgcgttttatttttttcgtgtagttacgttacgtttttgtagtttcgttttgtagttatatttcgtttcggcgtgtatcgcgtttagttcgcgttttatttttttcgacgtaggcgtagtttcgtttcggttcgttcgagaggcgtcgcgcgtttcggtcgttgattggttgtggtcgcggcgggggcgggatttggcggagagcggcggatttaagatggcggcggttaggaggcggtttttagcggagtcggcgggaaaaagcgagattttcgcggcggttttcgtcggatcgcgtttttttttggtagggggcggtggcgggtatcggagtcgtttttaggattttacgttagagtagttagagaagaagtttttaatgtttattttcgttttttcggtttttatttttttgcgtcgttgtttttgtttaatttttattttttttagatttcgcgcgggtcgttcggcggtgacggggttgatatagagtagttttcgttttatttatattttttttttcgcgtttgggttcgtttttttttcgcgataattgttacgtagtcgcggtttcgttttcgatacgcgtcgttaattagggggttgcgttttcggtttcgcgtacgcgcgttttgggcggtgtagtttgggcggagtttcgttttttacgttcgtcggttatagattggtgcgtttacgtattcgttttttacggtaggattagtaagcggaaagcggaggtttggcgttcgttgtgattggtcgattttaaaattttttgttaggttggtcgagcggtaaaaagttcgcgttgttggtttcgcgcgggcggtttttgggttttgtgtttattaggatagcgggtcgggttttttgtaggcgcgggcggcgtcgaacggtgtttagtaattattcggatagggttaggtcgttttttttcgtttaggt

SEQ ID NO: 19160 - DNA, 1653 bp, Artificial Sequence
  chemically treated genomic DNA (Homo sapiens) CpG-island No: 19160
acctaaacgaaaaaaaacgacctaaccctatccgaataattactaaacaccgttcgacgccgcccgcgcctacaaaaaacccgacccgctatcctaataaacacaaaacccaaaaaccgcccgcgcgaaaccaacaacgcgaactttttaccgctcgaccaacctaacaaaaaattttaaaatcgaccaatcacaacgaacgccaaacctccgctttccgcttactaatcctaccgtaaaaaacgaatacgtaaacgcaccaatctataaccgacgaacgtaaaaaacgaaactccgcccaaactacaccgcccaaaacgcgcgtacgcgaaaccgaaaacgcaaccccctaattaacgacgcgtatcgaaaacgaaaccgcgactacgtaacaattatcgcgaaaaaaaaacgaacccaaacgcgaaaaaaaaaatataaataaaacgaaaactactctatatcaaccccgtcaccgccgaacgacccgcgcgaaatctaaaaaaaataaaaattaaacaaaaacaacgacgcaaaaaaataaaaaccgaaaaaacgaaaataaacattaaaaacttcttctctaactactctaacgtaaaatcctaaaaacgactccgatacccgccaccgccccctaccaaaaaaaaacgcgatccgacgaaaaccgccgcgaaaatctcgctttttcccgccgactccgctaaaaaccgcctcctaaccgccgccatcttaaatccgccgctctccgccaaatcccgcccccgccgcgaccacaaccaatcaacgaccgaaacgcgcgacgcctctcgaacgaaccgaaacgaaactacgcctacgtcgaaaaaaataaaacgcgaactaaacgcgatacacgccgaaacgaaatataactacaaaacgaaactacaaaaacgtaacgtaactacacgaaaaaaataaaacgcgacaaacgctaaaccccaaactaaatcttccaataactcccgcgtcctccgaaaccgaataacctaaaacgaacgaccgatattcgaataactacttaatctaaaaccaatttcctacgcgaccgaaaccgaaaacgtaacgcgaataacctacaacgcctccccaaaatacgccttcgcctcgtccgtcgaaaatactttccccgcgcgtttctcgcgacgttacaatccttactatataaaaaacccccgcgacgctcccgaccgccgtcttcttcccgcgcccttaaactcgcgtcctacccgtccgaacctaacgtacgctaccgaaaacccacgcgacgctaacgccgaacgccttcaaaaaacgcgctcccgtctttctcccgccccgaatttctccgtaaaaaaacgctcgatttaataaccactatcctaaatttcgtaaaaataaaacgcgcaaaacccataactcgaaaacaaaaaaaaaaaaatcccgaaaacgcgaaacgaaaccgcgaaaacaaaccgacctctacgaaatacgcgccgctcccccccaaaatattctaactaaaatactaaaaaaaaacgaaactcccgaacacgacgaacaaaaaacgcgaaactaaaccgaaaaaaaactaaaacgaacaaaaaaaaaaaaaaaacccgaaacctacaaaaaactacgaacaaaaacaaa

SEQ ID NO: 19161 - DNA, 707 bp, Artificial Sequence
  chemically treated genomic DNA (Homo sapiens) CpG-island No: 19161
  unsure (274..275, 295..296, 312..)
ttttcgcgtatttttttattttttttaatcgcgtagtgatcgattttcgggtaaggggcgtggttaataggtagagtgtttcgagcgcgttttcgttttcgagcgcgttttcgcgttattttttattacgttatattcgatgacgcgttcgcggcgttcgaagaggttgcgtagtttttggttcgtgtatgtagtcgatatattgtttacgaaaattttttaagtattaagaggttttgggcgcgatatttttattacgagcgcgcgtttcggnngtagttcgtggtcgtgtagnntttcgatggcgcgtannncgttcgcgttttcgcgtatgtgtacgaaggcgaattgttttatgacggcgtagtttatgatcgtgtcgtagggcgtaaagagggttgttagttttttcggagtcgtattcgtttcgtcgacgttgtttacgaatatttttattttgtcgtcgtagttatttttttggagagttcggattttttttttagcgataggtaagacgttcgaacgatcggtagttttttttaggaatggttggcgatcgagaatttcgtcgcgtaggcgttttggtttagttaatggggattcgtatttcgcgcgtttagcgattaattagaaacgttgagggaagatgtgtttaggtatagttaattttagagggtttagagttcgttcgttagttgagggggtgg

SEQ ID NO: 19162 - DNA, 707 bp, Artificial Sequence
  chemically treated genomic DNA (Homo sapiens) CpG-island No: 19162
  unsure (394..395, 412..413, 433..)
ccaccccctcaactaacgaacgaactctaaaccctctaaaattaactatacctaaacacatcttccctcaacgtttctaattaatcgctaaacgcgcgaaatacgaatccccattaactaaaccaaaacgcctacgcgacgaaattctcgatcgccaaccattcctaaaaaaaactaccgatcgttcgaacgtcttacctatcgctaaaaaaaaaatccgaactctccaaaaaaataactacgacgacaaaataaaaatattcgtaaacaacgtcgacgaaacgaatacgactccgaaaaaactaacaaccctctttacgccctacgacacgatcataaactacgccgtcataaaacaattcgccttcgtacacatacgcgaaaacgcgaacgnnntacgcgccatcgaaannctacacgaccacgaactacnnccgaaacgcgcgctcgtaataaaaatatcgcgcccaaaacctcttaatacttaaaaaattttcgtaaacaatatatcgactacatacacgaaccaaaaactacgcaacctcttcgaacgccgcgaacgcgtcatcgaatataacgtaataaaaaataacgcgaaaacgcgctcgaaaacgaaaacgcgctcgaaacactctacctattaaccacgccccttacccgaaaatcgatcactacgcgattaaaaaaaataaaaaaatacgcgaaaa

SEQ ID NO: 19163 - DNA, 707 bp, Artificial Sequence
  chemically treated genomic DNA (Homo sapiens) CpG-island No: 19163
  unsure (394..395, 412..413, 433..)
ttatttttttagttaacgagcgggttttaggttttttgggattggttgtgtttgagtatatttttttttagcgtttttgattggtcgttggacgcgcgggatgcgagtttttattggttaggttagggcgtttgcgcggcggggttttcggtcgttagttatttttgaggaggattgtcggtcgttcggacgttttgtttgtcgttggaggagaggttcgggttttttaggaaggtggttgcggcgataaaatgaagatattcgtgggtaacgtcgacggggcggatacgatttcggaggagttggtagttttttttgcgttttacggtacggttatgagttgcgtcgttatgaaatagttcgttttcgtgtatatgcgcgagaacgcgggcgnnntgcgcgttatcgaagnnttgtacggttacgagttgtnntcggggcgcgcgttcgtggtggagatgtcgcgtttaaggttttttaatatttggaagattttcgtgggtaatgtgtcggttgtatgtacgagttaggaattgcgtagttttttcgagcgtcgcggacgcgttatcgagtgtgacgtggtgaaaggtaacgcggaggcgcgttcgggggcgggggcgcgttcggggtattttgtttgttagttacgttttttattcgggggtcggttattgcgcggttgggaggggtggggaagtgcgcgggag

SEQ ID NO: 19164 - DNA, 707 bp, Artificial Sequence
  chemically treated genomic DNA (Homo sapiens) CpG-island No: 19164
  unsure (274..275, 295..296, 312..)
ctcccgcgcacttccccacccctcccaaccgcgcaataaccgacccccgaataaaaaacgtaactaacaaacaaaataccccgaacgcgcccccgcccccgaacgcgcctccgcgttacctttcaccacgtcacactcgataacgcgtccgcgacgctcgaaaaaactacgcaattcctaactcgtacatacaaccgacacattacccacgaaaatcttccaaatattaaaaaaccttaaacgcgacatctccaccacgaacgcgcgccccgannacaactcgtaaccgtacaanncttcgataacgcgcannncgcccgcgttctcgcgcatatacacgaaaacgaactatttcataacgacgcaactcataaccgtaccgtaaaacgcaaaaaaaactaccaactcctccgaaatcgtatccgccccgtcgacgttacccacgaatatcttcattttatcgccgcaaccaccttcctaaaaaacccgaacctctcctccaacgacaaacaaaacgtccgaacgaccgacaatcctcctcaaaaataactaacgaccgaaaaccccgccgcgcaaacgccctaacctaaccaataaaaactcgcatcccgcgcgtccaacgaccaatcaaaaacgctaaaaaaaaatatactcaaacacaaccaatcccaaaaaacctaaaacccgctcgttaactaaaaaaataa

SEQ ID NO: 19165 - DNA, 1006 bp, Artificial Sequence
  chemically treated genomic DNA (Homo sapiens) CpG-island No: 19165
ggtcgaggcggatttcgaggcggagtcgttgtttgtttgcgtttcgtttgttcggtttatttaatagtttcgttttagattcgtagttgcggaagcggtgggtcgggtggtgattataattttgagcgttgtttttttggaatttgattttcgatttcgtttagtaatcgggaggttgcgattttaaagttttttgtgtttttttatcgatatcgggtcgtttttttcgtttgtagcgtacgttttcgtttttaggggtagcgtagcgaggcggagatttttttgtatttcgagcgtgcggggtagtttttagattgaggatttgcgatttcgtgggacgtcggtgttcgttattgcgtttttttagggagtagaggcggttttggaagtcggtttagggcggagatcgcgattggaggggcgtagaacgttttttttagcgtttcgggttttatcggtataattttaaaattaggggcgaaattcgagttttgtcgttacgcgggggtggagcgtgatcgtttcgtcgcgcgttgttttaggtttcgtcggttttagcgtcgcgaggttgttaggtgagttttagggttttgtggtttttagagcgttttcgggagttttttggttgtagcgggaatcgagttggatgttcggatagcgtcggggtcgtttttttgtttttgtttcgtggtcggagtcgtaggtttgtcgttatttttattcgggttacgtttttttttttcgcggtcggatcgcgttagagtttcgggttttggttggaaattcgtaggtttcgggtagtttgggtcgtaagtgcgatgaagaagcggggttcggcgcgtatatgtggtttcgggtaggagtttcggtcgtttcgtgttttttttttcgtttacgacggtggtcggcggcggtttttgtttttcggatttatgaataaagttggagatgcggttttggagtcggttttgggatttgtttttttttttggtttcggggatcgtag

SEQ ID NO: 19166 - DNA, 1006 bp, Artificial Sequence
  chemically treated genomic DNA (Homo sapiens) CpG-island No: 19166
ctacgatccccgaaaccaaaaaaaaaaacaaatcccaaaaccgactccaaaaccgcatctccaactttattcataaatccgaaaaacaaaaaccgccgccgaccaccgtcgtaaacgaaaaaaaaaacacgaaacgaccgaaactcctacccgaaaccacatatacgcgccgaaccccgcttcttcatcgcacttacgacccaaactacccgaaacctacgaatttccaaccaaaacccgaaactctaacgcgatccgaccgcgaaaaaaaaaaacgtaacccgaataaaaataacgacaaacctacgactccgaccacgaaacaaaaacaaaaaaacgaccccgacgctatccgaacatccaactcgattcccgctacaaccaaaaaactcccgaaaacgctctaaaaaccacaaaaccctaaaactcacctaacaacctcgcgacgctaaaaccgacgaaacctaaaacaacgcgcgacgaaacgatcacgctccacccccgcgtaacgacaaaactcgaatttcgcccctaattttaaaattataccgataaaacccgaaacgctaaaaaaaacgttctacgcccctccaatcgcgatctccgccctaaaccgacttccaaaaccgcctctactccctaaaaaaacgcaataacgaacaccgacgtcccacgaaatcgcaaatcctcaatctaaaaactaccccgcacgctcgaaatacaaaaaaatctccgcctcgctacgctacccctaaaaacgaaaacgtacgctacaaacgaaaaaaacgacccgatatcgataaaaaaacacaaaaaactttaaaatcgcaacctcccgattactaaacgaaatcgaaaatcaaattccaaaaaaacaacgctcaaaattataatcaccacccgacccaccgcttccgcaactacgaatctaaaacgaaactattaaataaaccgaacaaacgaaacgcaaacaaacaacgactccgcctcgaaatccgcctcgacc

SEQ ID NO: 19167 - DNA, 1006 bp, Artificial Sequence
  chemically treated genomic DNA (Homo sapiens) CpG-island No: 19167
ttgcggttttcgaagttaagagaagaagtaggttttagggtcgattttaaagtcgtatttttagttttgtttatgggttcgggaagtagaggtcgtcgtcggttatcgtcgtgggcgagaagaagggtacgaggcggtcggggtttttgttcggaattatatgtgcgcgtcgggtttcgtttttttatcgtatttgcggtttaggttgttcggggtttgcgagtttttagttagggttcgggattttggcgcggttcggtcgcgaggaaggaaggcgtggttcgggtgggggtagcggtaggtttgcggtttcggttacggggtaggggtagaaaaacgatttcggcgttgttcgggtatttagttcggttttcgttgtagttaggagattttcgggagcgttttaggaattatagagttttggaatttatttggtagtttcgcggcgttaaagtcggcggagtttgagatagcgcgcggcgaggcggttacgttttattttcgcgtggcggtaggattcggatttcgtttttggttttaaaattgtgtcggtggagttcgggacgttgggaagagcgttttgcgtttttttagtcgcggttttcgttttaaatcgatttttagagtcgtttttgttttttggaggggcgtagtggcggatatcggcgttttacgaagtcgtaggtttttagtttgagggttgtttcgtacgttcggaatgtaggagggttttcgtttcgttgcgttgtttttgggggcggaggcgtgcgttgtaggcgagagaggcggttcggtatcgatggagaagtatagagggttttgaggtcgtaatttttcggttgttgagcggagtcgggagttaggttttaaagggatagcgtttagggttgtaattattattcggtttatcgttttcgtagttgcgagtttagggcggagttgttgggtggatcgagtaggcgaggcgtaggtaggtagcggtttcgtttcggaattcgtttcgatt

SEQ ID NO: 19168 - DNA, 1006 bp, Artificial Sequence
  chemically treated genomic DNA (Homo sapiens) CpG-island No: 19168
aatcgaaacgaattccgaaacgaaaccgctacctacctacgcctcgcctactcgatccacccaacaactccgccctaaactcgcaactacgaaaacgataaaccgaataataattacaaccctaaacgctatccctttaaaacctaactcccgactccgctcaacaaccgaaaaattacgacctcaaaaccctctatacttctccatcgataccgaaccgcctctctcgcctacaacgcacgcctccgcccccaaaaacaacgcaacgaaacgaaaaccctcctacattccgaacgtacgaaacaaccctcaaactaaaaacctacgacttcgtaaaacgccgatatccgccactacgcccctccaaaaaacaaaaacgactctaaaaatcgatttaaaacgaaaaccgcgactaaaaaaacgcaaaacgctcttcccaacgtcccgaactccaccgacacaattttaaaaccaaaaacgaaatccgaatcctaccgccacgcgaaaataaaacgtaaccgcctcgccgcgcgctatctcaaactccgccgactttaacgccgcgaaactaccaaataaattccaaaactctataattcctaaaacgctcccgaaaatctcctaactacaacgaaaaccgaactaaatacccgaacaacgccgaaatcgtttttctacccctaccccgtaaccgaaaccgcaaacctaccgctacccccacccgaaccacgccttccttcctcgcgaccgaaccgcgccaaaatcccgaaccctaactaaaaactcgcaaaccccgaacaacctaaaccgcaaatacgataaaaaaacgaaacccgacgcgcacatataattccgaacaaaaaccccgaccgcctcgtacccttcttctcgcccacgacgataaccgacgacgacctctacttcccgaacccataaacaaaactaaaaatacgactttaaaatcgaccctaaaacctacttcttctcttaacttcgaaaaccgcaa

SEQ ID NO: 19169 - DNA, 1024 bp, Artificial Sequence
  chemically treated genomic DNA (Homo sapiens) CpG-island No: 19169
  unsure (932)
cgtcggcgggaagggggtagttcggggcgttcggcggttttaggggttgattttcgttcggaagtgcgcgtagggtttacggcgtaagggcgtttgtcgcgtttagtcgtcgtcgttcgggtcgtttatttcgcggggcgtttttcgtagattagcgtcgttcgttcggattcgttcgcgtagatttttcgggcggattgaggatcgttcgttcggggtcgtttttgtgttcgtttttagcgttcgtttagttcgtcgttcgcgtttcggtggcgggttcgacgttcgtatttcgttcgtgtttaggcgtagagttttcgtttcggggagttttttggtcgtcggcgggtttcgcggttcgcgcgttgggcgttttgtttgtcgggtagaggggaaggcggcggtcggttggggatgggcggttcggttgcgtcgaggggcgtcgggaggtttcgcgcgttgttgttggcgttggtggtcgcggggattttcgcgggcgtttataattttgattcgtagcgtttcgtgtatttttagggtttcgttgattcgtttttcggttacgtagttttggagtatttttacgataatacgcgttggtgagtgttcgttcgatttcgcgattttggttcgcgcggttatcgtttcggtttttaggttagcgtcgtcgtcgttttttcggttttttttacgtcgtcgtttcgagggggcgatttaaatgtttttcgttgcgcgcggttcggtcgtcgggggacggcgggagaagggaggacgtcgttcggggttcgttaaggtcggggtcggcgtttggaggcgggcgggggcgttcgggtgtttttttggggttttagtttagagcgtggggggagagtcgttaaagttgtttttttcgtcgtttagttaaattcggttttattttttgaatcgaaaantaatttggtttttttgttttcgggcggtcgtcgttggtttagcgagttttttgaatttcgtagggtttggaggagtcggggtattggagttg

SEQ ID NO: 19170 - DNA, 1024 bp, Artificial Sequence
  chemically treated genomic DNA (Homo sapiens) CpG-island No: 19170
  unsure (93)
caactccaataccccgactcctccaaaccctacgaaattcaaaaaactcgctaaaccaacgacgaccgcccgaaaacaaaaaaaccaaattanttttcgattcaaaaaataaaaccgaatttaactaaacgacgaaaaaaacaactttaacgactctccccccacgctctaaactaaaaccccaaaaaaacacccgaacgcccccgcccgcctccaaacgccgaccccgaccttaacgaaccccgaacgacgtcctcccttctcccgccgtcccccgacgaccgaaccgcgcgcaacgaaaaacatttaaatcgccccctcgaaacgacgacgtaaaaaaaaccgaaaaaacgacgacgacgctaacctaaaaaccgaaacgataaccgcgcgaaccaaaatcgcgaaatcgaacgaacactcaccaacgcgtattatcgtaaaaatactccaaaactacgtaaccgaaaaacgaatcaacgaaaccctaaaaatacacgaaacgctacgaatcaaaattataaacgcccgcgaaaatccccgcgaccaccaacgccaacaacaacgcgcgaaacctcccgacgcccctcgacgcaaccgaaccgcccatccccaaccgaccgccgccttcccctctacccgacaaacaaaacgcccaacgcgcgaaccgcgaaacccgccgacgaccaaaaaactccccgaaacgaaaactctacgcctaaacacgaacgaaatacgaacgtcgaacccgccaccgaaacgcgaacgacgaactaaacgaacgctaaaaacgaacacaaaaacgaccccgaacgaacgatcctcaatccgcccgaaaaatctacgcgaacgaatccgaacgaacgacgctaatctacgaaaaacgccccgcgaaataaacgacccgaacgacgacgactaaacgcgacaaacgcccttacgccgtaaaccctacgcgcacttccgaacgaaaatcaacccctaaaaccgccgaacgccccgaactacccccttcccgccgacg

SEQ ID NO: 19171 - DNA, 1024 bp, Artificial Sequence
  chemically treated genomic DNA (Homo sapiens) CpG-island No: 19171
  unsure (93)
tagttttagtgtttcgatttttttaggttttgcgaggtttaggaggttcgttgggttagcggcggtcgttcggaggtagaggagttaagttanttttcgatttagagagtgaagtcgagtttagttgggcggcggaggagataattttagcggttttttttttacgttttgggttgggattttagggaggtattcggacgttttcgttcgtttttaggcgtcgatttcgattttagcgggtttcggacggcgtttttttttttttcgtcgtttttcggcggtcgagtcgcgcgtaacggagaatatttaaatcgttttttcgggacggcggcgtggaagagatcggaaaggcggcggcggcgttggtttgggggtcggggcggtggtcgcgcgggttagggtcgcggagtcgggcgggtatttattagcgcgtgttgtcgtggaaatgttttagaattgcgtagtcgaagaacgagttagcggggttttggaagtgtacggggcgttgcgggttaaggttgtaggcgttcgcggggattttcgcgattattagcgttagtagtagcgcgcggagtttttcggcgtttttcggcgtagtcgggtcgtttatttttagtcggtcgtcgtttttttttttgttcggtaagtagggcgtttagcgcgcgggtcgcggggttcgtcgacggttaggaagtttttcggggcgggagttttgcgtttggatacgggcggaatgcgggcgtcgggttcgttatcggggcgcggacggcgggttgagcgggcgttgaaggcgagtataggggcggtttcgagcgggcggtttttagttcgttcgagaagtttgcgcgagcgggttcgggcgggcggcgttggtttgcggagggcgtttcgcgaggtgggcggttcgggcggcggcggttggacgcggtaggcgtttttgcgtcgtgagttttgcgcgtattttcgggcgggagttagtttttgggatcgtcgggcgtttcgaattgtttttttttcgtcgacg

SEQ ID NO: 19172 - DNA, 1024 bp, Artificial Sequence
  chemically treated genomic DNA (Homo sapiens) CpG-island No: 19172
  unsure (932)
cgtcgacgaaaaaaaaacaattcgaaacgcccgacgatcccaaaaactaactcccgcccgaaaatacgcgcaaaactcacgacgcaaaaacgcctaccgcgtccaaccgccgccgcccgaaccgcccacctcgcgaaacgccctccgcaaaccaacgccgcccgcccgaacccgctcgcgcaaacttctcgaacgaactaaaaaccgcccgctcgaaaccgcccctatactcgccttcaacgcccgctcaacccgccgtccgcgccccgataacgaacccgacgcccgcattccgcccgtatccaaacgcaaaactcccgccccgaaaaacttcctaaccgtcgacgaaccccgcgacccgcgcgctaaacgccctacttaccgaacaaaaaaaaaaacgacgaccgactaaaaataaacgacccgactacgccgaaaaacgccgaaaaactccgcgcgctactactaacgctaataatcgcgaaaatccccgcgaacgcctacaaccttaacccgcaacgccccgtacacttccaaaaccccgctaactcgttcttcgactacgcaattctaaaacatttccacgacaacacgcgctaataaatacccgcccgactccgcgaccctaacccgcgcgaccaccgccccgacccccaaaccaacgccgccgccgcctttccgatctcttccacgccgccgtcccgaaaaaacgatttaaatattctccgttacgcgcgactcgaccgccgaaaaacgacgaaaaaaaaaaaaacgccgtccgaaacccgctaaaatcgaaatcgacgcctaaaaacgaacgaaaacgtccgaatacctccctaaaatcccaacccaaaacgtaaaaaaaaaaccgctaaaattatctcctccgccgcccaactaaactcgacttcactctctaaatcgaaaantaacttaactcctctacctccgaacgaccgccgctaacccaacgaacctcctaaacctcgcaaaacctaaaaaaatcgaaacactaaaacta

SEQ ID NO: 19173 - DNA, 856 bp, Artificial Sequence
  chemically treated genomic DNA (Homo sapiens) CpG-island No: 19173
tcgtcgcggttttttgtttgtttcggttttttgtttcgtcgtcgtcgcggttttttgttttttattttcgtcgttgcggttttttattcgtcgcggttttttgttttttcgtcgtcgtggttttttttttttattttattttcgttttttgttcgtcgcggttttttgtttttatttcgtttcggttttttgttagttacggttttttgtttttcgtcgttgcggttttttttttatcgcggttttttgtttttcgttatcgcggttttttgtttttcgtcgtcgcgattttttttttgtcgcggttttttattttttgtcgtcgtggttttttgtttttatttcgtttcggttttttgtttttatttcgtttcggttttttgtttttatttcgtttcggttttttgttcgtttcggtttttggtttttcgtcgtcgttgttttttgtttttcgtcgacgcggttttttgttggttacggttttttatttttcgtcgcggttttttgttttttattacgtcgcggttttttataatttttttatttttcgttttcgcggttttttgcgttttcgttattttcgttttttgttttttcgtcgtcgcggttttttgtcgtcgcggatttttgtatattcgtcgtcgtggttttttgcgttttcgtcgttgcggttttttggtcgttttaggtttttgttatttcgtcgttgcggtttttttttcgcggtggttttttattttttgttttcgcggttttttattcgtttcggttgtttgtttttatttcgtttcggttttttgttcgatacggttttttgtattttttttttttttgtaattttaattttatttgaaat

SEQ ID NO: 19174 - DNA, 856 bp, Artificial Sequence
  chemically treated genomic DNA (Homo sapiens) CpG-island No: 19174
atttcaaataaaattaaaattacaaaaaaaaaaaaaatacaaaaaaccgtatcgaacaaaaaaccgaaacgaaataaaaacaaacaaccgaaacgaataaaaaaccgcgaaaacaaaaaataaaaaaccaccgcgaaaaaaaaaccgcaacgacgaaataacaaaaacctaaaacgaccaaaaaaccgcaacgacgaaaacgcaaaaaaccacgacgacgaatatacaaaaatccgcgacgacaaaaaaccgcgacgacgaaaaaacaaaaaacgaaaataacgaaaacgcaaaaaaccgcgaaaacgaaaaataaaaaaattataaaaaaccgcgacgtaataaaaaacaaaaaaccgcgacgaaaaataaaaaaccgtaaccaacaaaaaaccgcgtcgacgaaaaacaaaaaacaacgacgacgaaaaaccaaaaaccgaaacgaacaaaaaaccgaaacgaaataaaaacaaaaaaccgaaacgaaataaaaacaaaaaaccgaaacgaaataaaaacaaaaaaccacgacgacaaaaaataaaaaaccgcgacaaaaaaaaaatcgcgacgacgaaaaacaaaaaaccgcgataacgaaaaacaaaaaaccgcgataaaaaaaaaaccgcaacgacgaaaaacaaaaaaccgtaactaacaaaaaaccgaaacgaaataaaaacaaaaaaccgcgacgaacaaaaaacgaaaataaaataaaaaaaaaaaaccacgacgacgaaaaaacaaaaaaccgcgacgaataaaaaaccgcaacgacgaaaataaaaaacaaaaaaccgcgacgacgacgaaacaaaaaaccgaaacaaacaaaaaaccgcgacga

SEQ ID NO: 19175 - DNA, 856 bp, Artificial Sequence
  chemically treated genomic DNA (Homo sapiens) CpG-island No: 19175
attttaagtgaaattaaggttgtaaaggaggggggggtgtaaaaagtcgtgtcgggtaaaaagtcgaggcggggtgggggtaaatagtcgaggcgggtaaaaagtcgcgggggtagggggtaaaaagttatcgcggggaaaaagtcgtagcggcggggtggtaaaaatttggggcggttaaaaagtcgtagcggcgggggcgtaaaaagttacggcggcgggtgtgtaaaaattcgcggcgataaaaagtcgcggcggcggaggggtaaaaagcggaggtggcggggacgtaaaaagtcgcgggagcggggggtgggggggttgtaaaaagtcgcggcgtggtggggggtaaaaagtcgcggcggggggtaaaaagtcgtggttagtaaaaagtcgcgtcggcgggggataaaaagtagcggcggcggggggttaaaagtcgaggcgggtaaaaagtcgaggcggggtgggggtaaaaagtcgaggcggggtgggggtaaaaagtcgaggcggggtgggggtaaaaagttacggcggtagggggtaaaaagtcgcggtaggaaaaaagtcgcggcggcgggggataaaaagtcgcggtggcgggggataaaaagtcgcggtggggaaaaagtcgtagcggcggggggtaaaaagtcgtggttggtaaaaagtcgaggcggggtgggggtaaaaagtcgcggcgggtaaaaagcggaggtgagatggggggaaaaaattacggcggcgggggggtaaaaagtcgcggcgggtaaaaagtcgtagcggcgggggtggggggtaaaaagtcgcggcggcggcggagtaaaaagtcggggtaggtaaaaagtcgcggcgg

SEQ ID NO: 19176 - DNA, 856 bp, Artificial Sequence
  chemically treated genomic DNA (Homo sapiens) CpG-island No: 19176
ccgccgcgactttttacctaccccgactttttactccgccgccgccgcgactttttaccccccacccccgccgctacgactttttacccgccgcgactttttacccccccgccgccgtaattttttccccccatctcacctccgctttttacccgccgcgactttttacccccaccccgcctcgactttttaccaaccacgactttttaccccccgccgctacgactttttccccaccgcgactttttatcccccgccaccgcgactttttatcccccgccgccgcgacttttttcctaccgcgactttttaccccctaccgccgtaactttttacccccaccccgcctcgactttttacccccaccccgcctcgactttttacccccaccccgcctcgactttttacccgcctcgacttttaaccccccgccgccgctactttttatcccccgccgacgcgactttttactaaccacgactttttaccccccgccgcgactttttaccccccaccacgccgcgactttttacaacccccccaccccccgctcccgcgactttttacgtccccgccacctccgctttttacccctccgccgccgcgactttttatcgccgcgaatttttacacacccgccgccgtaactttttacgcccccgccgctacgactttttaaccgccccaaatttttaccaccccgccgctacgactttttccccgcgataactttttaccccctacccccgcgactttttacccgcctcgactatttacccccaccccgcctcgactttttacccgacacgactttttacacccccccctcctttacaaccttaatttcacttaaaat

SEQ ID NO: 19177 - DNA, 765 bp, Artificial Sequence
  chemically treated genomic DNA (Homo sapiens) CpG-island No: 19177
tcgtcgcggttttttgtttgtttcggttttttgttttttcgtcgtcgcggttttttgttttttattttcgtcgttgcggttttttattcgtcgcggttttttgttttttcgtcgtcgtggttttttttttttattttattttcgttttttgttcgtcgtggttttttgtttttattttatttcggttttttgttagttacggttttttttttatcgcggttttttatttttcgttatcgcggttttttattttttgtcgtcgtggttttttgtttttatttcgtttcggttttttgttcgtttcggtttttggttttttttcgtcgttgttttttgtttttcgtcgacgcggttttttgttggtcgcggttttttatttttcgtcgcggttttttgttttttattacgtcgcggttttttataatttttttatttttcgttttcgcggttttttgcgttttcgttatttcggttttttgttttttcgtcgtcgcggttttttgtcgtcgcggatttttgtatattcgtcgtcgtggttttttgcgttttcgtcgttgcggttttttggtcgttttaggtttttgttatttcgtcgttgcggtttttttttcgcggtggttttttattttttgttttcgcggttttttattcgtcgtggttgtttgtttttatttcgtttcggttttttgttcgatacggttttttgtttcgtcgcggttttttgtatttttttttttttttgtaattttaattttatttgaaatt

SEQ ID NO: 19178 - DNA, 765 bp, Artificial Sequence
  chemically treated genomic DNA (Homo sapiens) CpG-island No: 19178
aatttcaaataaaattaaaattacaaaaaaaaaaaaaaatacaaaaaaccgcgacgaaacaaaaaaccgtatcgaacaaaaaaccgaaacgaaataaaaacaaacaaccacgacgaataaaaaaccgcgaaaacaaaaaataaaaaaccaccgcgaaaaaaaaaccgcaacgacgaaataacaaaaacctaaaacgaccaaaaaaccgcaacgacgaaaacgcaaaaaaccacgacgacgaatatacaaaaatccgcgacgacaaaaaaccgcgacgacgaaaaaacaaaaaaccgaaataacgaaaacgcaaaaaaccgcgaaaacgaaaaataaaaaaattataaaaaaccgcgacgtaataaaaaacaaaaaaccgcgacgaaaaataaaaaaccgcgaccaacaaaaaaccgcgtcgacgaaaaacaaaaaacaacgacgaaaaaaaaccaaaaaccgaaacgaacaaaaaaccgaaacgaaataaaaacaaaaaaccacgacgacaaaaaataaaaaaccgcgataacgaaaaataaaaaaccgcgataaaaaaaaaaccgtaactaacaaaaaaccgaaataaaataaaaacaaaaaaccacgacgaacaaaaaacgaaaataaaataaaaaaaaaaaaccacgacgacgaaaaaacaaaaaaccgcgacgaataaaaaaccgcaacgacgaaaataaaaaacaaaaaaccgcgacgacgaaaaaacaaaaaaccgaaacaaacaaaaaaccgcgacga

SEQ ID NO: 19179 - DNA, 765 bp, Artificial Sequence
  chemically treated genomic DNA (Homo sapiens) CpG-island No: 19179
gattttaagtgaaattaaggttgtaaaggagggggggggtgtaaaaagtcgcggcggggtaaaaagtcgtgtcgggtaaaaagtcgaggcggggtgggggtaaatagttacggcgggtaaaaagtcgcgggggtagggggtaaaaagttatcgcggggaaaaagtcgtagcggcggggtggtaaaaatttggggcggttaaaaagtcgtagcggcgggggcgtaaaaagttacggcggcgggtgtgtaaaaattcgcggcgataaaaagtcgcggcggcggaggggtaaaaagtcgaggtggcggggacgtaaagagtcgcgggagcggggggtgggggggttgtaaaaagtcgcggcgtggtggggggtaaaaagtcgcggcggggggtaaaaagtcgcggttagtaaaaagtcgcgtcggcgggggataaaaagtagcggcgggggggggttaaaagtcgaggcgggtaaaaagtcgaggcggggtgggggtaaaaagttacggcggtagggggtaaaaagtcgcggtggcgggggataaaaagtcgcggtggggaaaaagtcgtggttggtaaaaagtcgaggtggggtgggggtaaaaagttacggcgggtaaaaagcggaggtgagatggggggaaaaaattacggcggcgggggggtaaaaagtcgcggcgggtaaaaagtcgtagcggcgggggtggggggtaaaaagtcgcggcggcgggggagtaaaaagtcggggtaggtaaaaagtcgcggcgg

SEQ ID NO: 19180 - DNA, 765 bp, Artificial Sequence
  chemically treated genomic DNA (Homo sapiens) CpG-island No: 19180
ccgccgcgactttttacctaccccgactttttactcccccgccgccgcgactttttaccccccacccccgccgctacgactttttacccgccgcgactttttacccccccgccgccgtaattttttccccccatctcacctccgctttttacccgccgtaactttttacccccaccccacctcgactttttaccaaccacgactttttccccaccgcgactttttatcccccgccaccgcgactttttaccccctaccgccgtaactttttacccccaccccgcctcgactttttacccgcctcgacttttaacccccccccgccgctactttttatcccccgccgacgcgactttttactaaccgcgactttttaccccccgccgcgactttttaccccccaccacgccgcgactttttacaacccccccaccccccgctcccgcgactctttacgtccccgccacctcgactttttacccctccgccgccgcgactttttatcgccgcgaatttttacacacccgccgccgtaactttttacgcccccgccgctacgactttttaaccgccccaaatttttaccaccccgccgctacgactttttccccgcgataactttttaccccctacccccgcgactttttacccgccgtaactatttacccccaccccgcctcgactttttacccgacacgactttttaccccgccgcgactttttacaccccccccctcctttacaaccttaatttcacttaaaatc

SEQ ID NO: 19181 - DNA, 955 bp, Artificial Sequence
  chemically treated genomic DNA (Homo sapiens) CpG-island No: 19181
  unsure (223, 235, 243, 384, 396..397, 403, 413, 449, 494..495, 901..902)
  unsure (911, 944)
tttatttaattgtttcgggttttcgcgcgcgcggtcgttttttttcgttttttatttattttgtgtyggtttcgtttttyttttttttattaggcgagtaggcgagcgggtagagttcgcggcggaggtcggttttcgggtcgggatatatttattcgttcgtttttttttttttttttttttttttttttttttttttttttttttttcgttttttcgttynttcgttyatgtntgtttttntttttttgttcgttcgttttcgtttttagcggcgtcgggtttttcgtttcgtttttttcgtgcgcggttttttcgggcgcggtttcggggtttatggtgacgaggcggcggtcgttcgagtttagcggcggcgggcggcgngarttggggcgnngggttngggtcgtttnttttarartacgcggggtcgggcggygggcgcgttnaggtagcggttgtragcgttttttcgygtcgcgttttcgcgtttnncgcgtcgcgttttcgcgcgtttggtttgcggggggtcgggtttgcgggcggtcgtcgcgtcgcgtatttatggacggttcggttattattatttaggtgattaatttttcggaggacgagggtcggttgtcgggcgcgggcgagaaaggtgaggaggggcgtaggcggtcgcgggttgggggcgagcgtatatttcgcgtcgttggagtttattgtcgggcgtcggtatgggtttgggggaggggtgtatagggttcggagggtgcgtgggtgtgggtgcgttcggaggagagcgaggttgttagagtgcgtgtgtcgattgagttagtgtgagtgtgtaggggttcgcgaagagattgggagcgagtgtgtgtgtatttaatcgggaggttgtgagtttgtgtgnnnacgttcgnagagaagttgtgagtttgtgtgtgtatttaatntagaggtttta

SEQ ID NO: 19182 - DNA, 955 bp, Artificial Sequence
  chemically treated genomic DNA (Homo sapiens) CpG-island No: 19182
  unsure (12, 45, 53..54, 461..462, 507, 543, 553, 559..560, 572, 713)
  unsure (721, 733)
taaaacctctanattaaatacacacacaaactcacaacttctctncgaacgtnnncacacaaactcacaacctcccgattaaatacacacacactcgctcccaatctcttcgcgaacccctacacactcacactaactcaatcgacacacgcactctaacaacctcgctctcctccgaacgcacccacacccacgcaccctccgaaccctatacacccctcccccaaacccataccgacgcccgacaataaactccaacgacgcgaaatatacgctcgcccccaacccgcgaccgcctacgcccctcctcacctttctcgcccgcgcccgacaaccgaccctcgtcctccgaaaaattaatcacctaaataataataaccgaaccgtccataaatacgcgacgcgacgaccgcccgcaaacccgaccccccgcaaaccaaacgcgcgaaaacgcgacgcgnnaaacgcgaaaacgcgacrcgaaaaaacgctyacaaccgctacctnaacgcgcccrccgcccgaccccgcgtaytytaaaanaaacgacccnaacccnncgccccaaytcncgccgcccgccgccgctaaactcgaacgaccgccgcctcgtcaccataaaccccgaaaccgcgcccgaaaaaaccgcgcacgaaaaaaacgaaacgaaaaacccgacgccgctaaaaacgaaaacgaacgaacaaaaaaanaaaaacanacatraacgaanraacgaaaaaacgaaaaaaaaaaaaaaaaaaaaaaaaaaaaaaaaaaaaaaaaaaaaaaacgaacgaataaatatatcccgacccgaaaaccgacctccgccgcgaactctacccgctcgcctactcgcctaataaaaaaaaraaaaacgaaaccracacaaaataaataaaaaacgaaaaaaaacgaccgcgcgcgcgaaaacccgaaacaattaaataaa

SEQ ID NO: 19183 - DNA, 955 bp, Artificial Sequence
  chemically treated genomic DNA (Homo sapiens) CpG-island No: 19183
  unsure (12, 45, 53..54, 461..462, 507, 543, 553, 559..560, 572, 713)
  unsure (721, 733)
tagaatttttgngttaggtgtatatataggtttataatttttttncgggcgtnnntatataaatttataatttttcggttagatgtatatatattcgtttttagttttttcgcgagtttttgtatatttatattggtttagtcggtatacgtattttggtagtttcgttttttttcgggcgtatttatatttacgtatttttcgggttttgtgtattttttttttaggtttatgtcggcgttcggtagtgaattttagcggcgcggggtgtgcgttcgtttttagttcgcggtcgtttgcgtttttttttatttttttcgttcgcgttcggtaatcggttttcgtttttcggggggttggttatttgggtgatgatggtcgggtcgtttatgggtgcgcggcgcggcggtcgttcgtaggttcggtttttcgtaagttaagcgcgcgggggcgcggcgcgnngggcgcgggggcgcggtrcgggggggcgttygtagtcgttgtttnggcgcgtttrtcgttcggtttcgcgtaytytggganaggcggtttnggtttnncgttttagyttncgtcgttcgtcgtcgttgggttcgagcggtcgtcgtttcgttattatgaatttcggagtcgcgttcgggagagtcgcgtacgggggaggcggagcgggaggttcggcgtcgttggaaacgggagcgggcgggtagaggggnagggatanatatrggcgggnrggcgggaaggcggggagagagggagggaaggagaaaggaagggagggaaagaagaagggcgggcgggtgggtgtgtttcggttcggggatcggttttcgtcgcgggttttgttcgttcgtttgttcgtttggtgggggagargggagcggggttratatagggtgagtggagggcgggagggggcggtcgcgcgcgcgggggttcggggtagttgagtggg

SEQ ID NO: 19184 - DNA, 955 bp, Artificial Sequence
  chemically treated genomic DNA (Homo sapiens) CpG-island No: 19184
  unsure (223, 235, 243, 384, 396..397, 403, 413, 449, 494..495, 901..902)
  unsure (911, 944)
cccactcaactaccccgaacccccgcgcgcgcgaccgccccctcccgccctccactcaccctatatyaaccccgctcccytctcccccaccaaacgaacaaacgaacgaacaaaacccgcgacgaaaaccgatccccgaaccgaaacacacccacccgcccgcccttcttctttccctcccttcctttctccttccctccctctctccccgccttcccgccyncccgccyatatntatccctncccctctacccgcccgctcccgtttccaacgacgccgaacctcccgctccgcctcccccgtacgcgactctcccgaacgcgactccgaaattcataataacgaaacgacgaccgctcgaacccaacgacgacgaacgacgnaarctaaaacgnnaaaccnaaaccgcctntcccarartacgcgaaaccgaacgayaaacgcgccnaaacaacgactacraacgcccccccgyaccgcgcccccgcgcccnncgcgccgcgcccccgcgcgcttaacttacgaaaaaccgaacctacgaacgaccgccgcgccgcgcacccataaacgacccgaccatcatcacccaaataaccaaccccccgaaaaacgaaaaccgattaccgaacgcgaacgaaaaaaataaaaaaaaacgcaaacgaccgcgaactaaaaacgaacgcacaccccgcgccgctaaaattcactaccgaacgccgacataaacctaaaaaaaaaatacacaaaacccgaaaaatacgtaaatataaatacgcccgaaaaaaaacgaaactaccaaaatacgtataccgactaaaccaatataaatatacaaaaactcgcgaaaaaactaaaaacgaatatatatacatctaaccgaaaaattataaatttatatannnacgcccgnaaaaaaattataaacctatatatacacctaacncaaaaattcta

SEQ ID NO: 19185 - DNA, 599 bp, Artificial Sequence
  chemically treated genomic DNA (Homo sapiens) CpG-island No: 19185
  unsure (371, 387..388, 460)
aggtcgaggataggacgtgggttgggcgggtagtgcggattcggaggagtaggaggcgaggttcgcggagttttgagttttcgttgttttgtcgcgcggtgatttcgtttcgcgtcgtttcgattcgtggttgtttcgagacgattggtgggggcgcggcgggcggcgcggttgttgggggtgggagacgcggcgaggagacgagcgaggttagcgagtttgagggaggatcgcgagtttgtcgtcgttatgttcgaggattcgagcgttttgttttggtttattaatagggacgattacgagttgtaggaggtratcggtgagagtaggcgttgcggaggggggagrcgcggcgttgggaggcggggranacgggaacgtgggganncgcgggagttcggggagcgtagtttttataggaattcgtggggcgtttgtggggttgggggtttgtaggatntttgtgtcgaggagcgcgtgtgagacgggaagggggttttgaggcgcgcgtttgtgaggtggcgtggggtggggtgaggtttgagggggtttaggagagatttgtgtataggatttttaaatgtgtggataggagcggt

SEQ ID NO: 19186 - DNA, 599 bp, Artificial Sequence
  chemically treated genomic DNA (Homo sapiens) CpG-island No: 19186
  unsure (140, 212..213, 229)
accgctcctatccacacatttaaaaatcctatacacaaatctctcctaaaccccctcaaacctcaccccaccccacgccacctcacaaacgcgcgcctcaaaacccccttcccgtctcacacgcgctcctcgacacaaanatcctacaaacccccaaccccacaaacgccccacgaattcctataaaaactacgctccccgaactcccgcgnntccccacgttcccgtntyccccgcctcccaacgccgcgyctcccccctccgcaacgcctactctcaccgatyacctcctacaactcgtaatcgtccctattaataaaccaaaacaaaacgctcgaatcctcgaacataacgacgacaaactcgcgatcctccctcaaactcgctaacctcgctcgtctcctcgccgcgtctcccacccccaacaaccgcgccgcccgccgcgcccccaccaatcgtctcgaaacaaccacgaatcgaaacgacgcgaaacgaaatcaccgcgcgacaaaacaacgaaaactcaaaactccgcgaacctcgcctcctactcctccgaatccgcactacccgcccaacccacgtcctatcctcgacct

SEQ ID NO: 19187 - DNA, 599 bp, Artificial Sequence
  chemically treated genomic DNA (Homo sapiens) CpG-island No: 19187
  unsure (140, 212..213, 229)
gtcgtttttgtttatatatttgagaattttgtatataaattttttttgagtttttttaagttttattttattttacgttattttataggcgcgcgttttaaaatttttttttcgttttatacgcgtttttcgatataagngttttataagtttttagttttataagcgttttacgaatttttatgagggttgcgtttttcgagttttcgcgnntttttacgttttcgtntytttcgttttttagcgtcgcgyttttttttttcgtagcgtttgtttttatcgatyattttttgtagttcgtaatcgtttttgttgatggattagggtagggcgttcgagttttcggatatgacggcggtaggttcgcggtttttttttaaattcgttgatttcgttcgttttttcgtcgcgttttttatttttaatagtcgcgtcgttcgtcgcgtttttattaatcgtttcggaatagttacgggtcggaacggcgcggggcggggttatcgcgcggtagagtagcgggggtttagagtttcgcggatttcgttttttgttttttcgagttcgtattgttcgtttagtttacgttttgttttcggttt

SEQ ID NO: 19188 - DNA, 599 bp, Artificial Sequence
  chemically treated genomic DNA (Homo sapiens) CpG-island No: 19188
  unsure (371, 387..388, 460)
aaaccgaaaacaaaacgtaaactaaacgaacaatacgaactcgaaaaaacaaaaaacgaaatccgcgaaactctaaacccccgctactctaccgcgcgataaccccgccccgcgccgttccgacccgtaactattccgaaacgattaataaaaacgcgacgaacgacgcgactattaaaaataaaaaacgcgacgaaaaaacgaacgaaatcaacgaatttaaaaaaaaaccgcgaacctaccgccgtcatatccgaaaactcgaacgccctaccctaatccatcaacaaaaacgattacgaactacaaaaaatratcgataaaaacaaacgctacgaaaaaaaaaarcgcgacgctaaaaaacgaaaranacgaaaacgtaaaaanncgcgaaaactcgaaaaacgcaaccctcataaaaattcgtaaaacgcttataaaactaaaaacttataaaacncttatatcgaaaaacgcgtataaaacgaaaaaaaaattttaaaacgcgcgcctataaaataacgtaaaataaaataaaacttaaaaaaactcaaaaaaaatttatatacaaaattctcaaatatataaacaaaaacgac

SEQ ID NO: 19189 - DNA, 1051 bp, Artificial Sequence
  chemically treated genomic DNA (Homo sapiens) CpG-island No: 19189
attttcgttcgcgcgtttcgttttgttttttagtaagttggtgtacgcgcgtttttttatagggcgcgggatgggggcggggttttcgtgttgttgtttttttggggtttcgttttttaggggggcgcggattacgcggtcggagggttcgtttttttttttttttttcgtttagttcgttcgtttttttgtatttaatattcgggttttttcgttggttcggtttcgtggtcgtcgtttaggatttattttggattcggtttagttttttttttttttattttttttttcgtttatggttttttcggattcggtttttgcgttcggggttcgggtttagtttcgtcgcgttatgtttgagtcgggcgcgtttcggttttcgcgtcgtttcggagttcgggtcgtagtttgcgtcgttcgtagcggttttgagttcggtttcgtcgatcggtttttggagttcgaacgttgttcggggacgaaggcgtaggaagcgcgtagggaacgagatcgaaggaaggagcgggaaggagagcgtagtcgtcgtttggttttgcgcgtttcgggagcgtcgtgcggttttgttcgcgggtttcgggtgtgcgcggggcggcgtcgcggaatatgacggcgttttgggtggttttcgtttttttttggggatcgttgtgcgtcggtaagaattgggcgcggcgtggggacgtcgagagggcgcgcggggttggtttttggcgtcgcgcggtgtttattaataaagggcgggttcggggttttgtcgtcgtattatttgtatttagtttttattttcgggggcgtgggttgggggcgcggtgggcgttcggttcgtcgaatttgggggtacgattttgtttgtgtagttatttgcgggattttggtttttagaggcgtttttgcgatgggggtcgggacgcggagttttagggtcggagttcgggttacgcgggcgcgtggaatttagggaaagagtgaggaaaatttgagtttggggaaggcggttaagaggggtgggtagattttattgggggtggta

SEQ ID NO: 19190 - DNA, 1051 bp, Artificial Sequence
  chemically treated genomic DNA (Homo sapiens) CpG-island No: 19190
taccacccccaataaaatctacccacccctcttaaccgccttccccaaactcaaattttcctcactctttccctaaattccacgcgcccgcgtaacccgaactccgaccctaaaactccgcgtcccgacccccatcgcaaaaacgcctctaaaaaccaaaatcccgcaaataactacacaaacaaaatcgtacccccaaattcgacgaaccgaacgcccaccgcgcccccaacccacgcccccgaaaataaaaactaaatacaaataatacgacgacaaaaccccgaacccgccctttattaataaacaccgcgcgacgccaaaaaccaaccccgcgcgccctctcgacgtccccacgccgcgcccaattcttaccgacgcacaacgatccccaaaaaaaaacgaaaaccacccaaaacgccgtcatattccgcgacgccgccccgcgcacacccgaaacccgcgaacaaaaccgcacgacgctcccgaaacgcgcaaaaccaaacgacgactacgctctccttcccgctccttccttcgatctcgttccctacgcgcttcctacgccttcgtccccgaacaacgttcgaactccaaaaaccgatcgacgaaaccgaactcaaaaccgctacgaacgacgcaaactacgacccgaactccgaaacgacgcgaaaaccgaaacgcgcccgactcaaacataacgcgacgaaactaaacccgaaccccgaacgcaaaaaccgaatccgaaaaaaccataaacgaaaaaaaaaataaaaaaaaaaaaaactaaaccgaatccaaaataaatcctaaacgacgaccacgaaaccgaaccaacgaaaaaacccgaatattaaatacaaaaaaacgaacgaactaaacgaaaaaaaaaaaaaaaaacgaaccctccgaccgcgtaatccgcgcccccctaaaaaacgaaaccccaaaaaaacaacaacacgaaaaccccgcccccatcccgcgccctataaaaaaacgcgcgtacaccaacttactaaaaaacaaaacgaaacgcgcgaacgaaaat

SEQ ID NO: 19191 - DNA, 1051 bp, Artificial Sequence
  chemically treated genomic DNA (Homo sapiens) CpG-island No: 19191
tgttatttttaatgagatttgtttattttttttggtcgttttttttaggtttaggttttttttattttttttttgggttttacgcgttcgcgtagttcgaatttcgattttgaggtttcgcgtttcggtttttatcgtaggggcgtttttaggaattagaatttcgtagatgattatatagataagatcgtgtttttaagttcggcgagtcgggcgtttatcgcgtttttagtttacgttttcggaggtgagggttgaatataggtggtgcggcgataaggtttcgggttcgttttttgttggtaaatatcgcgcggcgttagaggttagtttcgcgcgttttttcggcgtttttacgtcgcgtttagtttttatcggcgtatagcgatttttagaggagggcgagggttatttagggcgtcgttatgtttcgcggcgtcgtttcgcgtatattcggagttcgcgggtagggtcgtacggcgttttcggggcgcgtagggttaggcggcggttgcgttttttttttcgttttttttttcggtttcgttttttgcgcgttttttgcgttttcgttttcgagtagcgttcgggttttaagggtcggtcggcggggtcgggtttagggtcgttgcgggcggcgtaggttgcggttcgggtttcggggcgacgcgggggtcggggcgcgttcgatttaggtatagcgcggcggggttgggttcgggtttcgggcgtaggggtcgagttcggaggggttatgaacggggggaggggtgggggggaggggagttgaatcgagtttaaaatggattttgagcggcggttacggagtcgagttagcggggaaattcggatgttggatataaagaggcgggcgggttgggcggggagggggaggggaggcgggtttttcggtcgcgtggttcgcgtttttttgaggggcggggttttagagaaataataatacggaggtttcgtttttatttcgcgttttgtgggaggacgcgcgtgtattaatttgttggaggatagggcggggcgcgcggacggaggt

SEQ ID NO: 19192 - DNA, 1051 bp, Artificial Sequence
  chemically treated genomic DNA (Homo sapiens) CpG-island No: 19192
acctccgtccgcgcgccccgccctatcctccaacaaattaatacacgcgcgtcctcccacaaaacgcgaaataaaaacgaaacctccgtattattatttctctaaaaccccgcccctcaaaaaaacgcgaaccacgcgaccgaaaaacccgcctcccctccccctccccgcccaacccgcccgcctctttatatccaacatccgaatttccccgctaactcgactccgtaaccgccgctcaaaatccattttaaactcgattcaactcccctcccccccacccctccccccgttcataacccctccgaactcgacccctacgcccgaaacccgaacccaaccccgccgcgctatacctaaatcgaacgcgccccgacccccgcgtcgccccgaaacccgaaccgcaacctacgccgcccgcaacgaccctaaacccgaccccgccgaccgacccttaaaacccgaacgctactcgaaaacgaaaacgcaaaaaacgcgcaaaaaacgaaaccgaaaaaaaaaacgaaaaaaaaaacgcaaccgccgcctaaccctacgcgccccgaaaacgccgtacgaccctacccgcgaactccgaatatacgcgaaacgacgccgcgaaacataacgacgccctaaataaccctcgccctcctctaaaaatcgctatacgccgataaaaactaaacgcgacgtaaaaacgccgaaaaaacgcgcgaaactaacctctaacgccgcgcgatatttaccaacaaaaaacgaacccgaaaccttatcgccgcaccacctatattcaaccctcacctccgaaaacgtaaactaaaaacgcgataaacgcccgactcgccgaacttaaaaacacgatcttatctatataatcatctacgaaattctaattcctaaaaacgcccctacgataaaaaccgaaacgcgaaacctcaaaatcgaaattcgaactacgcgaacgcgtaaaacccaaaaaaaaaataaaaaaaacctaaacctaaaaaaaacgaccaaaaaaaataaacaaatctcattaaaaataaca

SEQ ID NO: 19193 - DNA, 696 bp, Artificial Sequence
  chemically treated genomic DNA (Homo sapiens) CpG-island No: 19193
gcggttgcgggcgtgtggttggaggtgttcggttagcgtaagagagtttgggggtaagtgggcgcgggcgtaaataagcggagtttcgtttggaaagtttgttttttttacggtttaagtatcgattttttttttttagtggtgtcggggtgcgtttaatttcggcgggcgcgtcgggacgttttttggttagttttgggaaacgtggggagttgggtattgaagttttggcgagaaggtcggggcggttggtattcggtcgtcgggttttgcgcgtttttgtttttagtttttattatatatgtagcgcgggtttttcgtcgttttcggtggtattcgtttggagtttgggaaattttcgaggggcggggtcgggcgtgtaggggcggggtcggagtttttacgttgttgcgggggtggggatttgggatttgcgttttatttttattttggttttatttttttttgtgcgtcgtcgtgaggtttagtttatatcgaaagcgagtgagttttgtagggtagtagcgcgcgcgcgcgtagtttgagttcggaaatcgaagggtaaagattagttggtatttgagtatcgtatggaagagggcgttgtagtttttttggagtcgttttttggaggcgaagtggtggtcgtgttggattttttgtttttttttgtttcgtttttttgggatgtttttt

SEQ ID NO: 19194 - DNA, 696 bp, Artificial Sequence
  chemically treated genomic DNA (Homo sapiens) CpG-island No: 19194
aaaaaacatcccaaaaaaacgaaacaaaaaaaaacaaaaaatccaacacgaccaccacttcgcctccaaaaaacgactccaaaaaaactacaacgccctcttccatacgatactcaaataccaactaatctttacccttcgatttccgaactcaaactacgcgcgcgcgcgctactaccctacaaaactcactcgctttcgatataaactaaacctcacgacgacgcacaaaaaaaaataaaaccaaaataaaaataaaacgcaaatcccaaatccccacccccgcaacaacgtaaaaactccgaccccgcccctacacgcccgaccccgcccctcgaaaatttcccaaactccaaacgaataccaccgaaaacgacgaaaaacccgcgctacatatataataaaaactaaaaacaaaaacgcgcaaaacccgacgaccgaataccaaccgccccgaccttctcgccaaaacttcaatacccaactccccacgtttcccaaaactaaccaaaaaacgtcccgacgcgcccgccgaaattaaacgcaccccgacaccactaaaaaaaaaaaatcgatacttaaaccgtaaaaaaaacaaactttccaaacgaaactccgcttatttacgcccgcgcccacttacccccaaactctcttacgctaaccgaacacctccaaccacacgcccgcaaccgc

SEQ ID NO: 19195 - DNA, 696 bp, Artificial Sequence
  chemically treated genomic DNA (Homo sapiens) CpG-island No: 19195
aaaaggtattttaagggagcggggtaaaaaaaagtagaaagtttaatacgattattatttcgtttttaaaaagcggttttaggagagttgtaacgtttttttttatacggtatttaggtgttagttggtttttgtttttcggttttcggatttaggttgcgcgcgcgcgcgttattattttatagaatttattcgttttcggtgtaaattaagttttacgacgacgtataggagaaggtagaattagggtgggaatgggacgtaaattttaaatttttattttcgtagtagcgtggggatttcggtttcgtttttgtacgttcggtttcgtttttcgagggttttttagattttaggcgggtgttatcgagggcggcgggggattcgcgttgtatgtgtaatgggggttgggaataaagacgcgtaggattcggcggtcgggtattagtcgtttcgattttttcgttagagttttaatgtttagttttttacgttttttaggattggttaggggacgtttcggcgcgttcgtcggggttaggcgtatttcggtattattgagagagggaaatcggtgtttggatcgtaggagaaataagttttttaggcggaatttcgtttgtttacgttcgcgtttatttatttttaaatttttttgcgttggtcgaatatttttagttatacgttcgtagtcgt

SEQ ID NO: 19196 - DNA, 696 bp, Artificial Sequence
  chemically treated genomic DNA (Homo sapiens) CpG-island No: 19196
acgactacgaacgtataactaaaaatattcgaccaacgcaaaaaaatttaaaaataaataaacgcgaacgtaaacaaacgaaattccgcctaaaaaacttatttctcctacgatccaaacaccgatttccctctctcaataataccgaaatacgcctaaccccgacgaacgcgccgaaacgtcccctaaccaatcctaaaaaacgtaaaaaactaaacattaaaactctaacgaaaaaatcgaaacgactaatacccgaccgccgaatcctacgcgtctttattcccaacccccattacacatacaacgcgaatcccccgccgccctcgataacacccgcctaaaatctaaaaaaccctcgaaaaacgaaaccgaacgtacaaaaacgaaaccgaaatccccacgctactacgaaaataaaaatttaaaatttacgtcccattcccaccctaattctaccttctcctatacgtcgtcgtaaaacttaatttacaccgaaaacgaataaattctataaaataataacgcgcgcgcgcgcaacctaaatccgaaaaccgaaaaacaaaaaccaactaacacctaaataccgtataaaaaaaaacgttacaactctcctaaaaccgctttttaaaaacgaaataataatcgtattaaactttctacttttttttaccccgctcccttaaaatacctttt

SEQ ID NO: 19197 - DNA, 664 bp, Artificial Sequence
  chemically treated genomic DNA (Homo sapiens) CpG-island No: 19197
aggtttcgcgtcgtgggggaagcgaaaggggtagtgtggggaagtggtcgaggggtcgggtgcgggatggtttgtagagaggtaggcggcggtgcggagtcgggaattacgcgtttattttttaagtcggacgggttcggcgggggtgggcgagatattgggaatagcggttagttttagagggcgcgaggcgggtcgcgcggggaggggtggcgcgcgcggttggggggtagtgagggtcgtcgcggcggcgcgtagtacggcgggaatatggcgcgcgaaattggcgcgcgcgtttagttggcgggatttttagttttaggtggacgcggttcggatttcgtggatatggagtagtcgtcgttttcggcgttcgagtcgatttaagggtcgattttcgtaaggagtcgaaggcggcgggagttcgagtcgtcgttagcgtcggcgtaggtgagtgggtgaggggttcgggtcgggagattttttttgtgaaatttcggcggtgggagtcgggttaggttttagcggttgaggagcgtttgtgaggcgtaaggcgtttcgtagttcgggttcgattttagtcgttagtcgttaggaggcgggaattggttcgtagtttgtttgttttagtttttacgggagtgtgtgtgggtgtgtgagggtg

SEQ ID NO: 19198 - DNA, 664 bp, Artificial Sequence
  chemically treated genomic DNA (Homo sapiens) CpG-island No: 19198
caccctcacacacccacacacactcccgtaaaaactaaaacaaacaaactacgaaccaattcccgcctcctaacgactaacgactaaaatcgaacccgaactacgaaacgccttacgcctcacaaacgctcctcaaccgctaaaacctaacccgactcccaccgccgaaatttcacaaaaaaaatctcccgacccgaacccctcacccactcacctacgccgacgctaacgacgactcgaactcccgccgccttcgactccttacgaaaatcgacccttaaatcgactcgaacgccgaaaacgacgactactccatatccacgaaatccgaaccgcgtccacctaaaactaaaaatcccgccaactaaacgcgcgcgccaatttcgcgcgccatattcccgccgtactacgcgccgccgcgacgaccctcactaccccccaaccgcgcgcgccacccctccccgcgcgacccgcctcgcgccctctaaaactaaccgctattcccaatatctcgcccacccccgccgaacccgtccgacttaaaaaataaacgcgtaattcccgactccgcaccgccgcctacctctctacaaaccatcccgcacccgacccctcgaccacttccccacactacccctttcgcttcccccacgacgcgaaacct

SEQ ID NO: 19199 - DNA, 664 bp, Artificial Sequence
  chemically treated genomic DNA (Homo sapiens) CpG-island No: 19199
tatttttatatatttatatatattttcgtggaaattgaggtaggtaggttgcggattagttttcgttttttgacggttggcggttgggatcgaattcggattgcgagacgttttacgttttataggcgttttttagtcgttgaggtttggttcggtttttatcgtcggagttttataaagaaagtttttcggttcgagttttttatttatttatttgcgtcgacgttggcggcgattcgggttttcgtcgttttcggttttttgcgggggtcggtttttgggtcggttcgggcgtcgggggcggcgattgttttatatttacggggttcgggtcgcgtttatttggagttaagggtttcgttagttaggcgcgcgcgttagtttcgcgcgttatgttttcgtcgtgttgcgcgtcgtcgcggcgatttttattgttttttaatcgcgcgcgttattttttttcgcgcggttcgtttcgcgttttttggagttggtcgttgtttttagtgtttcgtttattttcgtcgggttcgttcgatttggagggtgagcgcgtggttttcggtttcgtatcgtcgtttgtttttttgtagattatttcgtattcgatttttcggttatttttttatattgtttttttcgttttttttacgacgcggggttt

SEQ ID NO: 19200 - DNA, 664 bp, Artificial Sequence
  chemically treated genomic DNA (Homo sapiens) CpG-island No: 19200
aaaccccgcgtcgtaaaaaaaacgaaaaaaacaatataaaaaaataaccgaaaaatcgaatacgaaataatctacaaaaaaacaaacgacgatacgaaaccgaaaaccacgcgctcaccctccaaatcgaacgaacccgacgaaaataaacgaaacactaaaaacaacgaccaactccaaaaaacgcgaaacgaaccgcgcgaaaaaaaataacgcgcgcgattaaaaaacaataaaaatcgccgcgacgacgcgcaacacgacgaaaacataacgcgcgaaactaacgcgcgcgcctaactaacgaaacccttaactccaaataaacgcgacccgaaccccgtaaatataaaacaatcgccgcccccgacgcccgaaccgacccaaaaaccgacccccgcaaaaaaccgaaaacgacgaaaacccgaatcgccgccaacgtcgacgcaaataaataaataaaaaactcgaaccgaaaaactttctttataaaactccgacgataaaaaccgaaccaaacctcaacgactaaaaaacgcctataaaacgtaaaacgtctcgcaatccgaattcgatcccaaccgccaaccgtcaaaaaacgaaaactaatccgcaacctacctacctcaatttccacgaaaatatatataaatatataaaaata

SEQ ID NO: 19201 - DNA, 962 bp, Artificial Sequence
  chemically treated genomic DNA (Homo sapiens) CpG-island No: 19201
gtaacggtgtcgttaggtagaaggtcgggttcgggaggtttcgggaggttttcgtcgttgtatattatttttcgtcgagtcgggttagggacgtcgtcgtttagttttttgggtcgttttttcgagtatttgtagttgcggatggatagcgggtagtcgggcgcgtttcgagtttcgggcgttaggagtagtaggagttacggtagtagcggtagtagtaggcgcgcgggcgtttttcgtattttgcgtttttcggcgtttattaatttatcgtttcgcggggatttatagcgttggggtcgggttgcgcgtcggtcggagggatttaggcgtgcgggaggagtgtttagcgggggttcggggttttcgagggcgtggaggggggttttgggcggaggcgagtttcggggttttcgtcgtcgcgtttcgggggtatgttttgcgagcgtttcggcggggaggacgtcggcgcggttgttagcgtagcgcgggtagtttttagttgcgcgatcggagttttagcgttcggttttcgggatattggaggttcggttttttcgcgtcgtttgttcgttgggcgttgggttgggatttagcggatcgcgtcgggtttttgttgtcgtcgtcgtcgtcgtttcgtgttatggatggaggtagtttcgcgtcgcgtcgttttcgtcgtcggttttcgttcgttcgggtttttcgcggggttttagcgtcgatcgatacgcggttaggtttagattttttgtcgagtgggggcgggttagttggttcgaggattttgcgttttcgcgttcgttttgtattaatatttttttttcgtttgttttcgcgtttcgggttaggatttttttttttcgtaatttattttagatttttgagtcgattattattattttttataaaatttttttcgttcgtgtcggtgtagtttgcgtttttaggttgttggggtt

SEQ ID NO: 19202 - DNA, 962 bp, Artificial Sequence
  chemically treated genomic DNA (Homo sapiens) CpG-island No: 19202
aaccccaacaacctaaaaacgcaaactacaccgacacgaacgaaaaaaattttataaaaaataataataatcgactcaaaaatctaaaataaattacgaaaaaaaaaaatcctaacccgaaacgcgaaaacaaacgaaaaaaaaatattaatacaaaacgaacgcgaaaacgcaaaatcctcgaaccaactaacccgcccccactcgacaaaaaatctaaacctaaccgcgtatcgatcgacgctaaaaccccgcgaaaaacccgaacgaacgaaaaccgacgacgaaaacgacgcgacgcgaaactacctccatccataacacgaaacgacgacgacgacgacaacaaaaacccgacgcgatccgctaaatcccaacccaacgcccaacgaacaaacgacgcgaaaaaaccgaacctccaatatcccgaaaaccgaacgctaaaactccgatcgcgcaactaaaaactacccgcgctacgctaacaaccgcgccgacgtcctccccgccgaaacgctcgcaaaacatacccccgaaacgcgacgacgaaaaccccgaaactcgcctccgcccaaaacccccctccacgccctcgaaaaccccgaacccccgctaaacactcctcccgcacgcctaaatccctccgaccgacgcgcaacccgaccccaacgctataaatccccgcgaaacgataaattaataaacgccgaaaaacgcaaaatacgaaaaacgcccgcgcgcctactactaccgctactaccgtaactcctactactcctaacgcccgaaactcgaaacgcgcccgactacccgctatccatccgcaactacaaatactcgaaaaaacgacccaaaaaactaaacgacgacgtccctaacccgactcgacgaaaaataatatacaacgacgaaaacctcccgaaacctcccgaacccgaccttctacctaacgacaccgttac

SEQ ID NO: 19203 - DNA, 962 bp, Artificial Sequence
  chemically treated genomic DNA (Homo sapiens) CpG-island No: 19203
ggttttagtagtttggagacgtaagttgtatcggtacggacgagggaaattttgtggaaggtggtggtggtcggtttagaggtttgagatgggttgcggaaaggaagggttttggttcggggcgcggggataagcgggagaggagtgttggtgtagggcgggcgcggggacgtagggttttcgaattagttggttcgtttttattcggtagagggtttaggtttggtcgcgtgtcggtcggcgttagggtttcgcggaaggttcgggcggacggggatcggcggcgggagcggcgcggcgcggagttgtttttatttatggtacggagcggcggcggcggcggtagtaggagttcggcgcgattcgttaggttttagtttagcgtttagcgagtaggcgacgcggaggggtcgggtttttagtgtttcgagggtcgggcgttgagatttcggtcgcgtagttgggagttgttcgcgttgcgttgatagtcgcgtcgacgtttttttcgtcggggcgttcgtaggatatgttttcggggcgcggcggcggggatttcggggttcgttttcgtttagggtttttttttacgttttcgggagtttcgggttttcgttgagtatttttttcgtacgtttgggttttttcggtcggcgcgtagttcggttttagcgttgtgggttttcgcggggcgatgggttgatgggcgtcgggggacgtaggatgcggggggcgttcgcgcgtttgttgttgtcgttgttgtcgtggtttttgttgtttttggcgttcgaggttcggggcgcgttcggttgttcgttatttattcgtagttgtaagtgttcgggggagcggtttaaggggttgagcggcggcgtttttggttcggttcggcggagggtggtgtgtagcggcggggatttttcggagtttttcgagttcggttttttgtttaacggtatcgttat

SEQ ID NO: 19204 - DNA, 962 bp, Artificial Sequence
  chemically treated genomic DNA (Homo sapiens) CpG-island No: 19204
ataacgataccgttaaacaaaaaaccgaactcgaaaaactccgaaaaatccccgccgctacacaccaccctccgccgaaccgaaccaaaaacgccgccgctcaaccccttaaaccgctcccccgaacacttacaactacgaataaataacgaacaaccgaacgcgccccgaacctcgaacgccaaaaacaacaaaaaccacgacaacaacgacaacaacaaacgcgcgaacgccccccgcatcctacgtcccccgacgcccatcaacccatcgccccgcgaaaacccacaacgctaaaaccgaactacgcgccgaccgaaaaaacccaaacgtacgaaaaaaatactcaacgaaaacccgaaactcccgaaaacgtaaaaaaaaaccctaaacgaaaacgaaccccgaaatccccgccgccgcgccccgaaaacatatcctacgaacgccccgacgaaaaaaacgtcgacgcgactatcaacgcaacgcgaacaactcccaactacgcgaccgaaatctcaacgcccgaccctcgaaacactaaaaacccgacccctccgcgtcgcctactcgctaaacgctaaactaaaacctaacgaatcgcgccgaactcctactaccgccgccgccgccgctccgtaccataaataaaaacaactccgcgccgcgccgctcccgccgccgatccccgtccgcccgaaccttccgcgaaaccctaacgccgaccgacacgcgaccaaacctaaaccctctaccgaataaaaacgaaccaactaattcgaaaaccctacgtccccgcgcccgccctacaccaacactcctctcccgcttatccccgcgccccgaaccaaaacccttcctttccgcaacccatctcaaacctctaaaccgaccaccaccaccttccacaaaatttccctcgtccgtaccgatacaacttacgtctccaaactactaaaacc

SEQ ID NO: 19205 - DNA, 1137 bp, Artificial Sequence
  chemically treated genomic DNA (Homo sapiens) CpG-island No: 19205
cgttatatacgatatcgttaacgaggatattgtatacgatatcgttaacgaggtcgtcgataagggtatcgttaacgaggatgtcgtttacggtatcgttaacgagtacgtcgtttacggtatcgttagcgaggacgtcgtttacggtatcgttagcgaggacgtcgtttagggtatcgttagcgaggacgtcgtttagggtatcgttaacgaggatattatttagggtatcgttaaggagtacgtcgtttacggtatcgttaacgaggacgtcgtttagggtatcgttaacgaggacgtcgtttagggtatcgttaacgaggacgtcgtttagggtatcgttaaggaggacgtcgtttagggtatcgttaacgagggcgtcgtttagggtatcgttaaagaggacgtcgtttagggtatcgttaacgaggtcgtcgataagggtatcgttaacgaggatgtcgtttacggtatcgttaacgaggacgtcgtttacggtatcgttagcgaggacgtcgtttacggtatcgttagcgaggacgtcgtttacggtatcgttagcgaggacgtcgtttagggtatcgttaacgaggacgttatttagggtatcgttaaggagtacgtcgtttacggtatcgttaacgaggacgtcgtttagggtatcgttaacgaggacgtcgtttagggtatcgttaacgaggacgtcgtttagggtatcgttaaggaggacgtcgtttagggtatcgttaaggaggacgtcgtttagggtatcgttaacgagggcgtcgtttagggtatcgttaaagaggacgtcgtttacggtatcgttaacgaggacgtcgtttagggtatcgttaacgaggacgtcgtttacggaatcgttagtgaggacgtcgtttacggtatcgttagcgaggacgtcgtttagggtatcgataaggaggatgtcgtttagggtatcgttaacgaggacgtcgtttagggtatcgttaacgaggacgtcgtttagggtatcgttaaagaggacgtcgtttacggtatcgttaacgagttgtatacgatatcgttaacgaggatattttataagtcgtcgttaataagtatattgtatataatatcgttaatgagggtattgta

SEQ ID NO: 19206 - DNA, 1137 bp, Artificial Sequence
  chemically treated genomic DNA (Homo sapiens) CpG-island No: 19206
tacaataccctcattaacgatattatatacaatatacttattaacgacgacttataaaatatcctcgttaacgatatcgtatacaactcgttaacgataccgtaaacgacgtcctctttaacgataccctaaacgacgtcctcgttaacgataccctaaacgacgtcctcgttaacgataccctaaacgacatcctccttatcgataccctaaacgacgtcctcgctaacgataccgtaaacgacgtcctcactaacgattccgtaaacgacgtcctcgttaacgataccctaaacgacgtcctcgttaacgataccgtaaacgacgtcctctttaacgataccctaaacgacgccctcgttaacgataccctaaacgacgtcctccttaacgataccctaaacgacgtcctccttaacgataccctaaacgacgtcctcgttaacgataccctaaacgacgtcctcgttaacgataccctaaacgacgtcctcgttaacgataccgtaaacgacgtactccttaacgataccctaaataacgtcctcgttaacgataccctaaacgacgtcctcgctaacgataccgtaaacgacgtcctcgctaacgataccgtaaacgacgtcctcgctaacgataccgtaaacgacgtcctcgttaacgataccgtaaacgacatcctcgttaacgatacccttatcgacgacctcgttaacgataccctaaacgacgtcctctttaacgataccctaaacgacgccctcgttaacgataccctaaacgacgtcctccttaacgataccctaaacgacgtcctcgttaacgataccctaaacgacgtcctcgttaacgataccctaaacgacgtcctcgttaacgataccgtaaacgacgtactccttaacgataccctaaataatatcctcgttaacgataccctaaacgacgtcctcgctaacgataccctaaacgacgtcctcgctaacgataccgtaaacgacgtcctcgctaacgataccgtaaacgacgtactcgttaacgataccgtaaacgacatcctcgttaacgatacccttatcgacgacctcgttaacgatatcgtatacaatatcctcgttaacgatatcgtatataacg

SEQ ID NO: 19207 - DNA, 1137 bp, Artificial Sequence
  chemically treated genomic DNA (Homo sapiens) CpG-island No: 19207
tatagtgtttttattagcgatgttgtgtatagtgtatttgttagcgacggtttgtagggtgttttcgttagcgatgtcgtatatagttcgttggcgatgtcgtgggcggcgttttttttggcgatgttttgggcggcgttttcgttggcgatgttttgggcggcgttttcgttggcgatgttttgggcggtattttttttgtcgatgttttggacggcgttttcgttggcgatgtcgtgggcggcgtttttattggcgatttcgtgggcggcgttttcgttggcgatgttttgggcggcgttttcgttggcgatgtcgtgggcggcgttttttttggcgatgttttgggcggcgttttcgttggcgatgttttgggcggcgttttttttggcgatgttttgggcggcgttttttttggcgatgttttgggcggcgttttcgttggcgatgttttgggcggcgttttcgttggcgatgttttgggcggcgttttcgttggcgatgtcgtggacggcgtattttttggcgatgttttggatggcgttttcgttggcgatgttttgggcggcgttttcgttggcgatgtcgtgggcggcgttttcgttggcgatgtcgtgggcggcgttttcgttggcgatgtcgtgggcggcgttttcgttggcgatgtcgtgggcggtattttcgttggcgatgtttttgtcggcggtttcgttagcgatgttttgggcggcgttttttttggcgatgttttgggcggcgttttcgttggcgatgttttgggcggcgttttttttggcgatgttttgggcggcgttttcgttggcgatgttttgggcggcgttttcgttggcgatgttttgggcggcgttttcgttggcgatgtcgtggacggcgtattttttggcgatgttttggatggtgttttcgttggcgatgttttgggcggcgttttcgttggcgatgttttgggcggcgttttcgttggcgatgtcgtgggcggcgttttcgttggcgatgtcgtgggcggcgtattcgttggcgatgtcgtgggcggtattttcgttggcgatgtttttgtcggcggtttcgttagcgatgtcgtgtatagtattttcgttagcgatgtcgtgtgtggcg

SEQ ID NO: 19208 - DNA, 1137 bp, Artificial Sequence
  chemically treated genomic DNA (Homo sapiens) CpG-island No: 19208
cgccacacacgacatcgctaacgaaaatactatacacgacatcgctaacgaaaccgccgacaaaaacatcgccaacgaaaataccgcccacgacatcgccaacgaatacgccgcccacgacatcgccaacgaaaacgccgcccacgacatcgccaacgaaaacgccgcccaaaacatcgccaacgaaaacgccgcccaaaacatcgccaacgaaaacaccatccaaaacatcgccaaaaaatacgccgtccacgacatcgccaacgaaaacgccgcccaaaacatcgccaacgaaaacgccgcccaaaacatcgccaacgaaaacgccgcccaaaacatcgccaaaaaaaacgccgcccaaaacatcgccaacgaaaacgccgcccaaaacatcgccaaaaaaaacgccgcccaaaacatcgctaacgaaaccgccgacaaaaacatcgccaacgaaaataccgcccacgacatcgccaacgaaaacgccgcccacgacatcgccaacgaaaacgccgcccacgacatcgccaacgaaaacgccgcccacgacatcgccaacgaaaacgccgcccaaaacatcgccaacgaaaacgccatccaaaacatcgccaaaaaatacgccgtccacgacatcgccaacgaaaacgccgcccaaaacatcgccaacgaaaacgccgcccaaaacatcgccaacgaaaacgccgcccaaaacatcgccaaaaaaaacgccgcccaaaacatcgccaaaaaaaacgccgcccaaaacatcgccaacgaaaacgccgcccaaaacatcgccaaaaaaaacgccgcccacgacatcgccaacgaaaacgccgcccaaaacatcgccaacgaaaacgccgcccacgaaatcgccaataaaaacgccgcccacgacatcgccaacgaaaacgccgtccaaaacatcgacaaaaaaaataccgcccaaaacatcgccaacgaaaacgccgcccaaaacatcgccaacgaaaacgccgcccaaaacatcgccaaaaaaaacgccgcccacgacatcgccaacgaactatatacgacatcgctaacgaaaacaccctacaaaccgtcgctaacaaatacactatacacaacatcgctaataaaaacactata

SEQ ID NO: 19209 - DNA, 785 bp, Artificial Sequence
  chemically treated genomic DNA (Homo sapiens) CpG-island No: 19209
ggcgatgtcgtgggcggcgttttttttggcgatgttttgggcggcgttttcgttggcgatgttttgggcggcgttttcgttggcgatgttttgggcggtattttttttggcgatgttttggacggcgttttcgttggcgatgtcgtgggcggcgttttcgttggcgatttcgtgggcggcgttttcgttggcgatgttttgggcggcgttttcgttggcgatgttatgggcggcgttttttttggcgatgttttgggcggcgttttcgttggcgatgttttgggcggcgttttttttggcgatgttttgggcggcgttttttttggcgatgttttgggcggcgttttcgttggcgatgttttgggcggcgttttttttggcgatgttttgggcggcgttttcgttggcgatgttttgggcggcgttttcgttggcgatgtcgtggacggcgttttttttggcgatgttttgggcggcgttttcgttggcgatgttttgggcggcgttttcgttggcgatgtcgtgggcggcgttttcgttggcgatttcgtgggcggcgttttcgttggcgatgtcgtgggcggcgttttcgttggcgatgtcgtgggcggcgttttcgttggcgatgtttttgtcggcggtttcgttagcgatgtcgtgtatagtattttcgttagcgatgtcgtgtgtggcgttttcgttagtgatgtcgtgtacggtgtttttatggggagttagaaaaatatagagttaaggttagtgttttggtggtggagattgtgaat

SEQ ID NO: 19210 - DNA, 785 bp, Artificial Sequence
  chemically treated genomic DNA (Homo sapiens) CpG-island No: 19210
attcacaatctccaccaccaaaacactaaccttaactctatatttttctaactccccataaaaacaccgtacacgacatcactaacgaaaacgccacacacgacatcgctaacgaaaatactatacacgacatcgctaacgaaaccgccgacaaaaacatcgccaacgaaaacgccgcccacgacatcgccaacgaaaacgccgcccacgacatcgccaacgaaaacgccgcccacgaaatcgccaacgaaaacgccgcccacgacatcgccaacgaaaacgccgcccaaaacatcgccaacgaaaacgccgcccaaaacatcgccaaaaaaaacgccgtccacgacatcgccaacgaaaacgccgcccaaaacatcgccaacgaaaacgccgcccaaaacatcgccaaaaaaaacgccgcccaaaacatcgccaacgaaaacgccgcccaaaacatcgccaaaaaaaacgccgcccaaaacatcgccaaaaaaaacgccgcccaaaacatcgccaacgaaaacgccgcccaaaacatcgccaaaaaaaacgccgcccataacatcgccaacgaaaacgccgcccaaaacatcgccaacgaaaacgccgcccacgaaatcgccaacgaaaacgccgcccacgacatcgccaacgaaaacgccgtccaaaacatcgccaaaaaaaataccgcccaaaacatcgccaacgaaaacgccgcccaaaacatcgccaacgaaaacgccgcccaaaacatcgccaaaaaaaacgccgcccacgacatcgcc

SEQ ID NO: 19211 - DNA, 785 bp, Artificial Sequence
  chemically treated genomic DNA (Homo sapiens) CpG-island No: 19211
atttatagtttttattattagggtattgattttaattttgtgtttttttagttttttatgaggatatcgtatacgatattattaacgaggacgttatatacgatatcgttaacgaggatattgtatacgatatcgttaacgaggtcgtcgataagggtatcgttaacgaggacgtcgtttacggtatcgttaacgaggacgtcgtttacggtatcgttagcgaggacgtcgtttacggaatcgttagcgaggacgtcgtttacggtatcgttagcgaggacgtcgtttagggtatcgttaacgaggacgtcgtttagggtatcgttaaggaggacgtcgtttacggtatcgttaacgaggacgtcgtttagggtatcgttaacgaggacgtcgtttagggtatcgttaaggaggacgtcgtttagggtatcgttaacgaggacgtcgtttagggtatcgttaaagaggacgtcgtttagggtatcgttaaggaggacgtcgtttagggtatcgttaacgagggcgtcgtttagggtatcgttaaagaggacgtcgtttatggtatcgttaacgaggacgtcgtttagggtatcgttaacgaggacgtcgtttacggaatcgttagcgaggacgtcgtttacggtatcgttagcgaggacgtcgtttagggtatcgttaaggaggatgtcgtttagggtatcgttaacgaggacgtcgtttagggtatcgttaacgaggacgtcgtttagggtatcgttaaagaggacgtcgtttacggtatcgtt

SEQ ID NO: 19212 - DNA, 785 bp, Artificial Sequence
  chemically treated genomic DNA (Homo sapiens) CpG-island No: 19212
aacgataccgtaaacgacgtcctctttaacgataccctaaacgacgtcctcgttaacgataccctaaacgacgtcctcgttaacgataccctaaacgacatcctccttaacgataccctaaacgacgtcctcgctaacgataccgtaaacgacgtcctcgctaacgattccgtaaacgacgtcctcgttaacgataccctaaacgacgtcctcgttaacgataccataaacgacgtcctctttaacgataccctaaacgacgccctcgttaacgataccctaaacgacgtcctccttaacgataccctaaacgacgtcctctttaacgataccctaaacgacgtcctcgttaacgataccctaaacgacgtcctccttaacgataccctaaacgacgtcctcgttaacgataccctaaacgacgtcctcgttaacgataccgtaaacgacgtcctccttaacgataccctaaacgacgtcctcgttaacgataccctaaacgacgtcctcgctaacgataccgtaaacgacgtcctcgctaacgattccgtaaacgacgtcctcgctaacgataccgtaaacgacgtcctcgttaacgataccgtaaacgacgtcctcgttaacgatacccttatcgacgacctcgttaacgatatcgtatacaatatcctcgttaacgatatcgtatataacgtcctcgttaataatatcgtatacgatatcctcataaaaaactaaaaaaacacaaaattaaaatcaataccctaataataaaaactataaat

SEQ ID NO: 19213 - DNA, 816 bp, Artificial Sequence
  chemically treated genomic DNA (Homo sapiens) CpG-island No: 19213
gttcggtgcgtttcgtattttgttgggtcgttcggggcgtcgtttgcgggtttggaggcggcgattagggcgtttacggtgtcgagcgttcgtagtagggtcgggtcgcggggcgtggcgcgggggacggcgcggggttcgcggcgggtaggcggggacggcggcggcggcggtagtagcgcgcgtagagcgtttagtttcgttcgaagtttcgcgcgtagcgttttaatttcggcgtttagtttttcgcgtattgtcgcgagttttttttgtagtcgtcgttcgttgatttttaggattttcgtcgggtaggtggttttgtcgcggggtttttcgtatattgagtatacggagtcgcggttgtgcgcgtcggttttttcgttcgcgttcgtcgtttcggttttcgtacgttttattagttttagtagtcgcggtatttcggatcgcgaagtcgtttcggttcggagttggtcgagtaggcgagttagtcggttcggggttcgggcgtttttttggttcggtttattggattgcggtttcgggtttcgtcggcggttcgtgacgcgtcgtagtatttcgttggttttgtacgtattacgcgtttgggtttacgggcggtcgggcgtcgttattcgttttgttgtttttatcgtcgttagcgttcgggatggtcgggagttttaggttgtagtttagttatcgttggggtttaggcgacgtatcgtggagggggttcgcgggacggttttgggaacgattaaagttttgggggtttcggtttggggcgtagggaattttggtagggttgggtttcgg

SEQ ID NO: 19214 - DNA, 816 bp, Artificial Sequence
  chemically treated genomic DNA (Homo sapiens) CpG-island No: 19214
ccgaaacccaaccctaccaaaattccctacgccccaaaccgaaacccccaaaactttaatcgttcccaaaaccgtcccgcgaaccccctccacgatacgtcgcctaaaccccaacgataactaaactacaacctaaaactcccgaccatcccgaacgctaacgacgataaaaacaacaaaacgaataacgacgcccgaccgcccgtaaacccaaacgcgtaatacgtacaaaaccaacgaaatactacgacgcgtcacgaaccgccgacgaaacccgaaaccgcaatccaataaaccgaaccaaaaaaacgcccgaaccccgaaccgactaactcgcctactcgaccaactccgaaccgaaacgacttcgcgatccgaaataccgcgactactaaaactaataaaacgtacgaaaaccgaaacgacgaacgcgaacgaaaaaaccgacgcgcacaaccgcgactccgtatactcaatatacgaaaaaccccgcgacaaaaccacctacccgacgaaaatcctaaaaatcaacgaacgacgactacaaaaaaaactcgcgacaatacgcgaaaaactaaacgccgaaattaaaacgctacgcgcgaaacttcgaacgaaactaaacgctctacgcgcgctactaccgccgccgccgccgtccccgcctacccgccgcgaaccccgcgccgtcccccgcgccacgccccgcgacccgaccctactacgaacgctcgacaccgtaaacgccctaatcgccgcctccaaacccgcaaacgacgccccgaacgacccaacaaaatacgaaacgcaccgaac

SEQ ID NO: 19215 - DNA, 816 bp, Artificial Sequence
  chemically treated genomic DNA (Homo sapiens) CpG-island No: 19215
tcgggatttagttttgttagggttttttgcgttttaggtcggaatttttagggttttggtcgtttttaaagtcgtttcgcgggttttttttacggtgcgtcgtttgggttttagcgatggttaggttgtagtttggggttttcggttatttcgggcgttggcggcggtggaggtagtagggcggatggcgacgttcggtcgttcgtgggtttaggcgcgtagtgcgtatagagttagcgaggtgttgcggcgcgttacgggtcgtcggcgggattcggggtcgtaatttaatgggtcgggttaggaagacgttcgagtttcgggtcggttggttcgtttgttcggttagtttcgggtcgaagcggtttcgcggttcgaggtgtcgcggttgttgaagttggtggagcgtgcgggggtcggggcggcgggcgcgggcgagaggatcggcgcgtatagtcgcggtttcgtgtgtttagtatgcggggagtttcgcggtagggttatttattcggcgggggttttggaggttagcgagcggcggttgtaggagggattcgcggtagtgcgcgaggagttgggcgtcgagattgaggcgttgcgcgcggagtttcgagcggagttggacgttttgcgcgcgttgttgtcgtcgtcgtcgtcgttttcgtttgttcgtcgcgagtttcgcgtcgtttttcgcgttacgtttcgcggttcgattttgttgcggacgttcggtatcgtgagcgttttggtcgtcgtttttaggttcgtagacgacgtttcggacggtttagtagaatgcggagcgtatcgagt

SEQ ID NO: 19216 - DNA, 816 bp, Artificial Sequence
  chemically treated genomic DNA (Homo sapiens) CpG-island No: 19216
actcgatacgctccgcattctactaaaccgtccgaaacgtcgtctacgaacctaaaaacgacgaccaaaacgctcacgataccgaacgtccgcaacaaaatcgaaccgcgaaacgtaacgcgaaaaacgacgcgaaactcgcgacgaacaaacgaaaacgacgacgacgacgacaacaacgcgcgcaaaacgtccaactccgctcgaaactccgcgcgcaacgcctcaatctcgacgcccaactcctcgcgcactaccgcgaatccctcctacaaccgccgctcgctaacctccaaaacccccgccgaataaataaccctaccgcgaaactccccgcatactaaacacacgaaaccgcgactatacgcgccgatcctctcgcccgcgcccgccgccccgacccccgcacgctccaccaacttcaacaaccgcgacacctcgaaccgcgaaaccgcttcgacccgaaactaaccgaacaaacgaaccaaccgacccgaaactcgaacgtcttcctaacccgacccattaaattacgaccccgaatcccgccgacgacccgtaacgcgccgcaacacctcgctaactctatacgcactacgcgcctaaacccacgaacgaccgaacgtcgccatccgccctactacctccaccgccgccaacgcccgaaataaccgaaaaccccaaactacaacctaaccatcgctaaaacccaaacgacgcaccgtaaaaaaaacccgcgaaacgactttaaaaacgaccaaaaccctaaaaattccgacctaaaacgcaaaaaaccctaacaaaactaaatcccga

SEQ ID NO: 19217 - DNA, 843 bp, Artificial Sequence
  chemically treated genomic DNA (Homo sapiens) CpG-island No: 19217
gggcgtcggaaggggcgcgtcgggcggtcggcggcggtcgttggcgagttgaggtttgttaggcgaagtttggagattagtcgggtcgcggtcgtaatggttaaggattcgtttagttttttgggcgcgtcgtttaagaagtcgggttgttttagttcggcggcggtagtgttggagaattagaggcgggagttggagaagttacgggcggagttggaggcggagcgggtaggttggcgggcggaacggcggcgtttcgttgttcgggagcgttagttgcgtgaggaggtcgagcgggagcggcggtagttggttgatcgtttgcgttttaagtgggaggtatagcgtagtcgggagttgcggtagttgtaagaggagatgtagcgggaacgcgaggtcgagattcggtagttgttgcgttggaaggaggtcgagtagcggtagttgtagtagttgttgtatcgggagcgcgatggcgtggtgcgttaagttcgggagttgtagcgttagttggtcgaggagttggtgaatcgcggttattgtagtcgttcgggggcgttcgaggttttcgcggcgtagtgtcgttgtcgtttgtaggaagtgttggcgtagtttcgttggtagattgacggcgagtaggcggcgcgtattcgttatttgtaggcggcgttggaggtggagcgttagtttttttttaagtatattttggcgtattttcgcgggtattcggttttgtcgggattatcggatttttaagttgtgtattttttggaagaatcgttgttttagatttttagcggtttttgttacgtttttaaattcgtttgttaattcggattttta

SEQ ID NO: 19218 - DNA, 843 bp, Artificial Sequence
  chemically treated genomic DNA (Homo sapiens) CpG-island No: 19218
taaaaatccgaattaacaaacgaatttaaaaacgtaacaaaaaccgctaaaaatctaaaacaacgattcttccaaaaaatacacaacttaaaaatccgataatcccgacaaaaccgaatacccgcgaaaatacgccaaaatatacttaaaaaaaaactaacgctccacctccaacgccgcctacaaataacgaatacgcgccgcctactcgccgtcaatctaccaacgaaactacgccaacacttcctacaaacgacaacgacactacgccgcgaaaacctcgaacgcccccgaacgactacaataaccgcgattcaccaactcctcgaccaactaacgctacaactcccgaacttaacgcaccacgccatcgcgctcccgatacaacaactactacaactaccgctactcgacctccttccaacgcaacaactaccgaatctcgacctcgcgttcccgctacatctcctcttacaactaccgcaactcccgactacgctatacctcccacttaaaacgcaaacgatcaaccaactaccgccgctcccgctcgacctcctcacgcaactaacgctcccgaacaacgaaacgccgccgttccgcccgccaacctacccgctccgcctccaactccgcccgtaacttctccaactcccgcctctaattctccaacactaccgccgccgaactaaaacaacccgacttcttaaacgacgcgcccaaaaaactaaacgaatccttaaccattacgaccgcgacccgactaatctccaaacttcgcctaacaaacctcaactcgccaacgaccgccgccgaccgcccgacgcgccccttccgacgccc

SEQ ID NO: 19219 - DNA, 843 bp, Artificial Sequence
  chemically treated genomic DNA (Homo sapiens) CpG-island No: 19219
tagagattcgagttggtaggcgggtttgggggcgtggtaagagtcgttggaggtttggggtagcggtttttttaaggaatgtatagtttgggggttcggtgatttcgataaagtcgggtgttcgcggaagtgcgttaggatgtatttgaggaagagttggcgttttatttttagcgtcgtttgtagatagcggatgcgcgtcgtttgttcgtcgttagtttgttagcgaagttgcgttaatattttttgtaggcgatagcggtattgcgtcgcggaaatttcggacgttttcgggcggttatagtggtcgcggtttattagtttttcggttagttggcgttgtagttttcgggtttggcgtattacgttatcgcgttttcggtgtagtagttgttgtagttgtcgttgttcggtttttttttagcgtagtagttgtcggatttcggtttcgcgttttcgttgtatttttttttgtagttgtcgtaattttcggttgcgttgtgttttttatttggagcgtagacggttagttagttgtcgtcgttttcgttcggtttttttacgtagttggcgttttcgggtagcgaagcgtcgtcgtttcgttcgttagtttgttcgtttcgtttttagtttcgttcgtagtttttttagttttcgtttttggttttttagtattgtcgtcgtcgggttggagtagttcggttttttgggcgacgcgtttaaggggttgggcgagtttttggttattgcggtcgcggttcggttggtttttagatttcgtttggtaggttttagttcgttaacggtcgtcgtcgatcgttcggcgcgtttttttcggcgttt

SEQ ID NO: 19220 - DNA, 843 bp, Artificial Sequence
  chemically treated genomic DNA (Homo sapiens) CpG-island No: 19220
aaacgccgaaaaaaacgcgccgaacgatcgacgacgaccgttaacgaactaaaacctaccaaacgaaatctaaaaaccaaccgaaccgcgaccgcaataaccaaaaactcgcccaaccccttaaacgcgtcgcccaaaaaaccgaactactccaacccgacgacgacaatactaaaaaaccaaaaacgaaaactaaaaaaactacgaacgaaactaaaaacgaaacgaacaaactaacgaacgaaacgacgacgcttcgctacccgaaaacgccaactacgtaaaaaaaccgaacgaaaacgacgacaactaactaaccgtctacgctccaaataaaaaacacaacgcaaccgaaaattacgacaactacaaaaaaaaatacaacgaaaacgcgaaaccgaaatccgacaactactacgctaaaaaaaaaccgaacaacgacaactacaacaactactacaccgaaaacgcgataacgtaatacgccaaacccgaaaactacaacgccaactaaccgaaaaactaataaaccgcgaccactataaccgcccgaaaacgtccgaaatttccgcgacgcaataccgctatcgcctacaaaaaatattaacgcaacttcgctaacaaactaacgacgaacaaacgacgcgcatccgctatctacaaacgacgctaaaaataaaacgccaactcttcctcaaatacatcctaacgcacttccgcgaacacccgactttatcgaaatcaccgaacccccaaactatacattccttaaaaaaaccgctaccccaaacctccaacgactcttaccacgcccccaaacccgcctaccaactcgaatctcta

SEQ ID NO: 19221 - DNA, 937 bp, Artificial Sequence
  chemically treated genomic DNA (Homo sapiens) CpG-island No: 19221
cgtgttggtgttcgttcgcgtgcgtgggggttttgtttagtagttttcggaagtagtttagttgggtttcgagtttttttcgtatttagagggcgagcgagagatattttgagcgatcgggagtagttgtcgaggatatttttttcgtgttttcgtgtgatggttttagtgtttgaatgcggaagttatttatcgttagtttttaacggttttatagtatttttcgggcggagttttgggggttttcgcgagtatttttttgtagttgcggtttcgtatttgaggtaaatttacgttttcggtcgttatcgtttttcggaattttattttgttaaggaagaagtttttcgggtcgagtagcgatgaggcgttacggcgggtcggatttacggggcggttttcggataggttggcgtggaggttcgtggggatgttgtgtttgagggcggagcgcgagttggagtattagcggtcgcggagtcgcgcgttttaagtcgatcgtcgttttgttagaggttttttttttatttgcgggttagtttcgtcgcgtttttcgtggtcgtatcgttgattagtagggatacgttggttatagtttcggttagaaaggtttttacgatatttttatcgcgtcgcgggtagtaattaaagtcgttcgcggtgattattaggcgtatgcgagggcgggatatggtcgtttgggtttatcgttcgcgtttttaggggagtgggtcggatagtttaggtttcgttttcggacgttgttcgggtttcgtttcgacgtatacgtttaggtgcggttgtatttcgtttttgttttcgttatttagcggttcggcgtgtttttgtaaggattcggtaattgttttcgcgttaattagattagtgatggatttattgtaatgcggaattttttttgattgtaaaagtgatattt

SEQ ID NO: 19222 - DNA, 937 bp, Artificial Sequence
  chemically treated genomic DNA (Homo sapiens) CpG-island No: 19222
aaatatcacttttacaatcaaaaaaaattccgcattacaataaatccatcactaatctaattaacgcgaaaacaattaccgaatccttacaaaaacacgccgaaccgctaaataacgaaaacaaaaacgaaatacaaccgcacctaaacgtatacgtcgaaacgaaacccgaacaacgtccgaaaacgaaacctaaactatccgacccactcccctaaaaacgcgaacgataaacccaaacgaccatatcccgccctcgcatacgcctaataatcaccgcgaacgactttaattactacccgcgacgcgataaaaatatcgtaaaaacctttctaaccgaaactataaccaacgtatccctactaatcaacgatacgaccacgaaaaacgcgacgaaactaacccgcaaataaaaaaaaaacctctaacaaaacgacgatcgacttaaaacgcgcgactccgcgaccgctaatactccaactcgcgctccgccctcaaacacaacatccccacgaacctccacgccaacctatccgaaaaccgccccgtaaatccgacccgccgtaacgcctcatcgctactcgacccgaaaaacttcttccttaacaaaataaaattccgaaaaacgataacgaccgaaaacgtaaatttacctcaaatacgaaaccgcaactacaaaaaaatactcgcgaaaacccccaaaactccgcccgaaaaatactataaaaccgttaaaaactaacgataaataacttccgcattcaaacactaaaaccatcacacgaaaacacgaaaaaaatatcctcgacaactactcccgatcgctcaaaatatctctcgctcgccctctaaatacgaaaaaaactcgaaacccaactaaactacttccgaaaactactaaacaaaacccccacgcacgcgaacgaacaccaacacg

SEQ ID NO: 19223 - DNA, 937 bp, Artificial Sequence
  chemically treated genomic DNA (Homo sapiens) CpG-island No: 19223
aaatattatttttgtagttaaggaaagtttcgtattgtaatgaatttattattggtttggttagcgcgggagtagttgtcgggtttttgtaggggtacgtcggatcgttaggtggcgagaataaaggcgaagtgtagtcgtatttgggcgtgtgcgtcggggcggggttcgggtagcgttcgggggcggggtttgggttgttcggtttatttttttgggagcgcgagcggtggatttaggcggttatgtttcgttttcgtatgcgtttggtggttatcgcggacgattttggttattgttcgcgacgcgatgagggtatcgtggaggtttttttggtcggggttgtgattagcgtgtttttgttggttaacggtgcggttacggagagcgcggcggagttggttcgtaggtgaggggagggtttttagtagggcggcgatcggtttggggcgcgcggtttcgcggtcgttagtgttttagttcgcgtttcgtttttaggtatagtatttttacgggtttttacgttaatttgttcgagggtcgtttcgtgggttcggttcgtcgtggcgttttatcgttgttcggttcggaaggttttttttttggtaagatgggatttcgggaggcggtggcggtcggagacgtggatttgttttaggtgcggagtcgtagttataggaggatgttcgcgaggatttttagagtttcgttcggagggtattgtgaggtcgttaggagttggcggtggatgattttcgtatttaaatattggagttattatacggaagtacgaggagggtattttcggtagttattttcggtcgtttaaggtgtttttcgttcgttttttaggtgcgggaggagttcgaggtttaattaagttgttttcgggagttgttgggtagggtttttacgtacgcggacgggtattagtacg

SEQ ID NO: 19224 - DNA, 937 bp, Artificial Sequence
  chemically treated genomic DNA (Homo sapiens) CpG-island No: 19224
cgtactaatacccgtccgcgtacgtaaaaaccctacccaacaactcccgaaaacaacttaattaaacctcgaactcctcccgcacctaaaaaacgaacgaaaaacaccttaaacgaccgaaaataactaccgaaaataccctcctcgtacttccgtataataactccaatatttaaatacgaaaatcatccaccgccaactcctaacgacctcacaataccctccgaacgaaactctaaaaatcctcgcgaacatcctcctataactacgactccgcacctaaaacaaatccacgtctccgaccgccaccgcctcccgaaatcccatcttaccaaaaaaaaaaccttccgaaccgaacaacgataaaacgccacgacgaaccgaacccacgaaacgaccctcgaacaaattaacgtaaaaacccgtaaaaatactatacctaaaaacgaaacgcgaactaaaacactaacgaccgcgaaaccgcgcgccccaaaccgatcgccgccctactaaaaaccctcccctcacctacgaaccaactccgccgcgctctccgtaaccgcaccgttaaccaacaaaaacacgctaatcacaaccccgaccaaaaaaacctccacgataccctcatcgcgtcgcgaacaataaccaaaatcgtccgcgataaccaccaaacgcatacgaaaacgaaacataaccgcctaaatccaccgctcgcgctcccaaaaaaataaaccgaacaacccaaaccccgcccccgaacgctacccgaaccccgccccgacgcacacgcccaaatacgactacacttcgcctttattctcgccacctaacgatccgacgtacccctacaaaaacccgacaactactcccgcgctaaccaaaccaataataaattcattacaatacgaaactttccttaactacaaaaataatattt

SEQ ID NO: 19225 - DNA, 759 bp, Artificial Sequence
  chemically treated genomic DNA (Homo sapiens) CpG-island No: 19225
cgaggagtcgcgtttttattaattgtttacgtttatttttcgcggttcggagatttagtcgtttttttttgggtatttattggtaagttttcggaagcgtggattaattaaaatttttttcgtgtttttagttttcgtttagttacggttttcgcgaatcgggggcgggtttttttcgcgttgatttagtggtagtgtaagcggagtgtcgcgcgggtcgattattggttgtcgtaagcgggcgttgttagaatcggattgggtcgcggcggggacggaagcggtttttgggttcgaggggttggagtcgggtcggggcgatgtggagcgcgggtcgcggcggggttgtttggtcggtgttgttggggttgttgttggcgttgttagtgtcgggcggtggtgtcgttaagatcggtgcggagttcgtgatttgcgggtcggtgttgaagttgtttaatacgtattatcgcgtgcggttgtattcgtacgatattaaatacggattcggtgcgtggggttagcgattgggagagcgcggggaatcggggttcggggttgggagtgtggagatagggtggttatgggggtttgtgggtcgtttggaagtcgggcggcgggggttttagagtcgttgggaggtcgaggggttaaagttttgagggtgtcgaggatattgagggtggggacggtcgtcggggaattgcgggtttaaagattgagggggtgttaggcgggggttgggggtgagtttttggggtt

SEQ ID NO: 19226 - DNA, 759 bp, Artificial Sequence
  chemically treated genomic DNA (Homo sapiens) CpG-island No: 19226
aaccccaaaaactcacccccaacccccgcctaacaccccctcaatctttaaacccgcaattccccgacgaccgtccccaccctcaatatcctcgacaccctcaaaactttaacccctcgacctcccaacgactctaaaacccccgccgcccgacttccaaacgacccacaaacccccataaccaccctatctccacactcccaaccccgaaccccgattccccgcgctctcccaatcgctaaccccacgcaccgaatccgtatttaatatcgtacgaatacaaccgcacgcgataatacgtattaaacaacttcaacaccgacccgcaaatcacgaactccgcaccgatcttaacgacaccaccgcccgacactaacaacgccaacaacaaccccaacaacaccgaccaaacaaccccgccgcgacccgcgctccacatcgccccgacccgactccaacccctcgaacccaaaaaccgcttccgtccccgccgcgacccaatccgattctaacaacgcccgcttacgacaaccaataatcgacccgcgcgacactccgcttacactaccactaaatcaacgcgaaaaaaacccgcccccgattcgcgaaaaccgtaactaaacgaaaactaaaaacacgaaaaaaattttaattaatccacgcttccgaaaacttaccaataaatacccaaaaaaaaacgactaaatctccgaaccgcgaaaaataaacgtaaacaattaataaaaacgcgactcctcg

SEQ ID NO: 19227 - DNA, 759 bp, Artificial Sequence
  chemically treated genomic DNA (Homo sapiens) CpG-island No: 19227
gattttaagggtttatttttagttttcgtttgatatttttttagtttttgggttcgtagtttttcgacgatcgtttttatttttaatattttcgatatttttaaagttttggtttttcgattttttaacgattttagagttttcgtcgttcggtttttagacggtttatagatttttatgattattttgtttttatatttttaatttcgagtttcggtttttcgcgtttttttagtcgttggttttacgtatcggattcgtatttgatgtcgtgcgagtgtagtcgtacgcggtggtgcgtattgagtagttttagtatcgattcgtaggttacgagtttcgtatcggttttggcggtattatcgttcggtattaatagcgttagtagtagttttaatagtatcggttaggtagtttcgtcgcggttcgcgttttatatcgtttcggttcggttttagtttttcgggtttaggggtcgttttcgttttcgtcgcggtttaattcggttttgatagcgttcgtttgcggtagttaatagtcggttcgcgcggtatttcgtttgtattgttattgggttagcgcggggagggttcgttttcggttcgcgagagtcgtagttgggcggggattggagatacgaggagggttttgattggtttacgttttcgaggatttattaatgagtgtttagggaagggcggttgagttttcgagtcgcggagagtgagcgtgaatagttggtgaagacgcggtttttcg

SEQ ID NO: 19228 - DNA, 759 bp, Artificial Sequence
  chemically treated genomic DNA (Homo sapiens) CpG-island No: 19228
cgaaaaaccgcgtcttcaccaactattcacgctcactctccgcgactcgaaaactcaaccgcccttccctaaacactcattaataaatcctcgaaaacgtaaaccaatcaaaaccctcctcgtatctccaatccccgcccaactacgactctcgcgaaccgaaaacgaaccctccccgcgctaacccaataacaatacaaacgaaataccgcgcgaaccgactattaactaccgcaaacgaacgctatcaaaaccgaattaaaccgcgacgaaaacgaaaacgacccctaaacccgaaaaactaaaaccgaaccgaaacgatataaaacgcgaaccgcgacgaaactacctaaccgatactattaaaactactactaacgctattaataccgaacgataataccgccaaaaccgatacgaaactcgtaacctacgaatcgatactaaaactactcaatacgcaccaccgcgtacgactacactcgcacgacatcaaatacgaatccgatacgtaaaaccaacgactaaaaaaacgcgaaaaaccgaaactcgaaattaaaaatataaaaacaaaataatcataaaaatctataaaccgtctaaaaaccgaacgacgaaaactctaaaatcgttaaaaaatcgaaaaaccaaaactttaaaaatatcgaaaatattaaaaataaaaacgatcgtcgaaaaactacgaacccaaaaactaaaaaaatatcaaacgaaaactaaaaataaacccttaaaatc

SEQ ID NO: 19229 - DNA, 889 bp, Artificial Sequence
  chemically treated genomic DNA (Homo sapiens) CpG-island No: 19229
gttcgggaggttatagatagcgaggaggggcgttcgtcggaggggattaggggtttgtcgagaggtggggattttaaagaagttgttgattaattacgttttcggcgtagttaagagttcgattcgggttaaaggttcgatggtttttgcggaattgggttaggattcgcgtagtcgcgttcgttttttcgaggtcgtgagcgcgcgtgtttagagtaacgggtattgtcgtttgaggtaggcgattggggattggtttcgttttcggttttcgcgcggattggttggggcggggcggcgcggttgtagtaggttagagagttcgtatttgcgtcgcggtcgtggggagagagggtgcgtttcggtagtttcgtacgacgggtttcgttttttttggtgattttacgtttcggtttcggggggagtggcggtcggcgcgtcgagattttcgggagtttcgtttagacgtttgtttcgtttttaggttattcgggttttttagtcgcgttcgttcgtagagattttagataagttcgatagcgaggtttcgtagagtaagatttgttagtagattttcgaggaggatttggagaggtaggcggatatttatattgggcgcgcgttgcgttttttttttcgtagtttcgttcgtaattcgtcgttggcggagagggtggtataattggaatagcgcgggttttttttttttcggatgcggtcgcggggtatgggatcggttgggcgggaattgttattattcgggttcgtcgttttttaggaaagagtttcgacgattggagttttgggggtcggggatgggggtggggtggagaggtcgtcgtcggtttagttggggttgtagggtaggatttattagaaagtcgaggtt

SEQ ID NO: 19230 - DNA, 889 bp, Artificial Sequence
  chemically treated genomic DNA (Homo sapiens) CpG-island No: 19230
aacctcgactttctaataaatcctaccctacaaccccaactaaaccgacgacgacctctccaccccacccccatccccgacccccaaaactccaatcgtcgaaactctttcctaaaaaacgacgaacccgaataataacaattcccgcccaaccgatcccataccccgcgaccgcatccgaaaaaaaaaaaacccgcgctattccaattataccaccctctccgccaacgacgaattacgaacgaaactacgaaaaaaaaaacgcaacgcgcgcccaatataaatatccgcctacctctccaaatcctcctcgaaaatctactaacaaatcttactctacgaaacctcgctatcgaacttatctaaaatctctacgaacgaacgcgactaaaaaacccgaataacctaaaaacgaaacaaacgtctaaacgaaactcccgaaaatctcgacgcgccgaccgccactccccccgaaaccgaaacgtaaaatcaccaaaaaaaacgaaacccgtcgtacgaaactaccgaaacgcaccctctctccccacgaccgcgacgcaaatacgaactctctaacctactacaaccgcgccgccccgccccaaccaatccgcgcgaaaaccgaaaacgaaaccaatccccaatcgcctacctcaaacgacaatacccgttactctaaacacgcgcgctcacgacctcgaaaaaacgaacgcgactacgcgaatcctaacccaattccgcaaaaaccatcgaacctttaacccgaatcgaactcttaactacgccgaaaacgtaattaatcaacaacttctttaaaatccccacctctcgacaaacccctaatcccctccgacgaacgcccctcctcgctatctataacctcccgaac

SEQ ID NO: 19231 - DNA, 889 bp, Artificial Sequence
  chemically treated genomic DNA (Homo sapiens) CpG-island No: 19231
agtttcggttttttgatagattttattttgtagttttagttaggtcgacggcgatttttttattttatttttattttcggtttttaaagttttaatcgtcggagtttttttttaggggacggcggattcgggtagtgatagttttcgtttagtcggttttatgtttcgcggtcgtattcggaaaaaagagagttcgcgttgttttaattgtattatttttttcgttagcgacgggttgcggacggggttgcggaagaggaggcgtagcgcgcgtttagtgtaggtgttcgtttgtttttttaagtttttttcggagatttgttggtaggttttgttttgcgggatttcgttgtcgaatttgtttaggatttttacgagcgagcgcggttggagagttcgggtggtttggaagcggagtaggcgtttgggcggggttttcgagggtttcggcgcgtcgatcgttatttttttcgaggtcggagcgtggggttattaggggaggcggggttcgtcgtgcgggattgtcgggacgtattttttttttttacggtcgcggcgtaggtgcggattttttagtttattgtagtcgcgtcgtttcgttttagttaattcgcgcggaagtcgggggcggggttaatttttagtcgtttgttttaggcgataatgttcgttgttttgggtacgcgcgtttacgatttcgagggggcgaacgcggttgcgcgggttttggtttagtttcgtaggggttatcgggtttttgattcgggtcgggtttttggttgcgtcgaggacgtggttggttagtaatttttttaaggtttttatttttcggtaggtttttagtttttttcgacgggcgttttttttcgttgtttgtagtttttcgggt

SEQ ID NO: 19232 - DNA, 889 bp, Artificial Sequence
  chemically treated genomic DNA (Homo sapiens) CpG-island No: 19232
acccgaaaaactacaaacaacgaaaaaaaacgcccgtcgaaaaaaactaaaaacctaccgaaaaataaaaaccttaaaaaaattactaaccaaccacgtcctcgacgcaaccaaaaacccgacccgaatcaaaaacccgataacccctacgaaactaaaccaaaacccgcgcaaccgcgttcgccccctcgaaatcgtaaacgcgcgtacccaaaacaacgaacattatcgcctaaaacaaacgactaaaaattaaccccgcccccgacttccgcgcgaattaactaaaacgaaacgacgcgactacaataaactaaaaaatccgcacctacgccgcgaccgtaaaaaaaaaaaatacgtcccgacaatcccgcacgacgaaccccgcctcccctaataaccccacgctccgacctcgaaaaaaataacgatcgacgcgccgaaaccctcgaaaaccccgcccaaacgcctactccgcttccaaaccacccgaactctccaaccgcgctcgctcgtaaaaatcctaaacaaattcgacaacgaaatcccgcaaaacaaaacctaccaacaaatctccgaaaaaaacttaaaaaaacaaacgaacacctacactaaacgcgcgctacgcctcctcttccgcaaccccgtccgcaacccgtcgctaacgaaaaaaataatacaattaaaacaacgcgaactctcttttttccgaatacgaccgcgaaacataaaaccgactaaacgaaaactatcactacccgaatccgccgtcccctaaaaaaaaactccgacgattaaaactttaaaaaccgaaaataaaaataaaataaaaaaatcgccgtcgacctaactaaaactacaaaataaaatctatcaaaaaaccgaaact

SEQ ID NO: 19233 - DNA, 1028 bp, Artificial Sequence
  chemically treated genomic DNA (Homo sapiens) CpG-island No: 19233
gttttcgttcgttcggacgtttaataggtgtttttcgggttcgttcgtagttatagtatttttgggtggttataaagtaatcgttcgcgtagttgtagttaggttcgttcgtatttacggtcgtttcgcggttcgcgtttcggttcgtagcgtttattcggttcgggtttcggttagcgcgggttcggtttttaggcgttttcggcgcggttcgggacgcgttgaggtcgttaacgtttaggtagggcgcgaggtattttttcgtcgtcgtttcgcgggtcgtttgttttttgttttggagtcgtagttcggtttagacgtcgttaatagttttggagcgcggcgtcggttaattagcgcgttatgtcgttagcgtttcgtttttattttgttttcgtttcgtttcgcgtttcgtttgtttcgcgcgttttcgtttcgcgcgtttcgggttaaggagtttcgttagttcgtattcggtcgggacgggtaggagtttacgtgtcgcggggcgcgtcgtatttttattggttgattcgtcgggcgcggtttcggagttagtttgtaagggtcgagggatacgggggcggggtcgcgcggggcggggcgagagtaggggcgggtttcgcgaggagcgtcgcgttcggacgtaggttggttgggtagggatattcggtcggcggggttggcggtggtggttattcgttttttcggttcgcggggatgggtcgagggcgtgtagggttcgtagttttagaggttgaggcgagtttgcgcgtagttttttcgtttagcgtcgtgtacgtatcgttcgttcgcgcggtcggtcgcgttgtaggggacggacgtggaggtcgaggcgagtttgtgtgcgtttgattagggttcgttttggtcggattttttcgcggtcgggtttttagaatgcggtcgttcgtgttgtttcgtttttattattttttttgaatttaaggatttaattttttaggattttttcgttacggaggatttttcgggtttgcgtttggttt

SEQ ID NO: 19234 - DNA, 1028 bp, Artificial Sequence
  chemically treated genomic DNA (Homo sapiens) CpG-island No: 19234
aaaccaaacgcaaacccgaaaaatcctccgtaacgaaaaaatcctaaaaaattaaatccttaaattcaaaaaaaataataaaaacgaaacaacacgaacgaccgcattctaaaaacccgaccgcgaaaaaatccgaccaaaacgaaccctaatcaaacgcacacaaactcgcctcgacctccacgtccgtcccctacaacgcgaccgaccgcgcgaacgaacgatacgtacacgacgctaaacgaaaaaactacgcgcaaactcgcctcaacctctaaaactacgaaccctacacgccctcgacccatccccgcgaaccgaaaaaacgaataaccaccaccgccaaccccgccgaccgaatatccctacccaaccaacctacgtccgaacgcgacgctcctcgcgaaacccgcccctactctcgccccgccccgcgcgaccccgcccccgtatccctcgacccttacaaactaactccgaaaccgcgcccgacgaatcaaccaataaaaatacgacgcgccccgcgacacgtaaactcctacccgtcccgaccgaatacgaactaacgaaactccttaacccgaaacgcgcgaaacgaaaacgcgcgaaacaaacgaaacgcgaaacgaaacgaaaacaaaataaaaacgaaacgctaacgacataacgcgctaattaaccgacgccgcgctccaaaactattaacgacgtctaaaccgaactacgactccaaaacaaaaaacaaacgacccgcgaaacgacgacgaaaaaatacctcgcgccctacctaaacgttaacgacctcaacgcgtcccgaaccgcgccgaaaacgcctaaaaaccgaacccgcgctaaccgaaacccgaaccgaataaacgctacgaaccgaaacgcgaaccgcgaaacgaccgtaaatacgaacgaacctaactacaactacgcgaacgattactttataaccacccaaaaatactataactacgaacgaacccgaaaaacacctattaaacgtccgaacgaacgaaaac

SEQ ID NO: 19235 - DNA, 1028 bp, Artificial Sequence
  chemically treated genomic DNA (Homo sapiens) CpG-island No: 19235
gggttagacgtagattcggggggtttttcgtggcgagggggttttagggggttaggtttttgggtttagagagggtggtggggacgggatagtacggacgatcgtattttggggattcggtcgcggaggggttcggttaaggcgggttttggttaggcgtatataagttcgtttcggtttttacgttcgttttttataacgcggtcgatcgcgcggacgggcggtacgtgtacggcgttggacgaggaggttgcgcgtaagttcgttttagtttttggagttgcgggttttgtacgttttcggtttattttcgcgagtcggaggaacgagtgattattatcgttagtttcgtcggtcgagtgtttttgtttagttagtttgcgttcgagcgcggcgtttttcgcggaattcgtttttgttttcgtttcgtttcgcgcggtttcgttttcgtgtttttcggtttttataggttggtttcgaggtcgcgttcggcgggttagttaatgggagtgcggcgcgtttcgcggtacgtgggtttttgttcgtttcggtcgggtgcgagttggcggagttttttggttcggagcgcgcggggcgggggcgcgcggggtaggcgggacgcggggcggaacggaggtaggatgggggcggggcgttggcgatatggcgcgttgattggtcggcgtcgcgttttaaggttgttaacggcgtttgggtcgggttacggttttaaaataaagggtaggcggttcgcggggcggcggcgggaggatgtttcgcgttttgtttaggcgttaacggttttagcgcgtttcgggtcgcgtcgggaacgtttgagagtcgagttcgcgttgatcggggttcgggtcggatgggcgttgcgggtcggggcgcggatcgcggagcggtcgtgagtacgggcgggtttggttgtagttgcgcgggcggttattttgtggttatttaaggatattgtggttgcgggcgggttcgggaagtatttgttgggcgttcgggcgggcgggggt

SEQ ID NO: 19236 - DNA, 1028 bp, Artificial Sequence
  chemically treated genomic DNA (Homo sapiens) CpG-island No: 19236
acccccgcccgcccgaacgcccaacaaatacttcccgaacccgcccgcaaccacaatatccttaaataaccacaaaataaccgcccgcgcaactacaaccaaacccgcccgtactcacgaccgctccgcgatccgcgccccgacccgcaacgcccatccgacccgaaccccgatcaacgcgaactcgactctcaaacgttcccgacgcgacccgaaacgcgctaaaaccgttaacgcctaaacaaaacgcgaaacatcctcccgccgccgccccgcgaaccgcctaccctttattttaaaaccgtaacccgacccaaacgccgttaacaaccttaaaacgcgacgccgaccaatcaacgcgccatatcgccaacgccccgcccccatcctacctccgttccgccccgcgtcccgcctaccccgcgcgcccccgccccgcgcgctccgaaccaaaaaactccgccaactcgcacccgaccgaaacgaacaaaaacccacgtaccgcgaaacgcgccgcactcccattaactaacccgccgaacgcgacctcgaaaccaacctataaaaaccgaaaaacacgaaaacgaaaccgcgcgaaacgaaacgaaaacaaaaacgaattccgcgaaaaacgccgcgctcgaacgcaaactaactaaacaaaaacactcgaccgacgaaactaacgataataatcactcgttcctccgactcgcgaaaataaaccgaaaacgtacaaaacccgcaactccaaaaactaaaacgaacttacgcgcaacctcctcgtccaacgccgtacacgtaccgcccgtccgcgcgatcgaccgcgttataaaaaacgaacgtaaaaaccgaaacgaacttatatacgcctaaccaaaacccgccttaaccgaacccctccgcgaccgaatccccaaaatacgatcgtccgtactatcccgtccccaccaccctctctaaacccaaaaacctaaccccctaaaaccccctcgccacgaaaaaccccccgaatctacgtctaaccc

SEQ ID NO: 19237 - DNA, 939 bp, Artificial Sequence
  chemically treated genomic DNA (Homo sapiens) CpG-island No: 19237
gtcgcgttgcgttcggggttaagggtttattagtatcggtttacgtttttcgcgttattttttgagttttttttcgagcgatcgaaggttcgggaatcgcgagtaataatatttaaattttaatcggttcggggtcgcgttcgagttttggcgcgcggatcgcggtgaagttcgggttcgaggtcgtcgcggcgtttgaggtcgaggcgcgggcgaggtcgaggttgcgttcgttgcggtttcgggcggtgggggggtcgggcgtggtcggtcgcggatatttattatattatgtcgtaggcgttttcgtcgatgtacgagaggttggtgtagcgcggttttacgtcgaatatttgttcgcggattattttcgggttcgcgttcgtcgtcgtcgtcgtcgttatgttggttgtcgggtcgtcgtcgttttcgtcgcgttgagttcgacgttcggcggtcgtcgtttagtttttgtcgtttttttcgtagggattgcgtcgtcgtcggtgtagtcgtcgacgttgatcgggaggaggaaggaagacgtcgagcgggagagttgaagagtcgatagttattcggatcgattgtttgtttgtttgttagattgacgggcgggtcggcgggcgggcggagggaggggcgcgcgtcgaggagggtgtcggggcggggataagaagtgtgtatgcggattggtttttcgcggttgggggcggggtcgcgcgggtcggcggaagcggcgggtttcgggaggggtattgcgacggcgttgattgagggggcgttattaggcgcggttacgtgtattcgcggtgtattcgcgggggcgtcggtgcgggtcgcgttttttaagatatttagggagatagacgtggggtagaatttatgggttgaagtgagagatggttggggtttaggcgagcgatcgagtagggttcg

SEQ ID NO: 19238 - DNA, 939 bp, Artificial Sequence
  chemically treated genomic DNA (Homo sapiens) CpG-island No: 19238
cgaaccctactcgatcgctcgcctaaaccccaaccatctctcacttcaacccataaattctaccccacgtctatctccctaaatatcttaaaaaacgcgacccgcaccgacgcccccgcgaatacaccgcgaatacacgtaaccgcgcctaataacgccccctcaatcaacgccgtcgcaatacccctcccgaaacccgccgcttccgccgacccgcgcgaccccgcccccaaccgcgaaaaaccaatccgcatacacacttcttatccccgccccgacaccctcctcgacgcgcgcccctccctccgcccgcccgccgacccgcccgtcaatctaacaaacaaacaaacaatcgatccgaataactatcgactcttcaactctcccgctcgacgtcttccttcctcctcccgatcaacgtcgacgactacaccgacgacgacgcaatccctacgaaaaaaacgacaaaaactaaacgacgaccgccgaacgtcgaactcaacgcgacgaaaacgacgacgacccgacaaccaacataacgacgacgacgacgacgaacgcgaacccgaaaataatccgcgaacaaatattcgacgtaaaaccgcgctacaccaacctctcgtacatcgacgaaaacgcctacgacataatataataaatatccgcgaccgaccacgcccgacccccccaccgcccgaaaccgcaacgaacgcaacctcgacctcgcccgcgcctcgacctcaaacgccgcgacgacctcgaacccgaacttcaccgcgatccgcgcgccaaaactcgaacgcgaccccgaaccgattaaaatttaaatattattactcgcgattcccgaaccttcgatcgctcgaaaaaaaactcaaaaaataacgcgaaaaacgtaaaccgatactaataaacccttaaccccgaacgcaacgcgac

SEQ ID NO: 19239 - DNA, 939 bp, Artificial Sequence
  chemically treated genomic DNA (Homo sapiens) CpG-island No: 19239
cggattttgttcggtcgttcgtttgggttttagttattttttattttagtttatgagttttgttttacgtttgtttttttgggtgttttaagagacgcgattcgtatcgacgttttcgcgaatgtatcgcgaatgtacgtgatcgcgtttagtggcgtttttttagttaacgtcgtcgtagtgtttttttcgaagttcgtcgttttcgtcggttcgcgcggtttcgtttttagtcgcgaggaattaattcgtatgtatattttttgttttcgtttcggtatttttttcggcgcgcgttttttttttcgttcgttcgtcggttcgttcgttagtttggtaggtaggtaggtaatcggttcgagtggttgtcggttttttagttttttcgttcggcgttttttttttttttttcggttagcgtcggcggttgtatcggcggcggcgtagtttttgcgggaggggcgataagagttgagcggcggtcgtcgagcgtcgagtttagcgcggcggaggcggcggcggttcggtagttaatatggcggcggcggcggcggcgggcgcgggttcggagatggttcgcgggtaggtgttcgacgtggggtcgcgttatattaatttttcgtatatcggcgagggcgtttacggtatggtgtggtgagtgttcgcgatcggttacgttcggtttttttatcgttcggggtcgtagcggacgtagtttcggtttcgttcgcgtttcggttttaggcgtcgcggcgatttcgaattcggattttatcgcggttcgcgcgttagggttcgggcgcggtttcgggtcggttgaggtttaggtgttgttgttcgcggttttcgggttttcggtcgttcgggaaggggtttagggagtggcgcggggggcgtaggtcggtattagtggatttttggtttcgggcgtagcgcggt

SEQ ID NO: 19240 - DNA, 939 bp, Artificial Sequence
  chemically treated genomic DNA (Homo sapiens) CpG-island No: 19240
accgcgctacgcccgaaaccaaaaatccactaataccgacctacgccccccgcgccactccctaaaccccttcccgaacgaccgaaaacccgaaaaccgcgaacaacaacacctaaacctcaaccgacccgaaaccgcgcccgaaccctaacgcgcgaaccgcgataaaatccgaattcgaaatcgccgcgacgcctaaaaccgaaacgcgaacgaaaccgaaactacgtccgctacgaccccgaacgataaaaaaaccgaacgtaaccgatcgcgaacactcaccacaccataccgtaaacgccctcgccgatatacgaaaaattaatataacgcgaccccacgtcgaacacctacccgcgaaccatctccgaacccgcgcccgccgccgccgccgccgccatattaactaccgaaccgccgccgcctccgccgcgctaaactcgacgctcgacgaccgccgctcaactcttatcgcccctcccgcaaaaactacgccgccgccgatacaaccgccgacgctaaccgaaaaaaaaaaaaaaaacgccgaacgaaaaaactaaaaaaccgacaaccactcgaaccgattacctacctacctaccaaactaacgaacgaaccgacgaacgaacgaaaaaaaaaacgcgcgccgaaaaaaataccgaaacgaaaacaaaaaatatacatacgaattaattcctcgcgactaaaaacgaaaccgcgcgaaccgacgaaaacgacgaacttcgaaaaaaacactacgacgacgttaactaaaaaaacgccactaaacgcgatcacgtacattcgcgatacattcgcgaaaacgtcgatacgaatcgcgtctcttaaaacacccaaaaaaacaaacgtaaaacaaaactcataaactaaaataaaaaataactaaaacccaaacgaacgaccgaacaaaatccg

SEQ ID NO: 19241 - DNA, 1005 bp, Artificial Sequence
  chemically treated genomic DNA (Homo sapiens) CpG-island No: 19241
aatcgtaaaattttttagcgagggggcgaacgcgggcgtagggtcgtttgtataatgggagttttttcgtttgttaggtagcgtagttcgttcgacgttgttcggattagattgttaatgaaaaggtataaagagtcggcgttcgttcgttcgtcgattttcgtttcgtagattcgcgtcgtttgggtttggcgcggttcggtgggttttgtgtttcgggtgttttatcgttcgcgttttttcgggtatttggtttataaagttcgggtttgttaggggtttcgcgtgcgttttagtttaggttcgttagacgttagcgcgttttttacgcgcgtagttttacgtcgttcgggcgcgcgcgcgtttacgttttttttttcggggacgcgtttagttcgcggtttcggttttcgttcgtttttcgcgtttttcgttttataaggtcgttttttatttcgtgtgcgtcggcggcggcgtttcgttcgtcggtcggtcggttttattagcggtttttgtttttagcgttcggttcgcgtcgtacgcgttcgtttcgttcgtttgtcgttagttcggttcggtttttcgtttagcgcgtttcgagcgtcgtttatagtcgttcgtttagcgttattttggaagtttgtgacgtcggcgtcgttcgtttatttttgatttatatttgaatgggcgagcggcggggcggggatagggggtagttgggggcgtggtttgtgaataggggcggggtttgcgggggcggggtcgggtcggatagcggttttagtattaggcggggcgggttgtcggggttcggcgtcgtgggggaggggtgcgcgggaggagtcggggatttagatttcggatatttaatcggatttcgattttaagcgttagggtaggatcgcgatttcgtttttgaaatattcggatcgtatatcggttttcgggatagggattttggtttttttcgataggttgacgtttatttttttaaattttggtgga

SEQ ID NO: 19242 - DNA, 1005 bp, Artificial Sequence
  chemically treated genomic DNA (Homo sapiens) CpG-island No: 19242
tccaccaaaatttaaaaaaataaacgtcaacctatcgaaaaaaaccaaaatccctatcccgaaaaccgatatacgatccgaatatttcaaaaacgaaatcgcgatcctaccctaacgcttaaaatcgaaatccgattaaatatccgaaatctaaatccccgactcctcccgcgcacccctcccccacgacgccgaaccccgacaacccgccccgcctaatactaaaaccgctatccgacccgaccccgcccccgcaaaccccgcccctattcacaaaccacgcccccaactaccccctatccccgccccgccgctcgcccattcaaatataaatcaaaaataaacgaacgacgccgacgtcacaaacttccaaaataacgctaaacgaacgactataaacgacgctcgaaacgcgctaaacgaaaaaccgaaccgaactaacgacaaacgaacgaaacgaacgcgtacgacgcgaaccgaacgctaaaaacaaaaaccgctaataaaaccgaccgaccgacgaacgaaacgccgccgccgacgcacacgaaataaaaaacgaccttataaaacgaaaaacgcgaaaaacgaacgaaaaccgaaaccgcgaactaaacgcgtccccgaaaaaaaaaacgtaaacgcgcgcgcgcccgaacgacgtaaaactacgcgcgtaaaaaacgcgctaacgtctaacgaacctaaactaaaacgcacgcgaaacccctaacaaacccgaactttataaaccaaatacccgaaaaaacgcgaacgataaaacacccgaaacacaaaacccaccgaaccgcgccaaacccaaacgacgcgaatctacgaaacgaaaatcgacgaacgaacgaacgccgactctttataccttttcattaacaatctaatccgaacaacgtcgaacgaactacgctacctaacaaacgaaaaaactcccattatacaaacgaccctacgcccgcgttcgccccctcgctaaaaaattttacgatt

SEQ ID NO: 19243 - DNA, 1005 bp, Artificial Sequence
  chemically treated genomic DNA (Homo sapiens) CpG-island No: 19243
tttattagagtttgagggggtgggcgttagtttgtcggggggggttagggtttttgtttcgggggtcggtatgcggttcgggtattttaggggcgaggtcgcggttttgttttggcgtttgaggtcggagttcggttagatgttcggggtttgggttttcggtttttttcgcgtattttttttttacggcgtcggatttcggtagttcgtttcgtttagtgttgggatcgttgttcggttcggtttcgttttcgtaggtttcgtttttgtttataggttacgtttttagttgttttttgttttcgtttcgtcgttcgtttatttagatgtgggttaggggtgagcgggcggcgtcgacgttataagtttttaagatggcgttgggcgggcggttgtgagcggcgttcggggcgcgttaggcggggagtcgagtcgggttggcggtaggcggacggggcgggcgcgtgcggcgcgagtcgggcgttgaggataagggtcgttggtagggtcggtcggtcggcgggcggagcgtcgtcgtcgacgtatacgaggtgaggggcggttttgtggggcggggggcgcggggagcgggcgggggtcggggtcgcgggttgggcgcgttttcggggagaggggcgtggacgcgcgcgcgttcgggcgacgtgggattgcgcgcgtgggggacgcgttagcgtttggcgggtttgggttggggcgtacgcgggatttttggtaggttcgggttttgtgggttagatgttcggaggggcgcgggcggtggggtattcggggtataaagtttatcgggtcgcgttaggtttaggcggcgcgggtttgcggagcgggggtcggcgggcgagcgggcgtcggttttttgtgtttttttattagtaatttaattcgaatagcgtcgggcgagttgcgttgtttgataggcgggagggtttttattatgtaaacggttttgcgttcgcgttcgttttttcgttagaggattttgcgatt

SEQ ID NO: 19244 - DNA, 1005 bp, Artificial Sequence
  chemically treated genomic DNA (Homo sapiens) CpG-island No: 19244
aatcgcaaaatcctctaacgaaaaaacgaacgcgaacgcaaaaccgtttacataataaaaaccctcccgcctatcaaacaacgcaactcgcccgacgctattcgaattaaattactaataaaaaaacacaaaaaaccgacgcccgctcgcccgccgacccccgctccgcaaacccgcgccgcctaaacctaacgcgacccgataaactttataccccgaataccccaccgcccgcgcccctccgaacatctaacccacaaaacccgaacctaccaaaaatcccgcgtacgccccaacccaaacccgccaaacgctaacgcgtcccccacgcgcgcaatcccacgtcgcccgaacgcgcgcgcgtccacgcccctctccccgaaaacgcgcccaacccgcgaccccgacccccgcccgctccccgcgccccccgccccacaaaaccgcccctcacctcgtatacgtcgacgacgacgctccgcccgccgaccgaccgaccctaccaacgacccttatcctcaacgcccgactcgcgccgcacgcgcccgccccgtccgcctaccgccaacccgactcgactccccgcctaacgcgccccgaacgccgctcacaaccgcccgcccaacgccatcttaaaaacttataacgtcgacgccgcccgctcacccctaacccacatctaaataaacgaacgacgaaacgaaaacaaaaaacaactaaaaacgtaacctataaacaaaaacgaaacctacgaaaacgaaaccgaaccgaacaacgatcccaacactaaacgaaacgaactaccgaaatccgacgccgtaaaaaaaaaatacgcgaaaaaaaccgaaaacccaaaccccgaacatctaaccgaactccgacctcaaacgccaaaacaaaaccgcgacctcgcccctaaaatacccgaaccgcataccgacccccgaaacaaaaaccctaaccccccccgacaaactaacgcccaccccctcaaactctaataaa

SEQ ID NO: 19245 - DNA, 752 bp, Artificial Sequence
  chemically treated genomic DNA (Homo sapiens) CpG-island No: 19245
gggcggcgtcgacgttataagtttttaagatggcgttgggcgggcggttgtgagcggcgttcggggcgcgttaggcggggagtcgagtcgggttggcggtaggcggacggggcgggcgcgtgcggcgcgagtcgggcgttgaggataagggtcgttggtagggtcggtcggtcggcgggcggagcgtcgtcgtcgacgtatacgaggtgaggggcggttttgtggggcgggggtcgcggggagcgggcgggggtcggggtcgcgggttgggcgcgttttcggggagaggggcgtggacgcgcgcgcgttcgggcgacgtgggattgcgcgcgtgggggacgcgttagcgtttggcgggtttgggttggggcgtacgcgggatttttggtaggttcgggttttgtgggttagatgttcggaggggcgcgggcggtggggtattcggggtataaagtttatcgggtcgcgttaggtttaggcggcgcgggtttgcggagcgggggtcggcgggcgagcgggcgtcggttttttgtgtttttttattagtaatttaattcgaatagcgtcgggcgagttgcgttgtttgataggcgggagggtttttattatgtaaacggttttgcgttcgcggtcgttttttcgttagaggattttgcgatttttaggattgcggttttgtatcgtttgcggtttttttttttgtttttttttcgcgggaagattggttacggtaggggtaggggcgggtttgg

SEQ ID NO: 19246 - DNA, 752 bp, Artificial Sequence
  chemically treated genomic DNA (Homo sapiens) CpG-island No: 19246
ccaaacccgcccctacccctaccgtaaccaatcttcccgcgaaaaaaaaacaaaaaaaaaaaccgcaaacgatacaaaaccgcaatcctaaaaatcgcaaaatcctctaacgaaaaaacgaccgcgaacgcaaaaccgtttacataataaaaaccctcccgcctatcaaacaacgcaactcgcccgacgctattcgaattaaattactaataaaaaaacacaaaaaaccgacgcccgctcgcccgccgacccccgctccgcaaacccgcgccgcctaaacctaacgcgacccgataaactttataccccgaataccccaccgcccgcgcccctccgaacatctaacccacaaaacccgaacctaccaaaaatcccgcgtacgccccaacccaaacccgccaaacgctaacgcgtcccccacgcgcgcaatcccacgtcgcccgaacgcgcgcgcgtccacgcccctctccccgaaaacgcgcccaacccgcgaccccgacccccgcccgctccccgcgacccccgccccacaaaaccgcccctcacctcgtatacgtcgacgacgacgctccgcccgccgaccgaccgaccctaccaacgacccttatcctcaacgcccgactcgcgccgcacgcgcccgccccgtccgcctaccgccaacccgactcgactccccgcctaacgcgccccgaacgccgctcacaaccgcccgcccaacgccatcttaaaaacttataacgtcgacgccgccc

SEQ ID NO: 19247 - DNA, 752 bp, Artificial Sequence
  chemically treated genomic DNA (Homo sapiens) CpG-island No: 19247
ttaggttcgtttttgtttttgtcgtggttagttttttcgcggggaggaggtaagagaggagatcgtagacggtgtaggatcgtagttttggaaatcgtaaaattttttagcgagggggcggtcgcgggcgtagggtcgtttgtataatgggagttttttcgtttgttaggtagcgtagttcgttcgacgttgttcggattagattgttaatgaaaaggtataaagagtcggcgttcgttcgttcgtcgattttcgtttcgtagattcgcgtcgtttgggtttggcgcggttcggtgggttttgtgtttcgggtgttttatcgttcgcgttttttcgggtatttggtttataaagttcgggtttgttaggggtttcgcgtgcgttttagtttaggttcgttagacgttagcgcgttttttacgcgcgtagttttacgtcgttcgggcgcgcgcgcgtttacgttttttttttcggggacgcgtttagttcgcggtttcggttttcgttcgtttttcgcgattttcgttttataaggtcgttttttatttcgtgtgcgtcggcggcggcgtttcgttcgtcggtcggtcggttttattagcggtttttgtttttagcgttcggttcgcgtcgtacgcgttcgtttcgttcgtttgtcgttagttcggttcggtttttcgtttagcgcgtttcgagcgtcgtttatagtcgttcgtttagcgttattttggaagtttgtgacgtcggcgtcgttt

SEQ ID NO: 19248 - DNA, 752 bp, Artificial Sequence
  chemically treated genomic DNA (Homo sapiens) CpG-island No: 19248
aaacgacgccgacgtcacaaacttccaaaataacgctaaacgaacgactataaacgacgctcgaaacgcgctaaacgaaaaaccgaaccgaactaacgacaaacgaacgaaacgaacgcgtacgacgcgaaccgaacgctaaaaacaaaaaccgctaataaaaccgaccgaccgacgaacgaaacgccgccgccgacgcacacgaaataaaaaacgaccttataaaacgaaaatcgcgaaaaacgaacgaaaaccgaaaccgcgaactaaacgcgtccccgaaaaaaaaaacgtaaacgcgcgcgcgcccgaacgacgtaaaactacgcgcgtaaaaaacgcgctaacgtctaacgaacctaaactaaaacgcacgcgaaacccctaacaaacccgaactttataaaccaaatacccgaaaaaacgcgaacgataaaacacccgaaacacaaaacccaccgaaccgcgccaaacccaaacgacgcgaatctacgaaacgaaaatcgacgaacgaacgaacgccgactctttataccttttcattaacaatctaatccgaacaacgtcgaacgaactacgctacctaacaaacgaaaaaactcccattatacaaacgaccctacgcccgcgaccgccccctcgctaaaaaattttacgatttccaaaactacgatcctacaccgtctacgatctcctctcttacctcctccccgcgaaaaaactaaccacgacaaaaacaaaaacgaacctaa

SEQ ID NO: 19249 - DNA, 603 bp, Artificial Sequence
  chemically treated genomic DNA (Homo sapiens) CpG-island No: 19249
tagtagcggggatagcgtgtagcgtaggcggcgtagcgtcgttttcgaggtgaggttttagagttacgcggagacggcgtcggggtttaatagtatcgtttagagtagcgatagttttaggaagaggagcggtagcgttagtagtatttgtagcgcgtttagtacgtatcgtttgcggggcgaaaggcgggtaggtgggcggtaattcgggcgggtatttgggggatcgcggtcgcgtttatcgttcggtttatttgatggttagcgcgcgagggtcgtcgaatagtcgcgttttttgcggggagagagggtcgtatttagttattttcgcgttcgcggcgtcggttcggtttttaggaggagggggaggcggtatcgcgggggggacggggagggttgtttcgttttagtttatttcgttcggattcgcgtaggcgtttattcggttcgttttggttattttttttatgagcgattcggtgttgtattgtatttcgcgaagttgttcgttatatttgcggggataggtatgtaggtgggagtttatttcggttttatagtgtttcgtcgcgttcgtaggtttaatttttttatagttttcgg

SEQ ID NO: 19250 - DNA, 603 bp, Artificial Sequence
  chemically treated genomic DNA (Homo sapiens) CpG-island No: 19250
ccgaaaactataaaaaaattaaacctacgaacgcgacgaaacactataaaaccgaaataaactcccacctacatacctatccccgcaaatataacgaacaacttcgcgaaatacaatacaacaccgaatcgctcataaaaaaaataaccaaaacgaaccgaataaacgcctacgcgaatccgaacgaaataaactaaaacgaaacaaccctccccgtcccccccgcgataccgcctccccctcctcctaaaaaccgaaccgacgccgcgaacgcgaaaataactaaatacgaccctctctccccgcaaaaaacgcgactattcgacgaccctcgcgcgctaaccatcaaataaaccgaacgataaacgcgaccgcgatcccccaaatacccgcccgaattaccgcccacctacccgcctttcgccccgcaaacgatacgtactaaacgcgctacaaatactactaacgctaccgctcctcttcctaaaactatcgctactctaaacgatactattaaaccccgacgccgtctccgcgtaactctaaaacctcacctcgaaaacgacgctacgccgcctacgctacacgctatccccgctacta

SEQ ID NO: 19251 - DNA, 603 bp, Artificial Sequence
  chemically treated genomic DNA (Homo sapiens) CpG-island No: 19251
tcgggaattgtaagggagttgggtttgcgggcgcggcggggtattgtggggtcgggatgggtttttatttgtatgtttgttttcgtaggtgtgacgggtagtttcgcggagtgtagtatagtatcgaatcgtttatggaggagatggttagggcggatcgagtgagcgtttgcgcgggttcgggcggggtgggttggagcgggataatttttttcgtttttttcgcggtatcgtttttttttttttttggaaatcgggtcggcgtcgcgggcgcggaggtagttggatgcggtttttttttttcgtaggagacgcggttgttcggcggttttcgcgcgttggttattaggtgagtcgggcggtgggcgcggtcgcggttttttaggtgttcgttcgagttgtcgtttatttgttcgtttttcgtttcgtaggcggtgcgtgttgggcgcgttgtaggtgttgttgacgttgtcgtttttttttttggggttgtcgttgttttggacggtgttgttggatttcggcgtcgttttcgcgtggttttggagttttatttcggagacgacgttgcgtcgtttgcgttatacgttgttttcgttgttg

SEQ ID NO: 19252 - DNA, 603 bp, Artificial Sequence
  chemically treated genomic DNA (Homo sapiens) CpG-island No: 19252
caacaacgaaaacaacgtataacgcaaacgacgcaacgtcgtctccgaaataaaactccaaaaccacgcgaaaacgacgccgaaatccaacaacaccgtccaaaacaacgacaaccccaaaaaaaaaaacgacaacgtcaacaacacctacaacgcgcccaacacgcaccgcctacgaaacgaaaaacgaacaaataaacgacaactcgaacgaacacctaaaaaaccgcgaccgcgcccaccgcccgactcacctaataaccaacgcgcgaaaaccgccgaacaaccgcgtctcctacgaaaaaaaaaaaccgcatccaactacctccgcgcccgcgacgccgacccgatttccaaaaaaaaaaaaaaacgataccgcgaaaaaaacgaaaaaaattatcccgctccaacccaccccgcccgaacccgcgcaaacgctcactcgatccgccctaaccatctcctccataaacgattcgatactatactacactccgcgaaactacccgtcacacctacgaaaacaaacatacaaataaaaacccatcccgaccccacaataccccgccgcgcccgcaaacccaactcccttacaattcccga

SEQ ID NO: 19253 - DNA, 553 bp, Artificial Sequence
  chemically treated genomic DNA (Homo sapiens) CpG-island No: 19253
tttcgcgttattaggttcgtgaattttatttttattagagaattagcgcgggcggacgagtaaagtgaaatttagtagttcggaatttcgcgtgtcgggttttcgtagtaatacgtatcgggaagcgtttgggcgttgtatcgcgttgcgtcgtgttcgtgagttcggcgcgtagaggaggaggagaaagttgatcgtttaggttcgggtagtggtcgtcgtggttttttttgtagttcgtggtttgagattaggttttaagtggaaacggcgttattatgatcgtacggcggaatttagaatttttacggtttttgtcggatgaggttcggagtttgttttcgtttaagttgatcgattcgcggtttttttatatcggttttttgggttattgtttcggtttgattgataacgtgattcggcggaggtcgatcgcgacggttggtgagtgttgcgcggtcgggatcggttgggaggagaaggggtcgtagggttgtagattggttcggtcgtaggtttttttgaggtgttttgttttttcgtgtttttttgt

SEQ ID NO: 19254 - DNA, 553 bp, Artificial Sequence
  chemically treated genomic DNA (Homo sapiens) CpG-island No: 19254
acaaaaaaacacgaaaaaacaaaacacctcaaaaaaacctacgaccgaaccaatctacaaccctacgaccccttctcctcccaaccgatcccgaccgcgcaacactcaccaaccgtcgcgatcgacctccgccgaatcacgttatcaatcaaaccgaaacaataacccaaaaaaccgatataaaaaaaccgcgaatcgatcaacttaaacgaaaacaaactccgaacctcatccgacaaaaaccgtaaaaattctaaattccgccgtacgatcataataacgccgtttccacttaaaacctaatctcaaaccacgaactacaaaaaaaaccacgacgaccactacccgaacctaaacgatcaactttctcctcctcctctacgcgccgaactcacgaacacgacgcaacgcgatacaacgcccaaacgcttcccgatacgtattactacgaaaacccgacacgcgaaattccgaactactaaatttcactttactcgtccgcccgcgctaattctctaataaaaataaaattcacgaacctaataacgcgaaa

SEQ ID NO: 19255 - DNA, 553 bp, Artificial Sequence
  chemically treated genomic DNA (Homo sapiens) CpG-island No: 19255
gtaaaaaggtacggaaaagtagagtattttaggggggtttacggtcgggttagtttgtagttttacgattttttttttttttagtcgatttcggtcgcgtagtatttattagtcgtcgcgatcggttttcgtcggattacgttattaattaggtcggagtagtagtttaagaagtcgatgtagaggagtcgcgggtcggttagtttgggcgggggtaggtttcgggttttattcggtagaaatcgtaagggttttgggtttcgtcgtgcgattatggtgacgtcgtttttatttgaggtttggttttagattacgaattataaggaaaattacgacgattattattcgggtttaagcggttagtttttttttttttttttgcgcgtcggatttacgggtacggcgtagcgcggtgtagcgtttaaacgtttttcggtacgtgttgttgcgggaattcggtacgcgaagtttcgggttattaagttttattttgttcgttcgttcgcgttaattttttggtgggagtgggatttacgggtttggtaacgcgggg

SEQ ID NO: 19256 - DNA, 553 bp, Artificial Sequence
  chemically treated genomic DNA (Homo sapiens) CpG-island No: 19256
ccccgcgttaccaaacccgtaaatcccactcccaccaaaaaattaacgcgaacgaacgaacaaaataaaacttaataacccgaaacttcgcgtaccgaattcccgcaacaacacgtaccgaaaaacgtttaaacgctacaccgcgctacgccgtacccgtaaatccgacgcgcaaaaaaaaaaaaaaaaactaaccgcttaaacccgaataataatcgtcgtaattttccttataattcgtaatctaaaaccaaacctcaaataaaaacgacgtcaccataatcgcacgacgaaacccaaaacccttacgatttctaccgaataaaacccgaaacctacccccgcccaaactaaccgacccgcgactcctctacatcgacttcttaaactactactccgacctaattaataacgtaatccgacgaaaaccgatcgcgacgactaataaatactacgcgaccgaaatcgactaaaaaaaaaaaaaatcgtaaaactacaaactaacccgaccgtaaacccccctaaaatactctacttttccgtacctttttac

SEQ ID NO: 19257 - DNA, 674 bp, Artificial Sequence
  chemically treated genomic DNA (Homo sapiens) CpG-island No: 19257
ttagtcgttcggtcggtcgcgatgtattttggggaaggagtagtattaaatttaagatggcggttagtaggaggttgatgaaggtaaaagttattttttggtagcggtcgggcgtggggcggcgttttaggtttcggattttcgaggtaggcggcggttttttagggcgttgtcgtttggttttttgttttatacggtttcgtcggttttttgggtcgcgcgtaggtttaaggtgttaacggggttggtttaggtcgtagtttgggcgggagcgtaaggtcgcgttgggagtcgttgtcggttttttagttcggttcggggcgtttacgttatttttcgttcggagtttggtcgcgtttttttgtcgcggaggtcgcggttcgatttgagggcgtcgttaatgtgagagttcggttgggaggttttaaatcgggcgttttcggggaaggttcgagcgtcggagtttttgttcggagttcgcgtcgcggaatcgtttcgttttgggtcgtagcgcgtcgggtttgtagtttcgtttggttcggtcgtagttcgggagtttgggaggttcgggttaggaaagagagaaggaggttaggcggttaaagttaggttagtttgttggtgggtcgtttggaattgcgttgggttttagtaaattgtcgttttgtgattgt

SEQ ID NO: 19258 - DNA, 674 bp, Artificial Sequence
  chemically treated genomic DNA (Homo sapiens) CpG-island No: 19258
acaatcacaaaacgacaatttactaaaacccaacgcaattccaaacgacccaccaacaaactaacctaactttaaccgcctaacctccttctctctttcctaacccgaacctcccaaactcccgaactacgaccgaaccaaacgaaactacaaacccgacgcgctacgacccaaaacgaaacgattccgcgacgcgaactccgaacaaaaactccgacgctcgaaccttccccgaaaacgcccgatttaaaacctcccaaccgaactctcacattaacgacgccctcaaatcgaaccgcgacctccgcgacaaaaaaacgcgaccaaactccgaacgaaaaataacgtaaacgccccgaaccgaactaaaaaaccgacaacgactcccaacgcgaccttacgctcccgcccaaactacgacctaaaccaaccccgttaacaccttaaacctacgcgcgacccaaaaaaccgacgaaaccgtataaaacaaaaaaccaaacgacaacgccctaaaaaaccgccgcctacctcgaaaatccgaaacctaaaacgccgccccacgcccgaccgctaccaaaaaataacttttaccttcatcaacctcctactaaccgccatcttaaatttaatactactccttccccaaaatacatcgcgaccgaccgaacgactaa

SEQ ID NO: 19259 - DNA, 674 bp, Artificial Sequence
  chemically treated genomic DNA (Homo sapiens) CpG-island No: 19259
gtagttataaggcgatagtttgttaggatttagcgtaattttaaacgatttattaataaattgatttaattttggtcgtttggttttttttttttttttttagttcgaattttttagattttcgagttgcggtcgggttaagcggagttgtaagttcggcgcgttgcggtttagggcggggcggtttcgcggcgcgggtttcgggtaggggtttcggcgttcgggtttttttcgaaggcgttcggtttggagttttttaatcgggtttttatattaacgacgtttttagatcggatcgcggttttcgcgatagggggacgcggttaagtttcgggcggagagtggcgtgaacgtttcgggtcgggttgaggggtcgatagcggtttttagcgcggttttgcgttttcgtttaggttgcggtttaggttagtttcgttagtattttgagtttgcgcgcggtttagggaatcgacgaggtcgtgtagggtaggaagttagacggtagcgttttgagaagtcgtcgtttgtttcggggattcggagtttaggacgtcgttttacgttcggtcgttgttagagaatggtttttatttttattagttttttgttggtcgttattttggatttggtgttgttttttttttagaatgtatcgcggtcggtcgggcggttgg

SEQ ID NO: 19260 - DNA, 674 bp, Artificial Sequence
  chemically treated genomic DNA (Homo sapiens) CpG-island No: 19260
ccaaccgcccgaccgaccgcgatacattctaaaaaaaaaacaacaccaaatccaaaataacgaccaacaaaaaactaataaaaataaaaaccattctctaacaacgaccgaacgtaaaacgacgtcctaaactccgaatccccgaaacaaacgacgacttctcaaaacgctaccgtctaacttcctaccctacacgacctcgtcgattccctaaaccgcgcgcaaactcaaaatactaacgaaactaacctaaaccgcaacctaaacgaaaacgcaaaaccgcgctaaaaaccgctatcgacccctcaacccgacccgaaacgttcacgccactctccgcccgaaacttaaccgcgtccccctatcgcgaaaaccgcgatccgatctaaaaacgtcgttaatataaaaacccgattaaaaaactccaaaccgaacgccttcgaaaaaaacccgaacgccgaaacccctacccgaaacccgcgccgcgaaaccgccccgccctaaaccgcaacgcgccgaacttacaactccgcttaacccgaccgcaactcgaaaatctaaaaaattcgaactaaaaaaaaaaaaaaaaaaccaaacgaccaaaattaaatcaatttattaataaatcgtttaaaattacgctaaatcctaacaaactatcgccttataactac

SEQ ID NO: 19261 - DNA, 712 bp, Artificial Sequence
  chemically treated genomic DNA (Homo sapiens) CpG-island No: 19261
  unsure (224, 515, 593, 595..)
cgtttgtcgaatttttgaattgtattgtttattttcgtggcgttcgggtattgatgggggggcgggcgtgtcgggcgggggcgcgcgcgcgcgtcggcggcgcggcgcgggcggggcgggcgcgttcgcgcgggcgggtcgttcgttcgataattcggtcgttcggtcggtcggacggtcggtcgttcggtcggtcggttcgggcgggcgggcgcgcgcgcgtngggtcgttttttcgataattcggtcgtacggtcggtcggtcgggacggtcgttcggtcgttcgttcgttcgttaattcggtcggtcggtcgggacggcggtacgagtgataagtggttatcgagcgttagcggggagagaattaggaaagggggatttgtatgtggggattttgtgagaagagacgatttgatagagtgcggttattgcggagtgtgggaaatagttcgtgcgggtagttaagtattaattaagttcgaattttatcgttcgcggcgtacgtcgtacgttntaggatttagacgttaattaaaaggcgttcgtcggggagaataggggaggcgaattttacgaggaaatgtggtttatntnnagagtaggggggtgaacgagattatgaaggtacggtcgttagagattcggagagggaatagatatggagggttataaaaaaggggttacgggtatatgtttattttgtttatttat

SEQ ID NO: 19262 - DNA, 712 bp, Artificial Sequence
  chemically treated genomic DNA (Homo sapiens) CpG-island No: 19262
  unsure (117..118, 120, 198, 489)
ataaataaacaaaataaacatatacccgtaaccccttttttataaccctccatatctattccctctccgaatctctaacgaccgtaccttcataatctcgttcacccccctactctnnanataaaccacatttcctcgtaaaattcgcctcccctattctccccgacgaacgccttttaattaacgtctaaatcctanaacgtacgacgtacgccgcgaacgataaaattcgaacttaattaatacttaactacccgcacgaactatttcccacactccgcaataaccgcactctatcaaatcgtctcttctcacaaaatccccacatacaaatccccctttcctaattctctccccgctaacgctcgataaccacttatcactcgtaccgccgtcccgaccgaccgaccgaattaacgaacgaacgaacgaccgaacgaccgtcccgaccgaccgaccgtacgaccgaattatcgaaaaaacgacccnacgcgcgcgcgcccgcccgcccgaaccgaccgaccgaacgaccgaccgtccgaccgaccgaacgaccgaattatcgaacgaacgacccgcccgcgcgaacgcgcccgccccgcccgcgccgcgccgccgacgcgcgcgcgcgcccccgcccgacacgcccgcccccccatcaatacccgaacgccacgaaaataaacaatacaattcaaaaattcgacaaacg

SEQ ID NO: 19263 - DNA, 712 bp, Artificial Sequence
  chemically treated genomic DNA (Homo sapiens) CpG-island No: 19263
  unsure (117..118, 120, 198, 489)
ataggtggatagggtaggtatatgttcgtaattttttttttgtagttttttatatttatttttttttcgggtttttggcgatcgtgtttttatagtttcgtttatttttttattttnngngtaaattatattttttcgtgaagttcgttttttttatttttttcggcgggcgttttttgattggcgtttgggttttanaacgtgcggcgtgcgtcgcgggcgatggggttcgggtttagttggtgtttggttgttcgtacgggttgttttttatatttcgtaatggtcgtattttgttaaatcgtttttttttataaagtttttatatgtaagttttttttttttagtttttttttcgttaacgttcggtgattatttgttattcgtatcgtcgtttcggtcggtcggtcgggttggcgggcgggcgggcgatcgggcggtcgtttcggtcggtcggtcgtgcggtcgggttgtcggggggacggtttnacgcgcgcgcgttcgttcgttcgggtcggtcggtcgggcggtcggtcgttcggtcggtcgggcggtcgggttgtcgggcgggcggttcgttcgcgcgggcgcgttcgtttcgttcgcgtcgcgtcgtcggcgcgcgcgcgcgttttcgttcggtacgttcgtttttttattaatattcgagcgttacgggggtaagtaatatagtttaagagttcgataagcg

SEQ ID NO: 19264 - DNA, 712 bp, Artificial Sequence
  chemically treated genomic DNA (Homo sapiens) CpG-island No: 19264
  unsure (224, 515, 593, 595..)
cgcttatcgaactcttaaactatattacttacccccgtaacgctcgaatattaataaaaaaacgaacgtaccgaacgaaaacgcgcgcgcgcgccgacgacgcgacgcgaacgaaacgaacgcgcccgcgcgaacgaaccgcccgcccgacaacccgaccgcccgaccgaccgaacgaccgaccgcccgaccgaccgacccgaacgaacgaacgcgcgcgcgtnaaaccgtccccccgacaacccgaccgcacgaccgaccgaccgaaacgaccgcccgatcgcccgcccgcccgccaacccgaccgaccgaccgaaacgacgatacgaataacaaataatcaccgaacgttaacgaaaaaaaaactaaaaaaaaaaaacttacatataaaaactttataaaaaaaaacgatttaacaaaatacgaccattacgaaatataaaaaacaacccgtacgaacaaccaaacaccaactaaacccgaaccccatcgcccgcgacgcacgccgcacgttntaaaacccaaacgccaatcaaaaaacgcccgccgaaaaaaataaaaaaaacgaacttcacgaaaaaatataatttacncnnaaaataaaaaaataaacgaaactataaaaacacgatcgccaaaaacccgaaaaaaaaataaatataaaaaactacaaaaaaaaaattacgaacatatacctaccctatccacctat

SEQ ID NO: 19265 - DNA, 714 bp, Artificial Sequence
  chemically treated genomic DNA (Homo sapiens) CpG-island No: 19265
gtcgagtagaattttatcgatattttatttttgtttatatggagatagatttttttcgtcgagtcgtttttttttagtaggttttgtttttgtttttttatcggtagagcgtagtcgtggttatcggcgggcgagtttttgaagagcgaggtggttagtcgtagttttacgtcgtttagtcggtttagtaagcgagttagtttagtttcgttggttaagattgttcgtaggtagcgattttttttttgtagtgtttgtacgcgtttgtttagttttcgattttcggttcgtagtttttggttttcggttgttagatttcggattcgattttttagttttattacgtatttttttttttttagtcgattaaggcgggtagcggtcgtcgtcgtttttcggggattttttgtcgtcgtttggttgttgtcgttatcgttgtcgttatcgtcgtttttttttggggatttttttcgttttttttcggcgttgttattgttattgttgttgttgtagttttcgatatcgtttaatagtttttgtagtaggttagagaagcgttgtattttagtagtcgcggttttatcgttatcgttttttttttataggtcgtcgttattcgagttttcgttagacgaggagagaggtttcggcgagttaagttcggggtttaggtgttagttcggttgtttggggtttaggagattcgttagtttt

SEQ ID NO: 19266 - DNA, 714 bp, Artificial Sequence
  chemically treated genomic DNA (Homo sapiens) CpG-island No: 19266
aaaactaacgaatctcctaaaccccaaacaaccgaactaacacctaaaccccgaacttaactcgccgaaacctctctcctcgtctaacgaaaactcgaataacgacgacctataaaaaaaaaacgataacgataaaaccgcgactactaaaatacaacgcttctctaacctactacaaaaactattaaacgatatcgaaaactacaacaacaacaataacaataacaacgccgaaaaaaaacgaaaaaaatccccaaaaaaaaacgacgataacgacaacgataacgacaacaaccaaacgacgacaaaaaatccccgaaaaacgacgacgaccgctacccgccttaatcgactaaaaaaaaaaaaatacgtaataaaactaaaaaatcgaatccgaaatctaacaaccgaaaaccaaaaactacgaaccgaaaatcgaaaactaaacaaacgcgtacaaacactacaaaaaaaaaatcgctacctacgaacaatcttaaccaacgaaactaaactaactcgcttactaaaccgactaaacgacgtaaaactacgactaaccacctcgctcttcaaaaactcgcccgccgataaccacgactacgctctaccgataaaaaaacaaaaacaaaacctactaaaaaaaaacgactcgacgaaaaaaatctatctccatataaacaaaaataaaatatcgataaaattctactcgac

SEQ ID NO: 19267 - DNA, 714 bp, Artificial Sequence
  chemically treated genomic DNA (Homo sapiens) CpG-island No: 19267
ggaattggcggattttttggattttaggtaatcggattggtatttggatttcgggtttagttcgtcggggttttttttttcgtttggcggaggttcggatagcggcggtttgtggagaggggacgatgacgatgaggtcgcggttgttgaaatgtagcgtttttttgatttgttgtaaaggttgttaaacggtatcggaggttgtagtagtagtagtgatagtggtagcgtcgaaaagaggcggagaaagtttttaggaggaggcggcggtggcggtagcggtaacgataataattaggcggcgataaagagttttcggaaggcggcggcggtcgttgttcgttttaatcgattgaagaagaaggagtacgtgatggggttggagagtcgagttcggggtttggtagtcgagaattaggagttgcgggtcgagaatcgggagttgggtaaacgcgtataggtattgtaggaggagagtcgttatttacgggtagttttagttaacgagattggattggttcgtttgttgagtcggttgagcggcgtgggattgcggttgattatttcgttttttagagattcgttcgtcggtgattacgattacgttttgtcggtgggaaagtagaagtaggatttgttggaagaggacgattcggcgggaggagtttgtttttatgtggataaggataaggtgtcggtggagttttgttcggt

SEQ ID NO: 19268 - DNA, 714 bp, Artificial Sequence
  chemically treated genomic DNA (Homo sapiens) CpG-island No: 19268
accgaacaaaactccaccgacaccttatccttatccacataaaaacaaactcctcccgccgaatcgtcctcttccaacaaatcctacttctactttcccaccgacaaaacgtaatcgtaatcaccgacgaacgaatctctaaaaaacgaaataatcaaccgcaatcccacgccgctcaaccgactcaacaaacgaaccaatccaatctcgttaactaaaactacccgtaaataacgactctcctcctacaatacctatacgcgtttacccaactcccgattctcgacccgcaactcctaattctcgactaccaaaccccgaactcgactctccaaccccatcacgtactccttcttcttcaatcgattaaaacgaacaacgaccgccgccgccttccgaaaactctttatcgccgcctaattattatcgttaccgctaccgccaccgccgcctcctcctaaaaactttctccgcctcttttcgacgctaccactatcactactactactacaacctccgataccgtttaacaacctttacaacaaatcaaaaaaacgctacatttcaacaaccgcgacctcatcgtcatcgtcccctctccacaaaccgccgctatccgaacctccgccaaacgaaaaaaaaaaccccgacgaactaaacccgaaatccaaataccaatccgattacctaaaatccaaaaaatccgccaattcc

SEQ ID NO: 19269 - DNA, 556 bp, Artificial Sequence
  chemically treated genomic DNA (Homo sapiens) CpG-island No: 19269
tagggatatatggggatacgacgtgtgtatggggatggttcgtatcggcgatgtggggtcgaaaaacgttcgcgttcgggggtgagatgcggttaatgttgtaaagatcgacggtttggaagagtgatttttcgtggttgagtttacgcgcgtttatgtagttaacggcgtgggttttgagggagttaatagaatcggtttggtgtttcggtgcggggttcgagttggtttcggcggataaagaaaggtgggtttagtagttttttttttgtcggtaataatttagggcgggtttgcggttaatgttgcgttttaggggggtttcgattacgtaagttcggttttttttatttagatgagcgtaagggaggacgaagtgtgaacggggggtaggacggtttttacgatgtaatgggtgtttaggtacgacgggatcgttttttcggataaaatggggacggttttgggattagtaataatgtacgaatgtttttaatgggggacgtcgatcgattagaaggtatgggtcgagaaagtgattaattaagatagatgg

SEQ ID NO: 19270 - DNA, 556 bp, Artificial Sequence
  chemically treated genomic DNA (Homo sapiens) CpG-island No: 19270
ccatctatcttaattaatcactttctcgacccataccttctaatcgatcgacgtcccccattaaaaacattcgtacattattactaatcccaaaaccgtccccattttatccgaaaaaacgatcccgtcgtacctaaacacccattacatcgtaaaaaccgtcctaccccccgttcacacttcgtcctcccttacgctcatctaaataaaaaaaaccgaacttacgtaatcgaaacccccctaaaacgcaacattaaccgcaaacccgccctaaattattaccgacaaaaaaaaaactactaaacccacctttctttatccgccgaaaccaactcgaaccccgcaccgaaacaccaaaccgattctattaactccctcaaaacccacgccgttaactacataaacgcgcgtaaactcaaccacgaaaaatcactcttccaaaccgtcgatctttacaacattaaccgcatctcacccccgaacgcgaacgtttttcgaccccacatcgccgatacgaaccatccccatacacacgtcgtatccccatatatcccta

SEQ ID NO: 19271 - DNA, 556 bp, Artificial Sequence
  chemically treated genomic DNA (Homo sapiens) CpG-island No: 19271
ttatttgttttggttagttattttttcgatttatattttttggtcgatcgacgttttttattggagatattcgtatattgttattggttttaggatcgtttttattttgttcgagagagcgatttcgtcgtatttggatatttattatatcgtagaagtcgttttgtttttcgtttatatttcgtttttttttgcgtttatttggataaagaggatcgagtttgcgtagtcgagatttttttagagcgtagtattagtcgtaagttcgttttgaattattatcgataggaggaggattattgagtttatttttttttattcgtcgaggttaattcggatttcgtatcgggatattaagtcgattttgttaatttttttaaggtttacgtcgttgattatataaacgcgcgtagatttaattacgaggaattatttttttaggtcgtcgatttttgtagtattgatcgtattttattttcggacgcggacgtttttcgattttatatcgtcggtgcggattatttttatatatacgtcgtatttttatgtgtttttg

SEQ ID NO: 19272 - DNA, 556 bp, Artificial Sequence
  chemically treated genomic DNA (Homo sapiens) CpG-island No: 19272
caaaaacacataaaaatacgacgtatatataaaaataatccgcaccgacgatataaaatcgaaaaacgtccgcgtccgaaaataaaatacgatcaatactacaaaaatcgacgacctaaaaaaataattcctcgtaattaaatctacgcgcgtttatataatcaacgacgtaaaccttaaaaaaattaacaaaatcgacttaatatcccgatacgaaatccgaattaacctcgacgaataaaaaaaaataaactcaataatcctcctcctatcgataataattcaaaacgaacttacgactaatactacgctctaaaaaaatctcgactacgcaaactcgatcctctttatccaaataaacgcaaaaaaaaacgaaatataaacgaaaaacaaaacgacttctacgatataataaatatccaaatacgacgaaatcgctctctcgaacaaaataaaaacgatcctaaaaccaataacaatatacgaatatctccaataaaaaacgtcgatcgaccaaaaaatataaatcgaaaaaataactaaccaaaacaaataa

SEQ ID NO: 19273 - DNA, 643 bp, Artificial Sequence
  chemically treated genomic DNA (Homo sapiens) CpG-island No: 19273
  unsure (583..)
gcggaattaacggttttcggttatcgttaataggacgtttggcgatttgttgtattgtattgttgatttacgtgtgtacgcgtattgatatgggggtggggtggggtggggtggggtggggataggacgattgataaggtggcggggttggcgttggtttgggagtggggaagtaggggcggggcgggtggagggcgatgcgttgcgggtgggacgggaaggggacggggtggagtggggcgatggacgggtgggtgttattttaaaaatacggggtaagggtggggatcgtgggttaaagattgcgtaggcgggggggcgcgcggcgattgggagggaggggatgcgggacggggacgcgtgaagtggtacgagtattgcgggaatggatcgatgaagtatttagtagacgtaggtagagagttggagggaatcggggatagcggcgggagggaattagcgtgtgggtggttagttggcgaacggttgtcggcgggtttgggttaacggtgcgttggaggacgtaggacgagatgggtttgaggagggggtatatttgtaagggggggggggggggtttttnnnttcgtatagcgtcgatttttttagttcgttatcggaattaggatgattatgagttata

SEQ ID NO: 19274 - DNA, 643 bp, Artificial Sequence
  chemically treated genomic DNA (Homo sapiens) CpG-island No: 19274
  unsure (59..)
tataactcataatcatcctaattccgataacgaactaaaaaaatcgacgctatacgaannnaaaaacccccccccccccccttacaaatataccccctcctcaaacccatctcgtcctacgtcctccaacgcaccgttaacccaaacccgccgacaaccgttcgccaactaaccacccacacgctaattccctcccgccgctatccccgattccctccaactctctacctacgtctactaaatacttcatcgatccattcccgcaatactcgtaccacttcacgcgtccccgtcccgcatcccctccctcccaatcgccgcgcgcccccccgcctacgcaatctttaacccacgatccccacccttaccccgtatttttaaaataacacccacccgtccatcgccccactccaccccgtccccttcccgtcccacccgcaacgcatcgccctccacccgccccgcccctacttccccactcccaaaccaacgccaaccccgccaccttatcaatcgtcctatccccaccccaccccaccccaccccacccccatatcaatacgcgtacacacgtaaatcaacaatacaatacaacaaatcgccaaacgtcctattaacgataaccgaaaaccgttaattccgc

SEQ ID NO: 19275 - DNA, 643 bp, Artificial Sequence
  chemically treated genomic DNA (Homo sapiens) CpG-island No: 19275
  unsure (59..)
tgtagtttatggttattttgatttcgatagcgaattgggaaaatcggcgttatacgaannnaaaaatttttttttttttttttgtaaatatgttttttttttaagtttatttcgttttgcgttttttaacgtatcgttagtttaaattcgtcggtaatcgttcgttaattaattatttatacgttaattttttttcgtcgttattttcggttttttttaattttttatttgcgtttattaggtgttttatcggtttattttcgtagtattcgtattattttacgcgttttcgtttcgtatttttttttttttaatcgtcgcgcgttttttcgtttacgtaatttttaatttacggtttttatttttgtttcgtatttttagggtagtatttattcgtttatcgttttattttatttcgtttttttttcgttttattcgtagcgtatcgttttttattcgtttcgtttttgtttttttatttttaagttagcgttaatttcgttattttattagtcgttttatttttattttattttattttattttatttttatattaatacgcgtgtatacgtgggttagtaatatagtataataggtcgttaagcgttttgttggcggtggtcggaaatcgttagtttcgt

SEQ ID NO: 19276 - DNA, 643 bp, Artificial Sequence
  chemically treated genomic DNA (Homo sapiens) CpG-island No: 19276
  unsure (583..)
acgaaactaacgatttccgaccaccgccaacaaaacgcttaacgacctattatactatattactaacccacgtatacacgcgtattaatataaaaataaaataaaataaaataaaataaaaataaaacgactaataaaataacgaaattaacgctaacttaaaaataaaaaaacaaaaacgaaacgaataaaaaacgatacgctacgaataaaacgaaaaaaaaacgaaataaaataaaacgataaacgaataaatactaccctaaaaatacgaaacaaaaataaaaaccgtaaattaaaaattacgtaaacgaaaaaacgcgcgacgattaaaaaaaaaaaaatacgaaacgaaaacgcgtaaaataatacgaatactacgaaaataaaccgataaaacacctaataaacgcaaataaaaaattaaaaaaaaccgaaaataacgacgaaaaaaaattaacgtataaataattaattaacgaacgattaccgacgaatttaaactaacgatacgttaaaaaacgcaaaacgaaataaacttaaaaaaaaaacatatttacaaaaaaaaaaaaaaaaatttttnnnttcgtataacgccgattttcccaattcgctatcgaaatcaaaataaccataaactaca

SEQ ID NO: 19277 - DNA, 510 bp, Artificial Sequence
  chemically treated genomic DNA (Homo sapiens) CpG-island No: 19277
cgttttacgatttttgcgttttttgcgttggggtcgggttcgttacgttcgtcgggtggtcggggtcgtgtgggtgttggtgttggtttgttaggttttcgtgttttattttgttattattagcgcgcgcgggggtcgcgtaatttgttacgatatttcggtattcgagttttttagtcgtttcgtggtttatagtttagttatgttgggtttgtttttcgcggtgttttttgtcgttatttttgtttgttacgtgtttatggttcggcgattgttaaagttagtttacgggatttcgggcggtttgtttagggttaagcgtaagttcgtgcgtattatcgtcgtggtgttggttgttttcgttttttgttttttgttattttacgttattcgtattttttattatttttttcgttcgttggattttagttgttatatttttaacgttattaatatggtttataaggttattcggtcgttggttagtgttaatagttgttttgatttcgt

SEQ ID NO: 19278 - DNA, 510 bp, Artificial Sequence
  chemically treated genomic DNA (Homo sapiens) CpG-island No: 19278
acgaaatcaaaacaactattaacactaaccaacgaccgaataaccttataaaccatattaataacgttaaaaatataacaactaaaatccaacgaacgaaaaaaataataaaaaatacgaataacgtaaaataacaaaaaacaaaaaacgaaaacaaccaacaccacgacgataatacgcacgaacttacgcttaaccctaaacaaaccgcccgaaatcccgtaaactaactttaacaatcgccgaaccataaacacgtaacaaacaaaaataacgacaaaaaacaccgcgaaaaacaaacccaacataactaaactataaaccacgaaacgactaaaaaactcgaataccgaaatatcgtaacaaattacgcgacccccgcgcgcgctaataataacaaaataaaacacgaaaacctaacaaaccaacaccaacacccacacgaccccgaccacccgacgaacgtaacgaacccgaccccaacgcaaaaaacgcaaaaatcgtaaaacg

SEQ ID NO: 19279 - DNA, 510 bp, Artificial Sequence
  chemically treated genomic DNA (Homo sapiens) CpG-island No: 19279
acggggttaaggtaattgttagtattggttagcggtcgggtaattttgtaggttatgttgatggcgttgagggtgtggtagttgaggtttagcgaacggaaggagtagtagagggtgcgggtgacgtggaatggtaggaagtagagggcgaagatagttagtattacggcgatggtgcgtacggatttgcgtttggttttaggtaggtcgttcgaggtttcgtaggttggttttagtagtcgtcgagttatgagtacgtaatagataaggatgacggtaaagggtatcgcgaagagtaggtttagtatgattgagttgtaggttacgaagcggttgaagagttcgggtgtcgaggtgtcgtggtaggttacgcggttttcgcgcgcgttggtggtgataaagtagagtacgggggtttggtaggttagtattaatatttatacggtttcggttattcggcgagcgtagcgggttcggttttagcgtagggagcgtagaggtcgtaagacg

SEQ ID NO: 19280 - DNA, 510 bp, Artificial Sequence
  chemically treated genomic DNA (Homo sapiens) CpG-island No: 19280
cgtcttacgacctctacgctccctacgctaaaaccgaacccgctacgctcgccgaataaccgaaaccgtataaatattaatactaacctaccaaacccccgtactctactttatcaccaccaacgcgcgcgaaaaccgcgtaacctaccacgacacctcgacacccgaactcttcaaccgcttcgtaacctacaactcaatcatactaaacctactcttcgcgataccctttaccgtcatccttatctattacgtactcataactcgacgactactaaaaccaacctacgaaacctcgaacgacctacctaaaaccaaacgcaaatccgtacgcaccatcgccgtaatactaactatcttcgccctctacttcctaccattccacgtcacccgcaccctctactactccttccgttcgctaaacctcaactaccacaccctcaacgccatcaacataacctacaaaattacccgaccgctaaccaatactaacaattaccttaaccccgt

SEQ ID NO: 19281 - DNA, 506 bp, Artificial Sequence
  chemically treated genomic DNA (Homo sapiens) CpG-island No: 19281
  unsure (286..)
gggaacgtttcgtagtgcgtatttcgcgtcgtatgcgttttacgcgtcgcgtcgtttagtattttttattatacgttttttatttttttattattttttaaatcgtcgtcgttattttcgcgggtgcgttaaaggtgttgtgtgttttgtttgggtttttcgtaatttatggtcgtacgggtttttgtttgttagtaatttgttattttacgtcgcgtttgtcgttttgtaggtgaagtggtgaatttttttttttgataaatttttgtcgtttcggcgcgatgtnngttaggttacgagggagtatgttcggtcgggagtattttatttcgtttttttgtttttgtgttttttatcgttattataggttcggaggtatttttaggaaatagcgttttttttttggatgtgtatgtcgatcgtttttttttaaaacgtacgtattttttttttttttttattggatcgcgttttaacgttttagggatgttgttgtaatttttttg

SEQ ID NO: 19282 - DNA, 506 bp, Artificial Sequence
  chemically treated genomic DNA (Homo sapiens) CpG-island No: 19282
  unsure (220..)
caaaaaaattacaacaacatccctaaaacgttaaaacgcgatccaataaaaaaaaaaaaaaaatacgtacgttttaaaaaaaaacgatcgacatacacatccaaaaaaaaaacgctatttcctaaaaatacctccgaacctataataacgataaaaaacacaaaaacaaaaaaacgaaataaaatactcccgaccgaacatactccctcgtaacctaacnnacatcgcgccgaaacgacaaaaatttatcaaaaaaaaaaattcaccacttcacctacaaaacgacaaacgcgacgtaaaataacaaattactaacaaacaaaaacccgtacgaccataaattacgaaaaacccaaacaaaacacacaacacctttaacgcacccgcgaaaataacgacgacgatttaaaaaataataaaaaaataaaaaacgtataataaaaaatactaaacgacgcgacgcgtaaaacgcatacgacgcgaaatacgcactacgaaacgttccc

SEQ ID NO: 19283 - DNA, 506 bp, Artificial Sequence
  chemically treated genomic DNA (Homo sapiens) CpG-island No: 19283
  unsure (220..)
taaagaaattataatagtatttttgaagcgttgaggcgcgatttagtagggaaagggagggggtgcgtacgttttaggagagggcggtcggtatgtatatttaaagagaagacgttattttttgaaggtgttttcgagtttataataacggtaagaggtataaaggtaggggggcgaggtaggatattttcggtcgggtatgttttttcgtagtttagtnngtatcgcgtcgagacggtagaaatttattaaaagaagggatttattattttatttgtagagcggtaggcgcggcgtaaagtagtaaattgttagtaggtaggggttcgtacggttataaattgcgaggggtttaggtaaggtatataatatttttagcgtattcgcgaaagtggcggcggcggtttggggaatggtaggagggtagaggacgtatagtaggggatgttaggcggcgcggcgcgtaggacgtatgcggcgcggggtacgtattacggggcgttttt

SEQ ID NO: 19284 - DNA, 506 bp, Artificial Sequence
  chemically treated genomic DNA (Homo sapiens) CpG-island No: 19284
  unsure (286..)
aaaaacgccccgtaatacgtaccccgcgccgcatacgtcctacgcgccgcgccgcctaacatcccctactatacgtcctctaccctcctaccattccccaaaccgccgccgccactttcgcgaatacgctaaaaatattatataccttacctaaacccctcgcaatttataaccgtacgaacccctacctactaacaatttactactttacgccgcgcctaccgctctacaaataaaataataaatcccttcttttaataaatttctaccgtctcgacgcgatacnnactaaactacgaaaaaacatacccgaccgaaaatatcctacctcgcccccctacctttatacctcttaccgttattataaactcgaaaacaccttcaaaaaataacgtcttctctttaaatatacataccgaccgccctctcctaaaacgtacgcaccccctccctttccctactaaatcgcgcctcaacgcttcaaaaatactattataatttcttta

SEQ ID NO: 19285 - DNA, 796 bp, Artificial Sequence
  chemically treated genomic DNA (Homo sapiens) CpG-island No: 19285
  unsure (701..702, 731, 740..741, 743, 767..768, 780..781, 783..)
gtgcggttggggggcgtatacggtgtttggatcggattagggtgggggcggtggatttgcgtatgatgtgaagtttcgttatgggtagtgtttagggttagtgtagttggggtgttgataaggattagtggcggtgcgtgtgagttttgtatcggtgcggagggcggtatgcgggagggtttgtgagttattgtttaatacgataaacgtgggtattgttgggggtggttggatcgcgggtcgtaattagaatggagggagtattatttgagttatttagttagagattgcggcggacggttagcgttttagttaaatgatgagtgtgggggaaggtagggcgacggaagggcgaaaggtataggcgttatgggaagcgagggggattagcggcggggttggtcgggtgttgaaaagcgtgaattttaatttaggcggaaagacgtaggtattatggggtaggaattgttgggggtgggggagcgtggcgttcgttaggaagggttgggcgtaaatattgtgttggggcgtgtagtggtgcgtagggtgcgtggttagtgcggattcgcggggagaagttgggtagattgattggtgggttataggagattacggatagaggtcggtaaggaatggacggtggggggttggaggatttgaaggcgggtgtttggggcgtgacggtgtttgtaatatggggnnncgtgtgtggtattttggtgggtgagatnggggattannnngatgtaggacgatgcgcgggattnnnatgggggttgnnnnngcgatttgatat

SEQ ID NO: 19286 - DNA, 796 bp, Artificial Sequence
  chemically treated genomic DNA (Homo sapiens) CpG-island No: 19286
  unsure (13..14, 16..17, 28..29, 54..55, 57, 66, 94..)
atatcaaatcgcnnnnncaacccccatnnnaatcccgcgcatcgtcctacatcnnnntaatccccnatctcacccaccaaaataccacacacgnnnccccatattacaaacaccgtcacgccccaaacacccgccttcaaatcctccaaccccccaccgtccattccttaccgacctctatccgtaatctcctataacccaccaatcaatctacccaacttctccccgcgaatccgcactaaccacgcaccctacgcaccactacacgccccaacacaatatttacgcccaacccttcctaacgaacgccacgctcccccacccccaacaattcctaccccataatacctacgtctttccgcctaaattaaaattcacgcttttcaacacccgaccaaccccgccgctaatccccctcgcttcccataacgcctatacctttcgcccttccgtcgccctaccttcccccacactcatcatttaactaaaacgctaaccgtccgccgcaatctctaactaaataactcaaataatactccctccattctaattacgacccgcgatccaaccacccccaacaatacccacgtttatcgtattaaacaataactcacaaaccctcccgcataccgccctccgcaccgatacaaaactcacacgcaccgccactaatccttatcaacaccccaactacactaaccctaaacactacccataacgaaacttcacatcatacgcaaatccaccgcccccaccctaatccgatccaaacaccgtatacgccccccaaccgcac

SEQ ID NO: 19287 - DNA, 796 bp, Artificial Sequence
  chemically treated genomic DNA (Homo sapiens) CpG-island No: 19287
  unsure (13..14, 16..17, 28..29, 54..55, 57, 66, 94..)
atattaagtcgtnnnnntaatttttatnnnagtttcgcgtatcgttttatattnnnntagtttttngttttatttattaaggtgttatatacgnnnttttatattataggtatcgttacgttttaggtattcgtttttaaattttttaattttttatcgtttattttttatcggtttttattcgtaattttttatggtttattaattagtttatttagttttttttcgcgggttcgtattaattacgtattttgcgtattattatacgttttagtatagtatttgcgtttaattttttttaacgggcgttacgtttttttatttttagtagtttttgttttataatgtttacgttttttcgtttgggttaaggtttacgttttttaatattcggttaatttcgtcgttaatttttttcgttttttataacgtttgtgtttttcgttttttcgtcgttttatttttttttatatttattatttaattaaaacgttaatcgttcgtcgtagtttttagttaggtagtttaggtagtgttttttttattttaattacggttcgcggtttagttatttttagtaatgtttacgtttatcgtattaagtagtaatttataagttttttcgtatatcgtttttcgtatcggtataaggtttatacgtatcgttattggtttttgttagtattttaattgtattagttttaaatattatttataacgaaattttatattatgcgtaagtttatcgtttttattttaattcggtttaagtatcgtatgcgttttttaatcgtat

SEQ ID NO: 19288 - DNA, 796 bp, Artificial Sequence
  chemically treated genomic DNA (Homo sapiens) CpG-island No: 19288
  unsure (701..702, 731, 740..741, 743, 767..768, 780..781, 783..)
atacgattaaaaaacgcatacgatacttaaaccgaattaaaataaaaacgataaacttacgcataatataaaatttcgttataaataatatttaaaactaatacaattaaaatactaacaaaaaccaataacgatacgtataaaccttataccgatacgaaaaacgatatacgaaaaaacttataaattactacttaatacgataaacgtaaacattactaaaaataactaaaccgcgaaccgtaattaaaataaaaaaaacactacctaaactacctaactaaaaactacgacgaacgattaacgttttaattaaataataaatataaaaaaaaataaaacgacgaaaaaacgaaaaacacaaacgttataaaaaacgaaaaaaattaacgacgaaattaaccgaatattaaaaaacgtaaaccttaacccaaacgaaaaaacgtaaacattataaaacaaaaactactaaaaataaaaaaacgtaacgcccgttaaaaaaaattaaacgcaaatactatactaaaacgtataataatacgcaaaatacgtaattaatacgaacccgcgaaaaaaaactaaataaactaattaataaaccataaaaaattacgaataaaaaccgataaaaaataaacgataaaaaattaaaaaatttaaaaacgaatacctaaaacgtaacgatacctataatataaaannncgtatataacaccttaataaataaaacnaaaaactannnnaatataaaacgatacgcgaaactnnnataaaaattannnnnacgacttaatat

SEQ ID NO: 19289 - DNA, 786 bp, Artificial Sequence
  chemically treated genomic DNA (Homo sapiens) CpG-island No: 19289
ttatggcgttatattaggtattttcgggttcgatttttcgagtagttttatacgttgaggtttcgcggtattttgcggtcgagggtatttttcggggttggcgggttttgggaattgcgtttcgggcgggttttcgtatcgttttcgtttcgatggtttcgtttcgtttttttttcgttggagtcggttcggttcgcgtttttttaaggtagcgaacgggttaagagaagcgtgtttcgtttttttcgacgttatcgaggtagcggttttatttttaaggcggcgcgggggttgttgggaaggtcggcgggatggaggcggcgggatcggttcgcgggtgcgggttcgggtgaagcgggaggtagttagagtcggagtcgggttcgagtattaggcgtaggtcggcgcgggtcgattgggtcgggagacggggttaggttttaaagcgggggaggagatttcgggtcggtttaggggagggggtcgttatgggcgcggtttgtgggaggatcgggttagttttggtagggggcgcggtttcgggtggttcggggcgggggcgcggtttttttagggaaggttttagggcgttgcgttggtttaggggaggggtcgtcgtgggcgtagtttggaaggattgggggtcgcgtatttagtttttttagtgggagcgttttcgtagggtcggttcgtcgggaggatgggtttcgcggtttggtttgttttttggggatggggttgttcgaggggttgggttcggatcgtcggaggggttagggttttttg

SEQ ID NO: 19290 - DNA, 786 bp, Artificial Sequence
  chemically treated genomic DNA (Homo sapiens) CpG-island No: 19290
caaaaaaccctaacccctccgacgatccgaacccaacccctcgaacaaccccatccccaaaaaacaaaccaaaccgcgaaacccatcctcccgacgaaccgaccctacgaaaacgctcccactaaaaaaactaaatacgcgacccccaatccttccaaactacgcccacgacgacccctcccctaaaccaacgcaacgccctaaaaccttccctaaaaaaaccgcgcccccgccccgaaccacccgaaaccgcgccccctaccaaaactaacccgatcctcccacaaaccgcgcccataacgaccccctcccctaaaccgacccgaaatctcctcccccgctttaaaacctaaccccgtctcccgacccaatcgacccgcgccgacctacgcctaatactcgaacccgactccgactctaactacctcccgcttcacccgaacccgcacccgcgaaccgatcccgccgcctccatcccgccgaccttcccaacaacccccgcgccgccttaaaaataaaaccgctacctcgataacgtcgaaaaaaacgaaacacgcttctcttaacccgttcgctaccttaaaaaaacgcgaaccgaaccgactccaacgaaaaaaaaacgaaacgaaaccatcgaaacgaaaacgatacgaaaacccgcccgaaacgcaattcccaaaacccgccaaccccgaaaaataccctcgaccgcaaaataccgcgaaacctcaacgtataaaactactcgaaaaatcgaacccgaaaatacctaatataacgccataa

SEQ ID NO: 19291 - DNA, 786 bp, Artificial Sequence
  chemically treated genomic DNA (Homo sapiens) CpG-island No: 19291
taggagattttggttttttcggcgattcgggtttagtttttcggatagttttatttttaaaaggtaggttaagtcgcggagtttattttttcgacgagtcgattttgcggaggcgtttttattagaggggttgagtacgcggtttttagtttttttaggttacgtttacgacgattttttttttaggttagcgtaacgttttgaggttttttttgaaaaggtcgcgttttcgtttcgggttattcgggatcgcgttttttattagggttggttcgatttttttataggtcgcgtttatgacgatttttttttttaggtcgattcggagttttttttttcgttttagggtttgatttcgtttttcggtttaatcggttcgcgtcgatttgcgtttggtgttcgggttcggtttcgattttggttgtttttcgttttattcggattcgtattcgcgagtcggtttcgtcgtttttatttcgtcggtttttttagtagttttcgcgtcgttttaaaggtgaagtcgttatttcggtggcgtcggagggggcgaaatacgttttttttggttcgttcgttgttttaaaggagcgcgggtcgggtcggttttagcgggagggggacggggcggggttatcgaggcgggggcggtgcgaggattcgttcggggcgtagtttttagggttcgttagtttcgaggggtgttttcggtcgtaaaatgtcgcggggttttagcgtgtggagttgttcgggaggtcgaattcgaaggtatttagtgtggcgttatgg

SEQ ID NO: 19292 - DNA, 786 bp, Artificial Sequence
  chemically treated genomic DNA (Homo sapiens) CpG-island No: 19292
ccataacgccacactaaataccttcgaattcgacctcccgaacaactccacacgctaaaaccccgcgacattttacgaccgaaaacacccctcgaaactaacgaaccctaaaaactacgccccgaacgaatcctcgcaccgcccccgcctcgataaccccgccccgtccccctcccgctaaaaccgacccgacccgcgctcctttaaaacaacgaacgaaccaaaaaaaacgtatttcgccccctccgacgccaccgaaataacgacttcacctttaaaacgacgcgaaaactactaaaaaaaccgacgaaataaaaacgacgaaaccgactcgcgaatacgaatccgaataaaacgaaaaacaaccaaaatcgaaaccgaacccgaacaccaaacgcaaatcgacgcgaaccgattaaaccgaaaaacgaaatcaaaccctaaaacgaaaaaaaaaactccgaatcgacctaaaaaaaaaaatcgtcataaacgcgacctataaaaaaatcgaaccaaccctaataaaaaacgcgatcccgaataacccgaaacgaaaacgcgaccttttcaaaaaaaacctcaaaacgttacgctaacctaaaaaaaaaatcgtcgtaaacgtaacctaaaaaaactaaaaaccgcgtactcaacccctctaataaaaacgcctccgcaaaatcgactcgtcgaaaaaataaactccgcgacttaacctaccttttaaaaataaaactatccgaaaaactaaacccgaatcgccgaaaaaaccaaaatctccta

SEQ ID NO: 19293 - DNA, 560 bp, Artificial Sequence
  chemically treated genomic DNA (Homo sapiens) CpG-island No: 19293
ttttcgaaaggtttttcgtatcgcggagtttttttatatagttcgaggattcgttttcgagttgcgattggttcgcggaaggtcggggcggagtttcgcggattcggcgttgagcggaagtacggatcgtgaattggagtggaatcgcgattatgggagtttcggggggaaagattaatcggtttcgaacggtgattgtgtgggggtcgcgattttgtttttttaagcgtttttgagtttttttatttcgtacgagatgggattagtgaggggtcggggttgtttggtggaggggtttcgggtcgcggcgagtttattttatttgattcgtattttttttttcggtaggagttgaagaagaagttgtttaaacgtcggcgggtgttgaatcgggagcggcgtttgaggtatcgggtggtcggggttgtgatagattaagggttgattacgcggtattattttaagaagcgggcgtaagtattagattttttttttgttggtcgtttttatcgagtttttttttttttttgtagagtttcggagtagttttattttttagt

SEQ ID NO: 19294 - DNA, 560 bp, Artificial Sequence
  chemically treated genomic DNA (Homo sapiens) CpG-island No: 19294
actaaaaaataaaactactccgaaactctacaaaaaaaaaaaaaaactcgataaaaacgaccaacaaaaaaaaaatctaatacttacgcccgcttcttaaaataataccgcgtaatcaacccttaatctatcacaaccccgaccacccgatacctcaaacgccgctcccgattcaacacccgccgacgtttaaacaacttcttcttcaactcctaccgaaaaaaaaaatacgaatcaaataaaataaactcgccgcgacccgaaacccctccaccaaacaaccccgacccctcactaatcccatctcgtacgaaataaaaaaactcaaaaacgcttaaaaaaacaaaatcgcgacccccacacaatcaccgttcgaaaccgattaatctttccccccgaaactcccataatcgcgattccactccaattcacgatccgtacttccgctcaacgccgaatccgcgaaactccgccccgaccttccgcgaaccaatcgcaactcgaaaacgaatcctcgaactatataaaaaaactccgcgatacgaaaaacctttcgaaaa

SEQ ID NO: 19295 - DNA, 560 bp, Artificial Sequence
  chemically treated genomic DNA (Homo sapiens) CpG-island No: 19295
gttgagaggtgaagttgtttcggagttttgtagggaggaaggaagattcggtggggacgattaataggaagagggtttagtatttacgttcgttttttgaggtggtgtcgcgtgattagtttttggtttattatagtttcgattattcggtgttttagacgtcgttttcgatttaatattcgtcggcgtttgaatagttttttttttagtttttgtcggggagaaagatgcgaattagatggagtgggttcgtcgcgattcggggtttttttattaggtagtttcggttttttattgattttatttcgtgcgagataaaagggtttaggaacgtttgaggaaataaagtcgcggtttttatatagttatcgttcggggtcggttgattttttttttcggagtttttatagtcgcgattttattttagtttacggttcgtattttcgtttagcgtcggattcgcggggtttcgtttcggtttttcgcgggttaatcgtaattcgggggcgggttttcgggttatataaaggagtttcgcggtgcgggaggtttttcggagg

SEQ ID NO: 19296 - DNA, 560 bp, Artificial Sequence
  chemically treated genomic DNA (Homo sapiens) CpG-island No: 19296
cctccgaaaaacctcccgcaccgcgaaactcctttatataacccgaaaacccgcccccgaattacgattaacccgcgaaaaaccgaaacgaaaccccgcgaatccgacgctaaacgaaaatacgaaccgtaaactaaaataaaatcgcgactataaaaactccgaaaaaaaaaatcaaccgaccccgaacgataactatataaaaaccgcgactttatttcctcaaacgttcctaaacccttttatctcgcacgaaataaaatcaataaaaaaccgaaactacctaataaaaaaaccccgaatcgcgacgaacccactccatctaattcgcatctttctccccgacaaaaactaaaaaaaaaactattcaaacgccgacgaatattaaatcgaaaacgacgtctaaaacaccgaataatcgaaactataataaaccaaaaactaatcacgcgacaccacctcaaaaaacgaacgtaaatactaaaccctcttcctattaatcgtccccaccgaatcttccttcctccctacaaaactccgaaacaacttcacctctcaac

SEQ ID NO: 19297 - DNA, 564 bp, Artificial Sequence
  chemically treated genomic DNA (Homo sapiens) CpG-island No: 19297
agcgggtcggaatattattggttcgttcgtagtttagtacgcgttaggtcggttaaatttttgtttcggtttcggaggaggaggttgtgtcggttttgttcgattaatcggagagggcgaattaaaagttatgtatgacgatacgtatcgcggggattggagtttttggttttacgacggagattttttgagagttgttcgtggttgtcggtatcggttgttgtcgtcggattttcgtaggcgttgcgcggttttttttttttcgggaggtagagtttagcggtgttttcgtgtgcgttattaggaggcgatcgtcggggatgtttatagttggatagtttggtttcgaggtatgttgggatatcgcgggtcggtttttatagtaattggtcgatattcgcgtaggttttcggtttgtagggaaggttttgatggtttagtgttttgtagacggtgtttttcgttcgcggttatttttttacggcgtgtaaggggagaagtcggtttcgatttttttatttttagtttaggagagtaacggagttagttgtgggtgtgaatacg

SEQ ID NO: 19298 - DNA, 564 bp, Artificial Sequence
  chemically treated genomic DNA (Homo sapiens) CpG-island No: 19298
cgtattcacacccacaactaactccgttactctcctaaactaaaaataaaaaaatcgaaaccgacttctccccttacacgccgtaaaaaaataaccgcgaacgaaaaacaccgtctacaaaacactaaaccatcaaaaccttccctacaaaccgaaaacctacgcgaatatcgaccaattactataaaaaccgacccgcgatatcccaacatacctcgaaaccaaactatccaactataaacatccccgacgatcgcctcctaataacgcacacgaaaacaccgctaaactctacctcccgaaaaaaaaaaaaccgcgcaacgcctacgaaaatccgacgacaacaaccgataccgacaaccacgaacaactctcaaaaaatctccgtcgtaaaaccaaaaactccaatccccgcgatacgtatcgtcatacataacttttaattcgccctctccgattaatcgaacaaaaccgacacaacctcctcctccgaaaccgaaacaaaaatttaaccgacctaacgcgtactaaactacgaacgaaccaataatattccgacccgct

SEQ ID NO: 19299 - DNA, 564 bp, Artificial Sequence
  chemically treated genomic DNA (Homo sapiens) CpG-island No: 19299
cgtgtttatatttatagttggtttcgttatttttttgagttgggggtggggggatcggggtcggtttttttttttgtacgtcgtggggagatggtcgcggacgaagggtatcgtttgtaaagtattgaattattagggttttttttgtaggtcgaaggtttgcgcgaatgtcggttagttattatggagatcggttcgcggtattttagtatgtttcgggattaaattgtttaattgtgagtattttcgacggtcgttttttgatgacgtatacggaagtatcgttaggttttgtttttcgaagaaaagggagtcgcgtagcgtttacgggagttcggcggtagtagtcggtatcggtaattacgggtagtttttagggaattttcgtcgtgaggttagaggttttagttttcgcggtgcgtatcgttatgtatggtttttggttcgtttttttcggttagtcgagtagggtcggtataattttttttttcgaggtcgaagtagagatttaatcggtttgacgcgtgttgggttgcgggcgagttagtgatatttcggttcgtt

SEQ ID NO: 19300 - DNA, 564 bp, Artificial Sequence
  chemically treated genomic DNA (Homo sapiens) CpG-island No: 19300
aacgaaccgaaatatcactaactcgcccgcaacccaacacgcgtcaaaccgattaaatctctacttcgacctcgaaaaaaaaaattataccgaccctactcgactaaccgaaaaaaacgaaccaaaaaccatacataacgatacgcaccgcgaaaactaaaacctctaacctcacgacgaaaattccctaaaaactacccgtaattaccgataccgactactaccgccgaactcccgtaaacgctacgcgactcccttttcttcgaaaaacaaaacctaacgatacttccgtatacgtcatcaaaaaacgaccgtcgaaaatactcacaattaaacaatttaatcccgaaacatactaaaataccgcgaaccgatctccataataactaaccgacattcgcgcaaaccttcgacctacaaaaaaaaccctaataattcaatactttacaaacgatacccttcgtccgcgaccatctccccacgacgtacaaaaaaaaaaaccgaccccgatccccccacccccaactcaaaaaaataacgaaaccaactataaatataaacacg

SEQ ID NO: 19301 - DNA, 579 bp, Artificial Sequence
  chemically treated genomic DNA (Homo sapiens) CpG-island No: 19301
tggtttgagaaaggtgagagcgggtcgaggtcggaatgtggggtagcgtacgggaaggggagatagtagtcgttgtaggcggtattaggcggagtcgcgaggtttggagagttcgagtggggaggggttcgcgcgtttagcgtgcgaaataaatcggggattcggattttcgttgttatgtaatcgggggcgtcgtttttaggtaattcgggaggcgtacgttttcggggagaagagggttgcggcgaggtttcgaggttcggtagaggtggagcggttttcgggcgtggggattaggttagcgttaagttcgagttttcgaatttcgatttacggtttagttttttgtagtttcggttcgagtttttcggggggttttaaatttatgggtcgcgttacgttttttgttagcgacgttattttttagcgtttggtaggggacgcgtcgttcgaaatagtatatgttattgatattttgttttcgggaggttgcgtttcggttagggcgcggagcggtagggaagttgtttttttgtcgtcgttttgtttttaaatagttgttgggtagtagttgttagg

SEQ ID NO: 19302 - DNA, 579 bp, Artificial Sequence
  chemically treated genomic DNA (Homo sapiens) CpG-island No: 19302
cctaacaactactacccaacaactatttaaaaacaaaacgacgacaaaaaaacaacttccctaccgctccgcgccctaaccgaaacgcaacctcccgaaaacaaaatatcaataacatatactatttcgaacgacgcgtcccctaccaaacgctaaaaaataacgtcgctaacaaaaaacgtaacgcgacccataaatttaaaaccccccgaaaaactcgaaccgaaactacaaaaaactaaaccgtaaatcgaaattcgaaaactcgaacttaacgctaacctaatccccacgcccgaaaaccgctccacctctaccgaacctcgaaacctcgccgcaaccctcttctccccgaaaacgtacgcctcccgaattacctaaaaacgacgcccccgattacataacaacgaaaatccgaatccccgatttatttcgcacgctaaacgcgcgaacccctccccactcgaactctccaaacctcgcgactccgcctaataccgcctacaacgactactatctccccttcccgtacgctaccccacattccgacctcgacccgctctcacctttctcaaacca

SEQ ID NO: 19303 - DNA, 579 bp, Artificial Sequence
  chemically treated genomic DNA (Homo sapiens) CpG-island No: 19303
tttgatagttgttgtttagtaattgtttgggggtagggcgacggtaaaggggtagtttttttgtcgtttcgcgttttaatcggggcgtagtttttcggagatagggtgttagtggtatgtgttatttcgaacggcgcgttttttgttaagcgttgaggggtagcgtcgttggtaaggaacgtggcgcgatttatgagtttggggtttttcgaagggttcgagtcgaggttgtaggaggttgggtcgtgggtcggggttcgggggttcgggtttggcgttggtttggtttttacgttcgggagtcgttttatttttgtcggatttcggaatttcgtcgtaattttttttttttcggaaacgtgcgtttttcgggttgtttggaaacgacgttttcggttgtatagtaacggggattcgggttttcggtttgtttcgtacgttgggcgcgcggatttttttttattcggattttttaggtttcgcggtttcgtttggtgtcgtttgtagcggttgttgtttttttttttcgtgcgttgttttatatttcgatttcggttcgtttttattttttttaggtta

SEQ ID NO: 19304 - DNA, 579 bp, Artificial Sequence
  chemically treated genomic DNA (Homo sapiens) CpG-island No: 19304
taacctaaaaaaaataaaaacgaaccgaaatcgaaatataaaacaacgcacgaaaaaaaaaaacaacaaccgctacaaacgacaccaaacgaaaccgcgaaacctaaaaaatccgaataaaaaaaaatccgcgcgcccaacgtacgaaacaaaccgaaaacccgaatccccgttactatacaaccgaaaacgtcgtttccaaacaacccgaaaaacgcacgtttccgaaaaaaaaaaaattacgacgaaattccgaaatccgacaaaaataaaacgactcccgaacgtaaaaaccaaaccaacgccaaacccgaacccccgaaccccgacccacgacccaacctcctacaacctcgactcgaacccttcgaaaaaccccaaactcataaatcgcgccacgttccttaccaacgacgctacccctcaacgcttaacaaaaaacgcgccgttcgaaataacacataccactaacaccctatctccgaaaaactacgccccgattaaaacgcgaaacgacaaaaaaactacccctttaccgtcgccctacccccaaacaattactaaacaacaactatcaaa

SEQ ID NO: 19305 - DNA, 534 bp, Artificial Sequence
  chemically treated genomic DNA (Homo sapiens) CpG-island No: 19305
ttttcgttttcgtttcgtagagaaagagcgtgcgtgtcgcgtatttttggtttggggagcgggtggagtaaatttgcgggaattattttacgataacgtgcggttgtgcggtgtggttgacggtaacgtcgttgtttttggagaggttatttcggagacggcgttggttttggggtgtggggggttggtggtattatgtggcgcgtttgtgcgcgacgggtttagaatgtagttttatgggcgggattcgaggttcggtggacggttttgtaggaggtattcggaattttacgagtgatttcgcgatttggttcggttttcgttcgtcgtaatagcgtgattatagggtatggcggggttcgggtattgtgcggttggatttttagttttggggttacgtcgcggaatcgtttattgttgtagtttttggggtcgttcggtcgtcgttattatagttttttttcgtattagaaggtgagttttagattttttttttcgggatttcgttgttttttagagttgattggatgtttg

SEQ ID NO: 19306 - DNA, 534 bp, Artificial Sequence
  chemically treated genomic DNA (Homo sapiens) CpG-island No: 19306
caaacatccaatcaactctaaaaaacaacgaaatcccgaaaaaaaaaatctaaaactcaccttctaatacgaaaaaaaactataataacgacgaccgaacgaccccaaaaactacaacaataaacgattccgcgacgtaaccccaaaactaaaaatccaaccgcacaatacccgaaccccgccataccctataatcacgctattacgacgaacgaaaaccgaaccaaatcgcgaaatcactcgtaaaattccgaatacctcctacaaaaccgtccaccgaacctcgaatcccgcccataaaactacattctaaacccgtcgcgcacaaacgcgccacataataccaccaaccccccacaccccaaaaccaacgccgtctccgaaataacctctccaaaaacaacgacgttaccgtcaaccacaccgcacaaccgcacgttatcgtaaaataattcccgcaaatttactccacccgctccccaaaccaaaaatacgcgacacgcacgctctttctctacgaaacgaaaacgaaaa

SEQ ID NO: 19307 - DNA, 534 bp, Artificial Sequence
  chemically treated genomic DNA (Homo sapiens) CpG-island No: 19307
taggtatttagttagttttgaaggataacggggtttcgagaaggggggtttagggtttattttttgatgcgggggaagattgtaatagcggcggtcgggcgattttaaaagttgtagtagtaagcggtttcgcggcgtggttttagaattgggggtttagtcgtatagtgttcggatttcgttatattttgtagttacgttgttgcgacgagcgggagtcgggttagatcgcgaggttattcgtggagtttcgggtattttttgtaaggtcgtttatcgagtttcgagtttcgtttatggggttatattttgagttcgtcgcgtatagacgcgttatatagtgttattaattttttatattttaaaattaacgtcgttttcggagtgatttttttaagagtagcggcgttgtcgttagttatatcgtatagtcgtacgttgtcgtaaaatggttttcgtaggtttattttattcgttttttaggttagaaatgcgcggtacgtacgttttttttttacggagcggggacgaggg

SEQ ID NO: 19308 - DNA, 534 bp, Artificial Sequence
  chemically treated genomic DNA (Homo sapiens) CpG-island No: 19308
ccctcgtccccgctccgtaaaaaaaaaacgtacgtaccgcgcatttctaacctaaaaaacgaataaaataaacctacgaaaaccattttacgacaacgtacgactatacgatataactaacgacaacgccgctactcttaaaaaaatcactccgaaaacgacgttaattttaaaatataaaaaattaataacactatataacgcgtctatacgcgacgaactcaaaatataaccccataaacgaaactcgaaactcgataaacgaccttacaaaaaatacccgaaactccacgaataacctcgcgatctaacccgactcccgctcgtcgcaacaacgtaactacaaaatataacgaaatccgaacactatacgactaaacccccaattctaaaaccacgccgcgaaaccgcttactactacaacttttaaaatcgcccgaccgccgctattacaatcttcccccgcatcaaaaaataaaccctaaaccccccttctcgaaaccccgttatccttcaaaactaactaaataccta

SEQ ID NO: 19309 - DNA, 686 bp, Artificial Sequence
  chemically treated genomic DNA (Homo sapiens) CpG-island No: 19309
gatttaggtatatacgtggcgagatcgtagggagtagcgttcgttttgcgtttttttttttttttatattttaggttttatttgtttcgggtttcgaaggttttaggatgttgtggttgtacgcggacgttagtcgttttaaggtgatcgttagggaagatgttgttatggtcgtagtttcggtcggaaacggaaacgacgcgaatcgcgtgcgtaacgtacgggttcggcggggaatatcggttcgttgtaatatcggttcggcgtagaagcgggacgtcggtttttaggggtttaggtcggcggcggcgatggtttcggtagttgtggagagtttcgtgattaagtaattggatttgttggagtttgagagagacgcggaggtggaggagcgtaggtacgggaggtcgtcggcgtcgttttttcgcggtcggtttcgtcgtgtttcgggtagagttttcgaggggttcggttttatagtttggggcgggaatttcgttttcgatttttcgagttaggggtagggatcgttcgttttttgtttggttatttttcgagttgttagttttattattttttgggtagcgcgtttcgtttggggatttttaagaagtattttgatttttcgattcgagattttttattaagtttatatttttgggttttggtttcgattttagttttat

SEQ ID NO: 19310 - DNA, 686 bp, Artificial Sequence
  chemically treated genomic DNA (Homo sapiens) CpG-island No: 19310
ataaaactaaaatcgaaaccaaaacccaaaaatataaacttaataaaaaatctcgaatcgaaaaatcaaaatacttcttaaaaatccccaaacgaaacgcgctacccaaaaaataataaaactaacaactcgaaaaataaccaaacaaaaaacgaacgatccctacccctaactcgaaaaatcgaaaacgaaattcccgccccaaactataaaaccgaacccctcgaaaactctacccgaaacacgacgaaaccgaccgcgaaaaaacgacgccgacgacctcccgtacctacgctcctccacctccgcgtctctctcaaactccaacaaatccaattacttaatcacgaaactctccacaactaccgaaaccatcgccgccgccgacctaaacccctaaaaaccgacgtcccgcttctacgccgaaccgatattacaacgaaccgatattccccgccgaacccgtacgttacgcacgcgattcgcgtcgtttccgtttccgaccgaaactacgaccataacaacatcttccctaacgatcaccttaaaacgactaacgtccgcgtacaaccacaacatcctaaaaccttcgaaacccgaaacaaataaaacctaaaatataaaaaaaaaaaaaaacgcaaaacgaacgctactccctacgatctcgccacgtatatacctaaatc

SEQ ID NO: 19311 - DNA, 686 bp, Artificial Sequence
  chemically treated genomic DNA (Homo sapiens) CpG-island No: 19311
gtggaattggggtcggggttagggtttaggagtgtaagtttagtggggggtttcgggtcgggaaattaaagtgttttttaagggtttttaaacggaacgcgttgtttaggaagtgatgagattgataattcgggaggtggttaagtaggggacggacgatttttgtttttgattcgaagggtcggagacgaaattttcgttttagattatgaggtcgagtttttcggagattttgttcgggatacggcgggatcgatcgcgagggagcggcgtcggcggtttttcgtatttgcgtttttttattttcgcgttttttttaagttttagtaggtttagttgtttggttacgaagttttttatagttgtcgaggttatcgtcgtcgtcggtttgggtttttagaagtcgacgtttcgtttttgcgtcgggtcggtgttatagcggatcggtgtttttcgtcgggttcgtgcgttacgtacgcggttcgcgtcgttttcgttttcggtcgaggttgcggttatggtagtattttttttgacggttattttagggcggttggcgttcgcgtgtagttatagtattttgagattttcggggttcggagtaggtgagatttgggatatgggaggaagggaggacgtagagcgagcgttgttttttgcggtttcgttacgtatgtgtttgggtt

SEQ ID NO: 19312 - DNA, 686 bp, Artificial Sequence
  chemically treated genomic DNA (Homo sapiens) CpG-island No: 19312
aacccaaacacatacgtaacgaaaccgcaaaaaacaacgctcgctctacgtcctcccttcctcccatatcccaaatctcacctactccgaaccccgaaaatctcaaaatactataactacacgcgaacgccaaccgccctaaaataaccgtcaaaaaaaatactaccataaccgcaacctcgaccgaaaacgaaaacgacgcgaaccgcgtacgtaacgcacgaacccgacgaaaaacaccgatccgctataacaccgacccgacgcaaaaacgaaacgtcgacttctaaaaacccaaaccgacgacgacgataacctcgacaactataaaaaacttcgtaaccaaacaactaaacctactaaaacttaaaaaaaacgcgaaaataaaaaaacgcaaatacgaaaaaccgccgacgccgctccctcgcgatcgatcccgccgtatcccgaacaaaatctccgaaaaactcgacctcataatctaaaacgaaaatttcgtctccgacccttcgaatcaaaaacaaaaatcgtccgtcccctacttaaccacctcccgaattatcaatctcatcacttcctaaacaacgcgttccgtttaaaaacccttaaaaaacactttaatttcccgacccgaaaccccccactaaacttacactcctaaaccctaaccccgaccccaattccac

SEQ ID NO: 19313 - DNA, 520 bp, Artificial Sequence
  chemically treated genomic DNA (Homo sapiens) CpG-island No: 19313
  unsure (60)
ggtgtttgaggtgagggtttcgttagcggaaaacgttcgataacggaggggtaggtaggntcgggggcgtggttaacgcgggtttcgtttttcgggttttattttcgagcgtacgcgcgcgtttgaagtagttaattaggaagcgtagagtaggtttaaatatagacggcgggtgaatatggcgttttcgatttggtttgagacgtgataggtttgttttttggttgaagatgtggcgagtgaaaaaattgagttttagtttgtcgttttcgttttagacggtaagcgggagatttttggcggagagaattgggtcgggttgttgtcgcgggggtatcggtcgtgtttattgttttggaaagttgggtcgagttcggggttgggggtttgtggagtttttgttcgttttgttgtttttgcgcgattagggtgcgagcgtatttttttaatcgtattttgggttttttagggagggaggaggggcgggttggtagaatttaggtttttttatattcgtttt

SEQ ID NO: 19314 - DNA, 520 bp, Artificial Sequence
  chemically treated genomic DNA (Homo sapiens) CpG-island No: 19314
  unsure (461)
aaaacgaatataaaaaaacctaaattctaccaacccgcccctcctccctccctaaaaaacccaaaatacgattaaaaaaatacgctcgcaccctaatcgcgcaaaaacaacaaaacgaacaaaaactccacaaacccccaaccccgaactcgacccaactttccaaaacaataaacacgaccgatacccccgcgacaacaacccgacccaattctctccgccaaaaatctcccgcttaccgtctaaaacgaaaacgacaaactaaaactcaattttttcactcgccacatcttcaaccaaaaaacaaacctatcacgtctcaaaccaaatcgaaaacgccatattcacccgccgtctatatttaaacctactctacgcttcctaattaactacttcaaacgcgcgcgtacgctcgaaaataaaacccgaaaaacgaaacccgcgttaaccacgcccccgancctacctacccctccgttatcgaacgttttccgctaacgaaaccctcacctcaaacacc

SEQ ID NO: 19315 - DNA, 520 bp, Artificial Sequence
  chemically treated genomic DNA (Homo sapiens) CpG-island No: 19315
  unsure (461)
agggcgagtgtgaggaagtttgggttttgttagttcgttttttttttttttttaagaagtttaaaatgcgattagaagagtacgttcgtattttagtcgcgtaggagtagtaaggcgaataaagattttataagtttttaatttcgggttcgatttaattttttaggatagtagatacggtcggtgttttcgcgatagtagttcggtttagtttttttcgttagagatttttcgtttatcgtttggggcgaaggcgataggttgaggtttagtttttttattcgttatatttttaattagaaggtaggtttattacgttttagattaagtcgaggacgttatgtttattcgtcgtttgtgtttgaatttgttttgcgttttttggttggttgttttaggcgcgcgcgtacgttcgggggtagagttcggggggcggggttcgcgttgattacgttttcggntttgtttgttttttcgttgtcgagcgtttttcgttgacggagtttttattttagatatt

SEQ ID NO: 19316 - DNA, 520 bp, Artificial Sequence
  chemically treated genomic DNA (Homo sapiens) CpG-island No: 19316
  unsure (60)
aatatctaaaataaaaactccgtcaacgaaaaacgctcgacaacgaaaaaacaaacaaanccgaaaacgtaatcaacgcgaaccccgccccccgaactctacccccgaacgtacgcgcgcgcctaaaacaaccaaccaaaaaacgcaaaacaaattcaaacacaaacgacgaataaacataacgtcctcgacttaatctaaaacgtaataaacctaccttctaattaaaaatataacgaataaaaaaactaaacctcaacctatcgccttcgccccaaacgataaacgaaaaatctctaacgaaaaaaactaaaccgaactactatcgcgaaaacaccgaccgtatctactatcctaaaaaattaaatcgaacccgaaattaaaaacttataaaatctttattcgccttactactcctacgcgactaaaatacgaacgtactcttctaatcgcattttaaacttcttaaaaaaaaaaaaaaaacgaactaacaaaacccaaacttcctcacactcgccct

SEQ ID NO: 19317 - DNA, 551 bp, Artificial Sequence
  chemically treated genomic DNA (Homo sapiens) CpG-island No: 19317
tttagttgttttttttttttcggtgtttacgatcgtatcgtttagattattttattttttttgtttcggaagttatatattgtcgatatcgggacgtaattttcgggaagggtttatttttaagatagatacggaagtgttgggagtcgtcgggagttcgttcggttgcgggtgtttttggttttgcggttagttttgggaacgtttcggagagttagatttttagaggttcgatttcgttagttcggaatagataaagttagcgttttcgttcgtttttcgatttaggattcgatgtcggtagcgttttggggttttcgtagcggggttggattatgagtttgttggacggtttcgttttttcgtcgcgggtttcgttgtagtttagtaaggttaggatgaaaaagttttcgaagaagagttagaatgagaagtatcggttgaagtatttgcggttgcgtaaagcggttaaggttacggtgtttgtgagtttgatttacgtttagtcggtttttttttggagatttttttataaaatttttttttaagtt

SEQ ID NO: 19318 - DNA, 551 bp, Artificial Sequence
  chemically treated genomic DNA (Homo sapiens) CpG-island No: 19318
aacttaaaaaaaaattttataaaaaaatctccaaaaaaaaaccgactaaacgtaaatcaaactcacaaacaccgtaaccttaaccgctttacgcaaccgcaaatacttcaaccgatacttctcattctaactcttcttcgaaaactttttcatcctaaccttactaaactacaacgaaacccgcgacgaaaaaacgaaaccgtccaacaaactcataatccaaccccgctacgaaaaccccaaaacgctaccgacatcgaatcctaaatcgaaaaacgaacgaaaacgctaactttatctattccgaactaacgaaatcgaacctctaaaaatctaactctccgaaacgttcccaaaactaaccgcaaaaccaaaaacacccgcaaccgaacgaactcccgacgactcccaacacttccgtatctatcttaaaaataaacccttcccgaaaattacgtcccgatatcgacaatatataacttccgaaacaaaaaaaataaaataatctaaacgatacgatcgtaaacaccgaaaaaaaaaaaacaactaaa

SEQ ID NO: 19319 - DNA, 551 bp, Artificial Sequence
  chemically treated genomic DNA (Homo sapiens) CpG-island No: 19319
agtttggggaaagattttgtgagggagtttttaggaggggatcggttgaacgtgggttagatttataaatatcgtggttttggtcgttttgcgtagtcgtaggtattttagtcggtattttttattttggttttttttcgggagtttttttattttggttttgttggattgtagcggagttcgcggcgaggaagcgaggtcgtttagtaggtttatggtttagtttcgttacgggggttttaggacgttgtcggtatcggattttaagtcggggagcgggcgggagcgttggttttgtttgtttcgggttagcggaatcgggtttttaggaatttagtttttcgggacgtttttagggttgatcgtagggttagagatattcgtaatcgaacgggttttcggcgatttttagtattttcgtgtttgttttggaagtaagtttttttcggaagttacgtttcggtgtcggtagtgtgtaattttcggggtagggagagtagggtggtttgggcggtgcgatcgtgggtatcgggaggaaagagatagttggg

SEQ ID NO: 19320 - DNA, 551 bp, Artificial Sequence
  chemically treated genomic DNA (Homo sapiens) CpG-island No: 19320
cccaactatctctttcctcccgatacccacgatcgcaccgcccaaaccaccctactctccctaccccgaaaattacacactaccgacaccgaaacgtaacttccgaaaaaaacttacttccaaaacaaacacgaaaatactaaaaatcgccgaaaacccgttcgattacgaatatctctaaccctacgatcaaccctaaaaacgtcccgaaaaactaaattcctaaaaacccgattccgctaacccgaaacaaacaaaaccaacgctcccgcccgctccccgacttaaaatccgataccgacaacgtcctaaaacccccgtaacgaaactaaaccataaacctactaaacgacctcgcttcctcgccgcgaactccgctacaatccaacaaaaccaaaataaaaaaactcccgaaaaaaaaccaaaataaaaaataccgactaaaatacctacgactacgcaaaacgaccaaaaccacgatatttataaatctaacccacgttcaaccgatcccctcctaaaaactccctcacaaaatctttccccaaact

SEQ ID NO: 19321 - DNA, 573 bp, Artificial Sequence
  chemically treated genomic DNA (Homo sapiens) CpG-island No: 19321
  unsure (272..273, 295..)
tttcgagttaatttattgttatagtttttagtcggcgatttattggtttttgttggaggcgggattttcggttgttaggcggtatttttttcggaagtgtttgttgcgcgttgtagggtaatatttcggcgtttttggaagttgggggagcgggtgggtgttgggtggcgttgggggagttgcgtttcgtttagagtttcgttcggagtttcgttcggagtttttcggggtgggggatagttgaggattttatcgagggaggggttgggcgnnngggaagggagcgagcgtggtnnngattcgaggtacgttttcgagttaacgagcgtgatgcgttcgagtgtgggcggggattgagggaagaagtgaaaatcggattgttaggcgatagttttttcgtttgaaatttcgtcggtttttgagcgggttatcgggttcgggttgggggtttggcgggtgagtgagtagcgggtcgggacgcgggagaggggtattgggtacggggttttggtttgtttgttttgtttatcgttggcgagtgaggttaggtttttcgaagtttgttgggatatt

SEQ ID NO: 19322 - DNA, 573 bp, Artificial Sequence
  chemically treated genomic DNA (Homo sapiens) CpG-island No: 19322
  unsure (277..278, 300..)
aatatcccaacaaacttcgaaaaacctaacctcactcgccaacgataaacaaaacaaacaaaccaaaaccccgtacccaatacccctctcccgcgtcccgacccgctactcactcacccgccaaacccccaacccgaacccgataacccgctcaaaaaccgacgaaatttcaaacgaaaaaactatcgcctaacaatccgattttcacttcttccctcaatccccgcccacactcgaacgcatcacgctcgttaactcgaaaacgtacctcgaatcnnnaccacgctcgctcccttcccnnncgcccaacccctccctcgataaaatcctcaactatcccccaccccgaaaaactccgaacgaaactccgaacgaaactctaaacgaaacgcaactcccccaacgccacccaacacccacccgctcccccaacttccaaaaacgccgaaatattaccctacaacgcgcaacaaacacttccgaaaaaaataccgcctaacaaccgaaaatcccgcctccaacaaaaaccaataaatcgccgactaaaaactataacaataaattaactcgaaa

SEQ ID NO: 19323 - DNA, 573 bp, Artificial Sequence
  chemically treated genomic DNA (Homo sapiens) CpG-island No: 19323
  unsure (277..278, 300..)
agtattttagtaagtttcggaaggtttggttttattcgttaacgatgaatagagtaagtaaattagggtttcgtgtttagtgtttttttttcgcgtttcgattcgttgtttatttattcgttagatttttagttcgggttcggtggttcgtttaggagtcggcgagattttaaacggaggaattgtcgtttggtagttcgatttttatttttttttttagttttcgtttatattcgagcgtattacgttcgttggttcgagagcgtgtttcgggttnnngttacgttcgttttttttttnnncgtttaatttttttttcgatgaggtttttaattattttttatttcggaaggtttcgggcgaggtttcgggcgaggttttgggcgaggcgtagtttttttaacgttatttaatatttattcgtttttttagtttttagggacgtcggggtgttgttttgtagcgcgtaataaatattttcggaaaaggtatcgtttagtaatcgggagtttcgtttttagtaggagttaataggtcgtcggttgagagttgtgataatggattggttcgaag

SEQ ID NO: 19324 - DNA, 573 bp, Artificial Sequence
  chemically treated genomic DNA (Homo sapiens) CpG-island No: 19324
  unsure (272..273, 295..)
cttcgaaccaatccattatcacaactctcaaccgacgacctattaactcctactaaaaacgaaactcccgattactaaacgataccttttccgaaaatatttattacgcgctacaaaacaacaccccgacgtccctaaaaactaaaaaaacgaataaatattaaataacgttaaaaaaactacgcctcgcccaaaacctcgcccgaaacctcgcccgaaaccttccgaaataaaaaataattaaaaacctcatcgaaaaaaaaattaaacgnnnaaaaaaaaaacgaacgtaacnnnaacccgaaacacgctctcgaaccaacgaacgtaatacgctcgaatataaacgaaaactaaaaaaaaaaataaaaatcgaactaccaaacgacaattcctccgtttaaaatctcgccgactcctaaacgaaccaccgaacccgaactaaaaatctaacgaataaataaacaacgaatcgaaacgcgaaaaaaaaacactaaacacgaaaccctaatttacttactctattcatcgttaacgaataaaaccaaaccttccgaaacttactaaaatact

SEQ ID NO: 19325 - DNA, 639 bp, Artificial Sequence
  chemically treated genomic DNA (Homo sapiens) CpG-island No: 19325
  unsure (159..160, 183..184, 208..)
ttataagatttaattataagttcggttttatttttcgggtttcgttttttttcgtatttattttatcgcgtttcgttttacgataacgtatttatcgtagcgttttggaatttttaagttcgttttcgtttttcggacggtttcggggaaagggagggnnnggcgtagcgagttcgcgcgcgnnagtttttagttatttcgggcgggnnaggggagcgtttatttttacgtatgcgtttttagttttcgcgggagggagggggcggaaaaaggaggaggaagaggggcgggtaaatttggaattaattaatgatagcggcgttagtcgggattttggtcggtatagaattgggggcggaatcgcgcggggtttgaagggaggggtttgggcgcgggagtcgggtaggagaagacggaagtggagcgaggataaaatggttgcgaaggttgttgttttttttttttatttacgttcgaatttttttttttatgttttattttcgtgttttagacgggtttttaagtgtttcgggtttcgcgaatttgtattttatagcgtggttttggataagggttgatttcgaggggttggggcgaaggtttcggttttagggtgttattagggttgttcgtttacgg

SEQ ID NO: 19326 - DNA, 639 bp, Artificial Sequence
  chemically treated genomic DNA (Homo sapiens) CpG-island No: 19326
  unsure (431..432, 456..457, 479..)
ccgtaaacgaacaaccctaataacaccctaaaaccgaaaccttcgccccaacccctcgaaatcaacccttatccaaaaccacgctataaaatacaaattcgcgaaacccgaaacacttaaaaacccgtctaaaacacgaaaataaaacataaaaaaaaaaattcgaacgtaaataaaaaaaaaaaacaacaaccttcgcaaccattttatcctcgctccacttccgtcttctcctacccgactcccgcgcccaaacccctcccttcaaaccccgcgcgattccgcccccaattctataccgaccaaaatcccgactaacgccgctatcattaattaattccaaatttacccgcccctcttcctcctcctttttccgccccctccctcccgcgaaaactaaaaacgcatacgtaaaaataaacgctcccctnncccgcccgaaataactaaaaactnncgcgcgcgaactcgctacgccnnnccctccctttccccgaaaccgtccgaaaaacgaaaacgaacttaaaaattccaaaacgctacgataaatacgttatcgtaaaacgaaacgcgataaaataaatacgaaaaaaaacgaaacccgaaaaataaaaccgaacttataattaaatcttataa

SEQ ID NO: 19327 - DNA, 639 bp, Artificial Sequence
  chemically treated genomic DNA (Homo sapiens) CpG-island No: 19327
  unsure (431..432, 456..457, 479..)
tcgtgagcgagtagttttagtggtattttgaagtcggaattttcgttttagtttttcggggttagtttttgtttaaagttacgttatgaaatatagattcgcgaaattcggggtatttagaggttcgtttggaatacgaaggtggggtatggaaaggaggattcggacgtgggtgggggaggggagtaataattttcgtagttattttgttttcgttttattttcgtttttttttgttcggttttcgcgtttaaatttttttttttaggtttcgcgcgatttcgtttttagttttgtgtcggttaagatttcggttagcgtcgttattattggttagttttaagtttgttcgttttttttttttttttttttttcgttttttttttttcgcggaagttgggggcgtatgcgtagaggtggacgtttttttnnttcgttcggggtaattgaggattnncgcgcgcggattcgttgcgttnnntttttttttttttcggggtcgttcggagagcgggggcgagtttgaaagttttagaacgttgcggtgagtgcgttatcgtgaggcggagcgcggtggggtgggtgcggaagggggcgaggttcgaggagtggagtcgggtttgtgattgggttttgtaa

SEQ ID NO: 19328 - DNA, 639 bp, Artificial Sequence
  chemically treated genomic DNA (Homo sapiens) CpG-island No: 19328
  unsure (159..160, 183..184, 208..)
ttacaaaacccaatcacaaacccgactccactcctcgaacctcgcccccttccgcacccaccccaccgcgctccgcctcacgataacgcactcaccgcaacgttctaaaactttcaaactcgcccccgctctccgaacgaccccgaaaaaaaaaaaaannnaacgcaacgaatccgcgcgcgnnaatcctcaattaccccgaacgaannaaaaaaacgtccacctctacgcatacgcccccaacttccgcgaaaaaaaaaaaacgaaaaaaaaaaaaaaaaaaaaaacgaacaaacttaaaactaaccaataataacgacgctaaccgaaatcttaaccgacacaaaactaaaaacgaaatcgcgcgaaacctaaaaaaaaaaatttaaacgcgaaaaccgaacaaaaaaaaacgaaaataaaacgaaaacaaaataactacgaaaattattactcccctcccccacccacgtccgaatcctcctttccataccccaccttcgtattccaaacgaacctctaaataccccgaatttcgcgaatctatatttcataacgtaactttaaacaaaaactaaccccgaaaaactaaaacgaaaattccgacttcaaaataccactaaaactactcgctcacga

SEQ ID NO: 19329 - DNA, 518 bp, Artificial Sequence
  chemically treated genomic DNA (Homo sapiens) CpG-island No: 19329
tcgtgtttcgttttaaaggagggcgttaacgtaattttagtatgtgggagacgggttgttttattttcgcgcgtaaaattttggtttagtttaagggatggaggcggggatttttgcgtaggtttgcggcgtgggaggcggtcgttcgcgatttacgacgtcgcgcgtcgggaggttgagagttcggcgtcgggagggtttcggggatagaagagcgtttcgttcggttgttaaggtaattttacgcggttggagaagtcggcgttcgtagttcggttcgggtcgttgtcggaagtgacgcgagtttatttgtcgagcgggggttgggaggaggggcggagggtgtagaggtgtcgtcgtcgtcgcgagttagtcgggagcgcgcgaggcgcggggagtttgggattaggagcgagagtcgtttatttgtagtcgtcgtttacggtacggtagttattatggcgtttttgttgtgtttcgtgtttttgtgcggagtagtgggtgagtaggggttatgg

SEQ ID NO: 19330 - DNA, 518 bp, Artificial Sequence
  chemically treated genomic DNA (Homo sapiens) CpG-island No: 19330
ccataacccctactcacccactactccgcacaaaaacacgaaacacaacaaaaacgccataataactaccgtaccgtaaacgacgactacaaataaacgactctcgctcctaatcccaaactccccgcgcctcgcgcgctcccgactaactcgcgacgacgacgacacctctacaccctccgcccctcctcccaacccccgctcgacaaataaactcgcgtcacttccgacaacgacccgaaccgaactacgaacgccgacttctccaaccgcgtaaaattaccttaacaaccgaacgaaacgctcttctatccccgaaaccctcccgacgccgaactctcaacctcccgacgcgcgacgtcgtaaatcgcgaacgaccgcctcccacgccgcaaacctacgcaaaaatccccgcctccatcccttaaactaaaccaaaattttacgcgcgaaaataaaacaacccgtctcccacatactaaaattacgttaacgccctcctttaaaacgaaacacga

SEQ ID NO: 19331 - DNA, 518 bp, Artificial Sequence
  chemically treated genomic DNA (Homo sapiens) CpG-island No: 19331
ttatggtttttatttatttattatttcgtataggagtacgaagtatagtaggagcgttatggtggttgtcgtgtcgtgggcggcggttgtaggtaggcggttttcgtttttggttttaggtttttcgcgtttcgcgcgttttcgattggttcgcggcggcggcggtatttttgtatttttcgtttttttttttagttttcgttcggtaggtgaattcgcgttattttcggtagcggttcgggtcgggttgcgagcgtcggtttttttagtcgcgtggggttgttttggtaatcgggcgaggcgtttttttgttttcgggattttttcggcgtcgaatttttagtttttcggcgcgcggcgtcgtaggtcgcgggcggtcgttttttacgtcgtaagtttgcgtaggggttttcgtttttattttttaagttaaattagggttttgcgcgcgggggtggggtagttcgttttttatatattgaaattgcgttggcgtttttttttaaggcgaggtacgg

SEQ ID NO: 19332 - DNA, 518 bp, Artificial Sequence
  chemically treated genomic DNA (Homo sapiens) CpG-island No: 19332
ccgtacctcgccttaaaaaaaaacgccaacgcaatttcaatatataaaaaacgaactaccccacccccgcgcgcaaaaccctaatttaacttaaaaaataaaaacgaaaacccctacgcaaacttacgacgtaaaaaacgaccgcccgcgacctacgacgccgcgcgccgaaaaactaaaaattcgacgccgaaaaaatcccgaaaacaaaaaaacgcctcgcccgattaccaaaacaaccccacgcgactaaaaaaaccgacgctcgcaacccgacccgaaccgctaccgaaaataacgcgaattcacctaccgaacgaaaactaaaaaaaaaaacgaaaaatacaaaaataccgccgccgccgcgaaccaatcgaaaacgcgcgaaacgcgaaaaacctaaaaccaaaaacgaaaaccgcctacctacaaccgccgcccacgacacgacaaccaccataacgctcctactatacttcgtactcctatacgaaataataaataaataaaaaccataa

SEQ ID NO: 19333 - DNA, 509 bp, Artificial Sequence
  chemically treated genomic DNA (Homo sapiens) CpG-island No: 19333
  unsure (72..73, 75..)
agtatagttttttttcggatttggttgtagatgaattagttgttgcgttcggtgcgggatagatgtggcgtnnnnnnggggttagcgttttcgtcgttcgttagagggggtcgtttcgttatttcgtttgaagggttgtttgtggttgggattggtggtttttattcgttggggagtcgggagcggagggaggagagacgtagggaggaggagtcgggggttgggcgacgttgcgatttcgcggtttgagtggtaggagtttcgtttggaatcgggcggttattggggagacgttttgtttgttaatttcgaaagcggtttcggttgtttcggtcgttttcgaagttattttataaaatacgttttcggtcggtttaattttattttttttttcgttcgttttagttagttcgagataaaaatgtttttttttttttcgtggttttttttggttacgcggtggtttttattatgtatataaaggtagttttgttttcgtttaagtggat

SEQ ID NO: 19334 - DNA, 509 bp, Artificial Sequence
  chemically treated genomic DNA (Homo sapiens) CpG-island No: 19334
  unsure (433..434, 436..)
atccacttaaacgaaaacaaaactacctttatatacataataaaaaccaccgcgtaaccaaaaaaaaccacgaaaaaaaaaaaaacatttttatctcgaactaactaaaacgaacgaaaaaaaaaataaaattaaaccgaccgaaaacgtattttataaaataacttcgaaaacgaccgaaacaaccgaaaccgctttcgaaattaacaaacaaaacgtctccccaataaccgcccgattccaaacgaaactcctaccactcaaaccgcgaaatcgcaacgtcgcccaacccccgactcctcctccctacgtctctcctccctccgctcccgactccccaacgaataaaaaccaccaatcccaaccacaaacaacccttcaaacgaaataacgaaacgaccccctctaacgaacgacgaaaacgctaaccccnnnnnnacgccacatctatcccgcaccgaacgcaacaactaattcatctacaaccaaatccgaaaaaaaactatact

SEQ ID NO: 19335 - DNA, 509 bp, Artificial Sequence
  chemically treated genomic DNA (Homo sapiens) CpG-island No: 19335
  unsure (433..434, 436..)
gtttatttggacgaaagtaaagttatttttgtgtatataatgagagttatcgcgtggttaaggagaattacggggaagagggaaatatttttgtttcgagttggttaaagcgggcggggggggaggtagggttaaatcgatcgaaggcgtgttttgtggagtggtttcgaaagcggtcgaggtagtcgaagtcgttttcgaagttagtaaataaagcgtttttttagtaatcgttcggttttagacgaggtttttgttatttaggtcgcggagtcgtagcgtcgtttagttttcggttttttttttttgcgtttttttttttttcgttttcggttttttagcggataggagttattaattttagttatagataattttttaaacgaaatagcgaggcggttttttttaacgggcggcgggggcgttggttttnnnnnngcgttatatttgtttcgtatcgggcgtagtagttgatttatttgtagttaggttcgggaaggaattgtgtt

SEQ ID NO: 19336 - DNA, 509 bp, Artificial Sequence
  chemically treated genomic DNA (Homo sapiens) CpG-island No: 19336
  unsure (72..73, 75..)
aacacaattccttcccgaacctaactacaaataaatcaactactacgcccgatacgaaacaaatataacgcnnnnnnaaaaccaacgcccccgccgcccgttaaaaaaaaccgcctcgctatttcgtttaaaaaattatctataactaaaattaataactcctatccgctaaaaaaccgaaaacgaaaaaaaaaaaaacgcaaaaaaaaaaaaccgaaaactaaacgacgctacgactccgcgacctaaataacaaaaacctcgtctaaaaccgaacgattactaaaaaaacgctttatttactaacttcgaaaacgacttcgactacctcgaccgctttcgaaaccactccacaaaacacgccttcgatcgatttaaccctacctccccccccgcccgctttaaccaactcgaaacaaaaatatttccctcttccccgtaattctccttaaccacgcgataactctcattatatacacaaaaataactttactttcgtccaaataaac

SEQ ID NO: 19337 - DNA, 558 bp, Artificial Sequence
  chemically treated genomic DNA (Homo sapiens) CpG-island No: 19337
gttcgcggttcggcggggagcgtcggagttttttgtggtcgacgtgtattaaggtaggtttcgtttgggacgcgcggagggttcgggtagagggcggtaacgagcgggttatagcggagtacggtcggtttacgcggtttaagtcgttgttcgttttcgttcgtgtcgcgcggcgtcggttttacgtgaagttcggaggtaggaaggcgcggtgcgggttcgcgatttttcggtttcgcggggcgttttagcggcggttggcgtcgtttcgttcggagttagggtcgcgcggttttgcgcgcgcgtttttacggcgtcgcgtacgcgtcgtagcgacgatttaaattgcgcgagcgcgcgggtcgggttgcgcgcggtcgttcgggcgggggatgggtttttgtcgcgaggaggatggttttgttcggtatgcgtttggagaaggcggtttgtagatcggggagggagtttttgttcgggaagagggtgggtcgtaggagttcgagggtttttcgttgtgtatttttgggagtcgtgtgttttgaattatcgtagtag

SEQ ID NO: 19338 - DNA, 558 bp, Artificial Sequence
  chemically treated genomic DNA (Homo sapiens) CpG-island No: 19338
ctactacgataattcaaaacacacgactcccaaaaatacacaacgaaaaaccctcgaactcctacgacccaccctcttcccgaacaaaaactccctccccgatctacaaaccgccttctccaaacgcataccgaacaaaaccatcctcctcgcgacaaaaacccatcccccgcccgaacgaccgcgcgcaacccgacccgcgcgctcgcgcaatttaaatcgtcgctacgacgcgtacgcgacgccgtaaaaacgcgcgcgcaaaaccgcgcgaccctaactccgaacgaaacgacgccaaccgccgctaaaacgccccgcgaaaccgaaaaatcgcgaacccgcaccgcgccttcctacctccgaacttcacgtaaaaccgacgccgcgcgacacgaacgaaaacgaacaacgacttaaaccgcgtaaaccgaccgtactccgctataacccgctcgttaccgccctctacccgaaccctccgcgcgtcccaaacgaaacctaccttaatacacgtcgaccacaaaaaactccgacgctccccgccgaaccgcgaac

SEQ ID NO: 19339 - DNA, 558 bp, Artificial Sequence
  chemically treated genomic DNA (Homo sapiens) CpG-island No: 19339
ttgttgcggtagtttaagatatacggtttttaaaggtgtatagcgggagattttcgagtttttacgatttatttttttttcgggtaagggtttttttttcgatttgtaaatcgttttttttaagcgtatgtcggataaaattatttttttcgcggtagagatttatttttcgttcgggcggtcgcgcgtaattcggttcgcgcgttcgcgtagtttgaatcgtcgttgcggcgcgtgcgcggcgtcgtgagagcgcgcgcgtagggtcgcgcggttttagtttcgagcgaggcggcgttagtcgtcgttggagcgtttcgcggggtcggggaatcgcgagttcgtatcgcgtttttttgttttcgggttttacgtggggtcggcgtcgcgcgatacgggcgagagcgggtagcgatttaggtcgcgtggatcggtcgtgtttcgttgtggttcgttcgttatcgttttttgttcggatttttcgcgcgttttaggcgagatttattttggtgtacgtcggttataaggaatttcggcgtttttcgtcgggtcgcgaat

SEQ ID NO: 19340 - DNA, 558 bp, Artificial Sequence
  chemically treated genomic DNA (Homo sapiens) CpG-island No: 19340
attcgcgacccgacgaaaaacgccgaaattccttataaccgacgtacaccaaaataaatctcgcctaaaacgcgcgaaaaatccgaacaaaaaacgataacgaacgaaccacaacgaaacacgaccgatccacgcgacctaaatcgctacccgctctcgcccgtatcgcgcgacgccgaccccacgtaaaacccgaaaacaaaaaaacgcgatacgaactcgcgattccccgaccccgcgaaacgctccaacgacgactaacgccgcctcgctcgaaactaaaaccgcgcgaccctacgcgcgcgctctcacgacgccgcgcacgcgccgcaacgacgattcaaactacgcgaacgcgcgaaccgaattacgcgcgaccgcccgaacgaaaaataaatctctaccgcgaaaaaaataattttatccgacatacgcttaaaaaaaacgatttacaaatcgaaaaaaaaacccttacccgaaaaaaaaataaatcgtaaaaactcgaaaatctcccgctatacacctttaaaaaccgtatatcttaaactaccgcaacaa

SEQ ID NO: 19341 - DNA, 1174 bp, Artificial Sequence
  chemically treated genomic DNA (Homo sapiens) CpG-island No: 19341
tatttagagaagttaattagcgtcgtcggggttttagttttaaagtttttacgtatttattcggatttagagtttttttagacgtcgagatgttggttatggcgtttcgaatcgtttttttgttgttttcggcggttttggttttgatcgagatttgggtcggtgagtgcgggtcgggagggaaatggtttttgtcgggaggagcgaggggatcgtaggcgggggcgtaggatttgaggagtcgcgtcgggaggagggtcgggcgggttttagttttttttcgtttttaggtttttattttatgaggtatttcgatatcgttatgtttcggttcggtcgcggggagtttcgttttattttagtgggttacgtggacgatacgtagttcgtgaggttcgatagcgacgtcgcgagttcgagagaggagtcgcgggcgtcgtggatagagtaggaggggtcggagtattgggatcggaatatatagatttttaagattaatatatagattgatcgagagagtttgcggaatttgcgcggttattataattagagcgaggtcggtgagtgatttcggttcggggcgtaggttacgattttttattttttacggacggttcgggtcgtttcgagttttcgggttcgagattcgtttttttgaggtcgcgggattcgtttagattttcgatcggcgagagttttaggcgcgtttattcggttttatttttagttgaggttaaaattttcgcgggttggtcggggcggggcggggttcggggggacggggttgatcgcggggtcggggttagggttttatattttttagagtatgtacggttgcgacgtggggtcggacgggcgtttttttcgcgggtataattagtacgtttacgacggtaaggattatatcgttttgaacgaggatttgcgtttttggatcgcggcggatatcgcggtttagattatttagcgtaagtgggaggcggttcgtgtggcggagtaggatagagtttatttggagggtacgtgcgtggagtggtttcgtagatatttggagaacgggaaggatacgttggagcgcgcgggtattaggggtagtggggagttttttttattttttataggtcgtcggggatggttttttacgagaagaggaggaaaatgggattagcgttag

SEQ ID NO: 19342 - DNA, 1174 bp, Artificial Sequence
  chemically treated genomic DNA (Homo sapiens) CpG-island No: 19342
ctaacgctaatcccattttcctcctcttctcgtaaaaaaccatccccgacgacctataaaaaataaaaaaaactccccactacccctaatacccgcgcgctccaacgtatccttcccgttctccaaatatctacgaaaccactccacgcacgtaccctccaaataaactctatcctactccgccacacgaaccgcctcccacttacgctaaataatctaaaccgcgatatccgccgcgatccaaaaacgcaaatcctcgttcaaaacgatataatccttaccgtcgtaaacgtactaattatacccgcgaaaaaaacgcccgtccgaccccacgtcgcaaccgtacatactctaaaaaatataaaaccctaaccccgaccccgcgatcaaccccgtccccccgaaccccgccccgccccgaccaacccgcgaaaattttaacctcaactaaaaataaaaccgaataaacgcgcctaaaactctcgccgatcgaaaatctaaacgaatcccgcgacctcaaaaaaacgaatctcgaacccgaaaactcgaaacgacccgaaccgtccgtaaaaaataaaaaatcgtaacctacgccccgaaccgaaatcactcaccgacctcgctctaattataataaccgcgcaaattccgcaaactctctcgatcaatctatatattaatcttaaaaatctatatattccgatcccaatactccgacccctcctactctatccacgacgcccgcgactcctctctcgaactcgcgacgtcgctatcgaacctcacgaactacgtatcgtccacgtaacccactaaaataaaacgaaactccccgcgaccgaaccgaaacataacgatatcgaaatacctcataaaataaaaacctaaaaacgaaaaaaaactaaaacccgcccgaccctcctcccgacgcgactcctcaaatcctacgcccccgcctacgatcccctcgctcctcccgacaaaaaccatttccctcccgacccgcactcaccgacccaaatctcgatcaaaaccaaaaccgccgaaaacaacaaaaaaacgattcgaaacgccataaccaacatctcgacgtctaaaaaaactctaaatccgaataaatacgtaaaaactttaaaactaaaaccccgacgacgctaattaacttctctaaata

SEQ ID NO: 19343 - DNA, 1174 bp, Artificial Sequence
  chemically treated genomic DNA (Homo sapiens) CpG-island No: 19343
ttagcgttgattttatttttttttttttttcgtgggaggttattttcggcgatttataggagatggggaaggttttttattgtttttggtattcgcgcgttttagcgtgtttttttcgttttttaggtatttgcggagttattttacgtacgtgttttttaggtaggttttgttttgtttcgttatacgggtcgttttttatttgcgttgggtgatttgagtcgcggtgttcgtcgcggtttaggagcgtaggttttcgtttagggcgatgtaatttttgtcgtcgtaggcgtattggttatgttcgcggaggaggcgttcgttcggttttacgtcgtagtcgtatatgttttggagggtgtgagattttggtttcggtttcgcggttagtttcgttttttcgagtttcgtttcgtttcgattaattcgcggggattttggttttaattgaaaatgaaatcgggtaaacgcgtttggggttttcgtcggtcgagggtttgggcgggtttcgcggttttagggaggcggatttcggattcggagattcggggcgattcgggtcgttcgtgggggatggggagtcgtgatttgcgtttcgggtcggggttatttatcggtttcgttttggttgtagtagtcgcgtaggtttcgtaggttttttcggttagtttgtgtgttggttttgaagatttgtgtgtttcggttttaatatttcggttttttttgttttatttacggcgttcgcggtttttttttcggattcgcggcgtcgttgtcgaattttacgaattgcgtgtcgtttacgtagtttattgagatgaagcggggtttttcgcggtcgggtcgggatatggcggtgtcgaaatattttatggagtgggagtttgggggcgaggaggggttgagattcgttcgatttttttttcggcgcggttttttaggttttgcgttttcgtttgcggttttttcgtttttttcggtagaggttatttttttttcgattcgtatttatcggtttaggtttcggttagggttagggtcgtcgagagtagtaggaggacggttcggggcgttatgattagtatttcggcgtttgaggagattttgagttcgggtgggtgcgtggggattttagaattgggatttcggcgacgttgattggtttttttagata

SEQ ID NO: 19344 - DNA, 1174 bp, Artificial Sequence
  chemically treated genomic DNA (Homo sapiens) CpG-island No: 19344
tatctaaaaaaaccaatcaacgtcgccgaaatcccaattctaaaatccccacgcacccacccgaactcaaaatctcctcaaacgccgaaatactaatcataacgccccgaaccgtcctcctactactctcgacgaccctaaccctaaccgaaacctaaaccgataaatacgaatcgaaaaaaaaataacctctaccgaaaaaaacgaaaaaaccgcaaacgaaaacgcaaaacctaaaaaaccgcgccgaaaaaaaaatcgaacgaatctcaacccctcctcgcccccaaactcccactccataaaatatttcgacaccgccatatcccgacccgaccgcgaaaaaccccgcttcatctcaataaactacgtaaacgacacgcaattcgtaaaattcgacaacgacgccgcgaatccgaaaaaaaaaccgcgaacgccgtaaataaaacaaaaaaaaccgaaatattaaaaccgaaacacacaaatcttcaaaaccaacacacaaactaaccgaaaaaacctacgaaacctacgcgactactacaaccaaaacgaaaccgataaataaccccgacccgaaacgcaaatcacgactccccatcccccacgaacgacccgaatcgccccgaatctccgaatccgaaatccgcctccctaaaaccgcgaaacccgcccaaaccctcgaccgacgaaaaccccaaacgcgtttacccgatttcattttcaattaaaaccaaaatccccgcgaattaatcgaaacgaaacgaaactcgaaaaaacgaaactaaccgcgaaaccgaaaccaaaatctcacaccctccaaaacatatacgactacgacgtaaaaccgaacgaacgcctcctccgcgaacataaccaatacgcctacgacgacaaaaattacatcgccctaaacgaaaacctacgctcctaaaccgcgacgaacaccgcgactcaaatcacccaacgcaaataaaaaacgacccgtataacgaaacaaaacaaaacctacctaaaaaacacgtacgtaaaataactccgcaaatacctaaaaaacgaaaaaaacacgctaaaacgcgcgaataccaaaaacaataaaaaaccttccccatctcctataaatcgccgaaaataacctcccacgaaaaaaaaaaaaaaataaaatcaacgctaa

SEQ ID NO: 19345 - DNA, 914 bp, Artificial Sequence
  chemically treated genomic DNA (Homo sapiens) CpG-island No: 19345
gttcggcgagggcgtaggattcggggagtcgcgtagggaggtgggtcgggcgggttttagttttttttcgtttttaggtttttattttatgaggtatttcgatatcgtcgtgtttcggttcggtcgcggagagtttcgttttattttagtgggttacgtggacgatacgtagttcgtgcggttcgatagcgacgtcgcgagttcgagaggggagtcgcgggcgtcgtgggtggagtaggaggggtcggagtattgggatcgggagatatagaattataagcgttaggtataggttgatcgagtgagtttgcggaatttgcgcggttattataattagagcgaggacggtgagtgatttcggttcggggcgtaggttacgatttttttttattttttacggacggttcgggtcgtttcgagttttttcgtttgagatttattttaaggtggatttgcggaattcgtttagattttcgatcggagagagttttagtcgtttttattcggttttattttcggtttaggttaaaattttcgcgggttggtcggggcggggcggggttcgggggattgggttgatcgcgggggcggggttagggttttatattttttagaggatgtatggttgcgatttggggttcgacgggcgtttttttcgcgggtatgattagttcgtttacgacggtaaggattatatcgttttgaacgaggatttgcgtttttggatcgtcgcggatatcgcggtttagattatttagcgtaagttggaggcggttcgtgcggcggagtagttgagagtttatttggagggtacgtgcgtggagtggtttcgtagatatttggagaacgggaaggagacgttgtagcgcgtaggtattaggggtagtggggagttttttttattttttatagat

SEQ ID NO: 19346 - DNA, 914 bp, Artificial Sequence
  chemically treated genomic DNA (Homo sapiens) CpG-island No: 19346
atctataaaaaataaaaaaaactccccactacccctaatacctacgcgctacaacgtctccttcccgttctccaaatatctacgaaaccactccacgcacgtaccctccaaataaactctcaactactccgccgcacgaaccgcctccaacttacgctaaataatctaaaccgcgatatccgcgacgatccaaaaacgcaaatcctcgttcaaaacgatataatccttaccgtcgtaaacgaactaatcatacccgcgaaaaaaacgcccgtcgaaccccaaatcgcaaccatacatcctctaaaaaatataaaaccctaaccccgcccccgcgatcaacccaatcccccgaaccccgccccgccccgaccaacccgcgaaaattttaacctaaaccgaaaataaaaccgaataaaaacgactaaaactctctccgatcgaaaatctaaacgaattccgcaaatccaccttaaaataaatctcaaacgaaaaaactcgaaacgacccgaaccgtccgtaaaaaataaaaaaaaatcgtaacctacgccccgaaccgaaatcactcaccgtcctcgctctaattataataaccgcgcaaattccgcaaactcactcgatcaacctatacctaacgcttataattctatatctcccgatcccaatactccgacccctcctactccacccacgacgcccgcgactcccctctcgaactcgcgacgtcgctatcgaaccgcacgaactacgtatcgtccacgtaacccactaaaataaaacgaaactctccgcgaccgaaccgaaacacgacgatatcgaaatacctcataaaataaaaacctaaaaacgaaaaaaaactaaaacccgcccgacccacctccctacgcgactccccgaatcctacgccctcgccgaac

SEQ ID NO: 19347 - DNA, 914 bp, Artificial Sequence
  chemically treated genomic DNA (Homo sapiens) CpG-island No: 19347
atttataggagatggggaaggttttttattgtttttggtatttgcgcgttgtagcgtttttttttcgttttttaggtatttgcggagttattttacgtacgtgttttttaggtaggtttttagttgtttcgtcgtacgggtcgtttttaatttgcgttgggtgatttgagtcgcggtgttcgcggcggtttaggagcgtaggttttcgtttagggcgatgtaatttttgtcgtcgtaggcggattggttatattcgcggaggaggcgttcgtcgggttttaggtcgtagttatatattttttggagggtgtgagattttggtttcgttttcgcggttagtttagtttttcgagtttcgtttcgtttcgattaattcgcggggattttggtttaaatcgaaaatgaaatcgggtaaaggcgattggggtttttttcggtcgagggtttgggcgggtttcgtagatttattttggggtggattttagacggggagattcggggcgattcgggtcgttcgtgggggatggggaggggtcgtgatttgcgtttcgggtcggggttatttatcgttttcgttttggttgtagtagtcgcgtaggtttcgtaggtttattcggttagtttgtgtttggcgtttgtagttttgtgtttttcggttttaatatttcggttttttttgttttatttacggcgttcgcggtttttttttcggattcgcggcgtcgttgtcgaatcgtacgaattgcgtgtcgtttacgtagtttattgagatgaagcggggtttttcgcggtcgggtcgggatacggcggtgtcgaaatattttatggagtgggagtttgggggcgaggaggggttgagattcgttcgatttatttttttgcgcggtttttcgggttttgcgttttcgtcgggt

SEQ ID NO: 19348 - DNA, 914 bp, Artificial Sequence
  chemically treated genomic DNA (Homo sapiens) CpG-island No: 19348
acccgacgaaaacgcaaaacccgaaaaaccgcgcaaaaaaataaatcgaacgaatctcaacccctcctcgcccccaaactcccactccataaaatatttcgacaccgccgtatcccgacccgaccgcgaaaaaccccgcttcatctcaataaactacgtaaacgacacgcaattcgtacgattcgacaacgacgccgcgaatccgaaaaaaaaaccgcgaacgccgtaaataaaacaaaaaaaaccgaaatattaaaaccgaaaaacacaaaactacaaacgccaaacacaaactaaccgaataaacctacgaaacctacgcgactactacaaccaaaacgaaaacgataaataaccccgacccgaaacgcaaatcacgacccctccccatcccccacgaacgacccgaatcgccccgaatctccccgtctaaaatccaccccaaaataaatctacgaaacccgcccaaaccctcgaccgaaaaaaaccccaatcgcctttacccgatttcattttcgatttaaaccaaaatccccgcgaattaatcgaaacgaaacgaaactcgaaaaactaaactaaccgcgaaaacgaaaccaaaatctcacaccctccaaaaaatatataactacgacctaaaacccgacgaacgcctcctccgcgaatataaccaatccgcctacgacgacaaaaattacatcgccctaaacgaaaacctacgctcctaaaccgccgcgaacaccgcgactcaaatcacccaacgcaaattaaaaacgacccgtacgacgaaacaactaaaaacctacctaaaaaacacgtacgtaaaataactccgcaaatacctaaaaaacgaaaaaaaaacgctacaacgcgcaaataccaaaaacaataaaaaaccttccccatctcctataaat

SEQ ID NO: 19349 - DNA, 921 bp, Artificial Sequence
  chemically treated genomic DNA (Homo sapiens) CpG-island No: 19349
atttcggagttattcgcgtcgtttttacgtgtgtgtgtaatggggggaggggggttttcggtttttttttttttagtttttggatttgtaatatcgggagggcgaggacgcgggattagcgtattttcggaaggttcgatttttttcggtagggcgtttggttaacgagtcgcgtcgttttttttcggtcgcgtttgttggtgattttttcgagagttttaggggcggtttcggtatttttttttttttcgttttttttgtcgtttattttagtttcggggttcggcgatcggcgtttaggagcgggttttcgcggcgcgtcgtatgtatttatcgcgattttttcgaattcgggagcgcgcgggtttttttcgggagagtttttggaggtagcgacgcggaggcgcgtttgtgattttagggtcgcggcggggtcggaggtaagattcgtcggtttcgtattcgtcgcggattttttttttttttcgtttttttttcgggatttaggcggttagtgtttcgttcgaaggcgggtttgttataaataaacgcggttcggtcgtacgtggatagcggaggtgttgcgtttagttatatatcgcgggtttcggcgttgcgtttttaggtatagggagtcgttaggaagggtaggagagcgcgttcgggttagggttcggttttagtcgtttgcgattcgttttttttcgttgggttttcgttttatggtttcgcggttatcgtcgtttttgtcgtttttcggttcggagggttttgtcgtagtcggttcgaatattcgacgaaggagtaagtagcgttttcgttttcgcgtcggtcgtttttattttttaggaaggtcgaggtaggagaggtaggagggaggaaataggagcgagtaggaacggggtttcggttgttgtagga

SEQ ID NO: 19350 - DNA, 921 bp, Artificial Sequence
  chemically treated genomic DNA (Homo sapiens) CpG-island No: 19350
tcctacaacaaccgaaaccccgttcctactcgctcctatttcctccctcctacctctcctacctcgaccttcctaaaaaataaaaacgaccgacgcgaaaacgaaaacgctacttactccttcgtcgaatattcgaaccgactacgacaaaaccctccgaaccgaaaaacgacaaaaacgacgataaccgcgaaaccataaaacgaaaacccaacgaaaaaaaacgaatcgcaaacgactaaaaccgaaccctaacccgaacgcgctctcctacccttcctaacgactccctatacctaaaaacgcaacgccgaaacccgcgatatataactaaacgcaacacctccgctatccacgtacgaccgaaccgcgtttatttataacaaacccgccttcgaacgaaacactaaccgcctaaatcccgaaaaaaaaacgaaaaaaaaaaaaaatccgcgacgaatacgaaaccgacgaatcttacctccgaccccgccgcgaccctaaaatcacaaacgcgcctccgcgtcgctacctccaaaaactctcccgaaaaaaacccgcgcgctcccgaattcgaaaaaatcgcgataaatacatacgacgcgccgcgaaaacccgctcctaaacgccgatcgccgaaccccgaaactaaaataaacgacaaaaaaaacgaaaaaaaaaaaaataccgaaaccgcccctaaaactctcgaaaaaatcaccaacaaacgcgaccgaaaaaaaacgacgcgactcgttaaccaaacgccctaccgaaaaaaatcgaaccttccgaaaatacgctaatcccgcgtcctcgccctcccgatattacaaatccaaaaactaaaaaaaaaaaaaccgaaaacccccctccccccattacacacacacgtaaaaacgacgcgaataactccgaaat

SEQ ID NO: 19351 - DNA, 921 bp, Artificial Sequence
  chemically treated genomic DNA (Homo sapiens) CpG-island No: 19351
ttttgtagtaatcggagtttcgtttttgttcgtttttgtttttttttttttgttttttttgtttcggtttttttggggggtgggggcggtcggcgcggaggcggaggcgttgtttattttttcgtcgagtgttcgaatcggttgcggtaaggtttttcggatcggagggcgataggggcggcggtggtcgcggagttatggagcgggagtttagcggaggggagcgagtcgtaggcggttggggtcgggttttggttcgggcgcgtttttttgttttttttggcggttttttgtgtttggagacgtagcgtcggagttcgcgatgtgtggttaggcgtagtattttcgttgtttacgtgcggtcgagtcgcgtttgtttatggtagattcgttttcgggcggagtattggtcgtttgggtttcggagggggggcgggaggggggagggattcgcggcgggtgcggggtcggcgaattttgttttcgatttcgtcgcggttttggagttataggcgcgttttcgcgtcgttgtttttagggattttttcgggagagattcgcgcgttttcgggttcggggaagtcgcggtgagtgtatacggcgcgtcgcggggattcgtttttgagcgtcggtcgtcggatttcggagttaggatgggcggtagggagggcgagggaaggaggggtgtcgaggtcgtttttgaggttttcgggaaggttattagtaggcgcggtcgagaggaggcggcgcgattcgttggttaggcgttttgtcggggaggatcgagtttttcgagggtgcgttggtttcgcgttttcgttttttcggtgttgtaggtttaagagttgaaaaggggaaagtcgggagtttttttttttttattatatatatacgtgaaaacggcgcgagtggtttcgaagt

SEQ ID NO: 19352 - DNA, 921 bp, Artificial Sequence
  chemically treated genomic DNA (Homo sapiens) CpG-island No: 19352
acttcgaaaccactcgcgccgttttcacgtatatatataataaaaaaaaaaaaactcccgactttccccttttcaactcttaaacctacaacaccgaaaaaacgaaaacgcgaaaccaacgcaccctcgaaaaactcgatcctccccgacaaaacgcctaaccaacgaatcgcgccgcctcctctcgaccgcgcctactaataaccttcccgaaaacctcaaaaacgacctcgacacccctccttccctcgccctccctaccgcccatcctaactccgaaatccgacgaccgacgctcaaaaacgaatccccgcgacgcgccgtatacactcaccgcgacttccccgaacccgaaaacgcgcgaatctctcccgaaaaaatccctaaaaacaacgacgcgaaaacgcgcctataactccaaaaccgcgacgaaatcgaaaacaaaattcgccgaccccgcacccgccgcgaatccctcccccctcccgccccccctccgaaacccaaacgaccaatactccgcccgaaaacgaatctaccataaacaaacgcgactcgaccgcacgtaaacaacgaaaatactacgcctaaccacacatcgcgaactccgacgctacgtctccaaacacaaaaaaccgccaaaaaaaacaaaaaaacgcgcccgaaccaaaacccgaccccaaccgcctacgactcgctcccctccgctaaactcccgctccataactccgcgaccaccgccgcccctatcgccctccgatccgaaaaaccttaccgcaaccgattcgaacactcgacgaaaaaataaacaacgcctccgcctccgcgccgaccgcccccaccccccaaaaaaaccgaaacaaaaaaaacaaaaaaaaaaaaacaaaaacgaacaaaaacgaaactccgattactacaaaa

SEQ ID NO: 19353 - DNA, 621 bp, Artificial Sequence
  chemically treated genomic DNA (Homo sapiens) CpG-island No: 19353
ttgcgtttcgggtagcggcgggcggcgtcgtcgggttgttcggagtttaggttcggcggttgcggggaggcgtttcggaatttcgggaggtttttcgtatttgttcgcggtttatttcgcggatttatttggttttcggtttttttttttttattttcgtcgtcgtagttcgagcggggtttcgcgggtttggagtacggtcgggtttaatatgttcggagtcgaggcgcgatgaaggagaagtttaagaatgcggttaagattaggagggagaaggaaaatggcgagttttacgagtttgttaagttgttttcgttgtcgtcggttattatttcgtagttggataaagcgtttattattcgttttattacgagttatttgaagatgcgcgtcgtttttttcgaaggtaggttttaggtgggcggtcggggacgttggggagttcggcggtttcggtttaggcgggaagcgtaagttagttcgtttagaggggttgtcgcggtttggcgtttagagttggggcgtttgagggaggttgcgtgagggttttcggtttcggcgttggtttggggcgaggggttagggttttggcggtttaggcgattaaatttttttttggtt

SEQ ID NO: 19354 - DNA, 621 bp, Artificial Sequence
  chemically treated genomic DNA (Homo sapiens) CpG-island No: 19354
aaccaaaaaaaaatttaatcgcctaaaccgccaaaaccctaacccctcgccccaaaccaacgccgaaaccgaaaaccctcacgcaacctccctcaaacgccccaactctaaacgccaaaccgcgacaacccctctaaacgaactaacttacgcttcccgcctaaaccgaaaccgccgaactccccaacgtccccgaccgcccacctaaaacctaccttcgaaaaaaacgacgcgcatcttcaaataactcgtaataaaacgaataataaacgctttatccaactacgaaataataaccgacgacaacgaaaacaacttaacaaactcgtaaaactcgccattttccttctccctcctaatcttaaccgcattcttaaacttctccttcatcgcgcctcgactccgaacatattaaacccgaccgtactccaaacccgcgaaaccccgctcgaactacgacgacgaaaataaaaaaaaaaaaaccgaaaaccaaataaatccgcgaaataaaccgcgaacaaatacgaaaaacctcccgaaattccgaaacgcctccccgcaaccgccgaacctaaactccgaacaacccgacgacgccgcccgccgctacccgaaacgcaa

SEQ ID NO: 19355 - DNA, 621 bp, Artificial Sequence
  chemically treated genomic DNA (Homo sapiens) CpG-island No: 19355
gattaggagagggtttggtcgtttgggtcgttaaggttttggtttttcgttttaagttagcgtcgaagtcgaagatttttacgtaattttttttagacgttttagttttggacgttaggtcgcggtaatttttttgggcgggttggtttgcgtttttcgtttgggtcggggtcgtcgggttttttagcgttttcggtcgtttatttgaggtttattttcggggaagacggcgcgtatttttaggtagttcgtggtgaggcggatgatggacgttttgtttagttgcgaagtgatggtcgacggtagcgggagtagtttggtaagttcgtaaaattcgttatttttttttttttttttggttttggtcgtatttttggattttttttttatcgcgtttcggtttcgggtatattagattcggtcgtgttttaggttcgcggagtttcgttcgggttgcggcggcggggatggggaagggggagtcgggagttaggtgagttcgcggagtgggtcgcgggtaggtgcggggggtttttcggggtttcgagacgttttttcgtagtcgtcgggtttgagtttcgagtaattcggcggcgtcgttcgtcgttgttcggagcgtag

SEQ ID NO: 19356 - DNA, 621 bp, Artificial Sequence
  chemically treated genomic DNA (Homo sapiens) CpG-island No: 19356
ctacgctccgaacaacgacgaacgacgccgccgaattactcgaaactcaaacccgacgactacgaaaaaacgtctcgaaaccccgaaaaaccccccgcacctacccgcgacccactccgcgaactcacctaactcccgactcccccttccccatccccgccgccgcaacccgaacgaaactccgcgaacctaaaacacgaccgaatctaatatacccgaaaccgaaacgcgataaaaaaaaaatccaaaaatacgaccaaaaccaaaaaaaaaaaaaaaaataacgaattttacgaacttaccaaactactcccgctaccgtcgaccatcacttcgcaactaaacaaaacgtccatcatccgcctcaccacgaactacctaaaaatacgcgccgtcttccccgaaaataaacctcaaataaacgaccgaaaacgctaaaaaacccgacgaccccgacccaaacgaaaaacgcaaaccaacccgcccaaaaaaattaccgcgacctaacgtccaaaactaaaacgtctaaaaaaaattacgtaaaaatcttcgacttcgacgctaacttaaaacgaaaaaccaaaaccttaacgacccaaacgaccaaaccctctcctaatc

SEQ ID NO: 19357 - DNA, 507 bp, Artificial Sequence
  chemically treated genomic DNA (Homo sapiens) CpG-island No: 19357
cgcgtggggtgtaggcggcgttaagggcgcgtgtatttgtgggcgcggggcgcgagggtttttttcggcgcgagcgggcgtagtttttcggcggcgtcgttaggggtttttttcgggtgtcgagcggggtgggtcggattagttgattcgtttggttttgagtttcgtcgtcgcgttcgggtttcgttagttttttcggtagcggtaggcgagagtacgcggaggagcgtgcgcgggggtttcgggagacggcggcggtggcggcgcgggtagagtaaggacgcggcggattttattcgtatagtagcgtattcggtgtttcgcgtagggtcgcgatgttgttcggtttggtattgtttttgttggtcgtttggacggttcgggcgttggaggtgggtgtcgcgtttcggaaggcggggggaggttgtacggtggggacgcgatattttttaagattttaatttaagtttttaatgtagagaagtcgggggttcgttaatgggattt

SEQ ID NO: 19358 - DNA, 507 bp, Artificial Sequence
  chemically treated genomic DNA (Homo sapiens) CpG-island No: 19358
aaatcccattaacgaacccccgacttctctacattaaaaacttaaattaaaatcttaaaaaatatcgcgtccccaccgtacaacctccccccgccttccgaaacgcgacacccacctccaacgcccgaaccgtccaaacgaccaacaaaaacaataccaaaccgaacaacatcgcgaccctacgcgaaacaccgaatacgctactatacgaataaaatccgccgcgtccttactctacccgcgccgccaccgccgccgtctcccgaaacccccgcgcacgctcctccgcgtactctcgcctaccgctaccgaaaaaactaacgaaacccgaacgcgacgacgaaactcaaaaccaaacgaatcaactaatccgacccaccccgctcgacacccgaaaaaaacccctaacgacgccgccgaaaaactacgcccgctcgcgccgaaaaaaaccctcgcgccccgcgcccacaaatacacgcgcccttaacgccgcctacaccccacgcg

SEQ ID NO: 19359 - DNA, 507 bp, Artificial Sequence
  chemically treated genomic DNA (Homo sapiens) CpG-island No: 19359
gggttttattgacggattttcggtttttttgtattaaagatttgggttaaggttttggggggtatcgcgtttttatcgtgtagttttttttcgtttttcgaggcgcggtatttatttttagcgttcgagtcgtttaggcggttagtaggagtagtgttaaatcgggtagtatcgcgattttgcgcggggtatcgagtgcgttgttgtgcgagtgggattcgtcgcgtttttgttttgttcgcgtcgttatcgtcgtcgtttttcggggttttcgcgtacgttttttcgcgtgttttcgtttatcgttgtcgaggaaattgacggagttcgagcgcggcggcggggtttagagttaggcgagttagttgattcggtttatttcgttcggtattcgagagagatttttagcggcgtcgtcggggaattgcgttcgttcgcgtcgggaggggttttcgcgtttcgcgtttataggtgtacgcgtttttggcgtcgtttgtattttacgcg

SEQ ID NO: 19360 - DNA, 507 bp, Artificial Sequence
  chemically treated genomic DNA (Homo sapiens) CpG-island No: 19360
cgcgtaaaatacaaacgacgccaaaaacgcgtacacctataaacgcgaaacgcgaaaacccctcccgacgcgaacgaacgcaattccccgacgacgccgctaaaaatctctctcgaataccgaacgaaataaaccgaatcaactaactcgcctaactctaaaccccgccgccgcgctcgaactccgtcaatttcctcgacaacgataaacgaaaacacgcgaaaaaacgtacgcgaaaaccccgaaaaacgacgacgataacgacgcgaacaaaacaaaaacgcgacgaatcccactcgcacaacaacgcactcgataccccgcgcaaaatcgcgatactacccgatttaacactactcctactaaccgcctaaacgactcgaacgctaaaaataaataccgcgcctcgaaaaacgaaaaaaaactacacgataaaaacgcgataccccccaaaaccttaacccaaatctttaatacaaaaaaaccgaaaatccgtcaataaaaccc

SEQ ID NO: 19361 - DNA, 753 bp, Artificial Sequence
  chemically treated genomic DNA (Homo sapiens) CpG-island No: 19361
gcgtcggatgttttttggaaggcgtttggatttacgttaggttttttagtttaattttttatgatttagcgttttagttcgcgtatcgattagcgttttagttttttatagacgtcggcgggttcgggagtttcgcggacgtgacgtcgcgggcggaagtgacgttttttcgcggttggacgcggcgtttagttgtcgggcgggggagggcgcgttcggttttttttaggggacgttgaaattatttttgtaacgggagtcgggagaggacggggcgtgtttcgacgtgcgcgcgcgtcgtttttttcggcgtttttttatagttcgttggttttcgtcgcggaaaggcgttatgtcgtttaaaatttttcgaaaaacggtcgttatcgtcgtcgttgtcgtcgcggaattttcggtatcgtcgtcgtcgtttttttttgaggaggatttagagtaggatagcggttcggaggatttgtttttcgttaggtgagcgagtagagtcgtcgtcgttttacgcgggaagggcgtttcgggtgtgcgtagggcgggcgtaaggcggttcggcggggattcgttttcgttaggggtcgggtttcggcgggaggaggcgttttttttgtttttcgttacggcggagcgtttgtagaatggtgataggattttgggtttttgggcgaggggtttcggttttaatttgataggtgtcgggcgggtggggttagggttttgagcgaagtgataggtgtagtt

SEQ ID NO: 19362 - DNA, 753 bp, Artificial Sequence
  chemically treated genomic DNA (Homo sapiens) CpG-island No: 19362
aactacacctatcacttcgctcaaaaccctaaccccacccgcccgacacctatcaaattaaaaccgaaacccctcgcccaaaaacccaaaatcctatcaccattctacaaacgctccgccgtaacgaaaaacaaaaaaaacgcctcctcccgccgaaacccgacccctaacgaaaacgaatccccgccgaaccgccttacgcccgccctacgcacacccgaaacgcccttcccgcgtaaaacgacgacgactctactcgctcacctaacgaaaaacaaatcctccgaaccgctatcctactctaaatcctcctcaaaaaaaaacgacgacgacgataccgaaaattccgcgacgacaacgacgacgataacgaccgtttttcgaaaaattttaaacgacataacgcctttccgcgacgaaaaccaacgaactataaaaaaacgccgaaaaaaacgacgcgcgcgcacgtcgaaacacgccccgtcctctcccgactcccgttacaaaaataatttcaacgtcccctaaaaaaaaccgaacgcgccctcccccgcccgacaactaaacgccgcgtccaaccgcgaaaaaacgtcacttccgcccgcgacgtcacgtccgcgaaactcccgaacccgccgacgtctataaaaaactaaaacgctaatcgatacgcgaactaaaacgctaaatcataaaaaattaaactaaaaaacctaacgtaaatccaaacgccttccaaaaaacatccgacgc

SEQ ID NO: 19363 - DNA, 753 bp, Artificial Sequence
  chemically treated genomic DNA (Homo sapiens) CpG-island No: 19363
aattgtatttgttatttcgtttaggattttagttttattcgttcgatatttgttaagttgaagtcgagatttttcgtttaagaatttagaattttgttattattttgtagacgtttcgtcgtggcggggggtagggagggcgttttttttcgtcgggattcggtttttggcgaggacgggttttcgtcgagtcgttttgcgttcgttttacgtatattcggggcgtttttttcgcgtgaggcgacggcggttttgttcgtttatttgacgagaggtaggtttttcgggtcgttgttttgttttgggttttttttaggagggggcggcggcggcggtgtcgggggtttcgcggcggtagcggcggcggtggcggtcgtttttcggggggttttgggcggtatgacgttttttcgcggcgggagttagcgagttgtggaggagcgtcggggaggacgacgcgcgcgtacgtcggggtacgtttcgttttttttcgattttcgttataaaaataattttaacgttttttgagaaaaatcggacgcgttttttttcgttcggtaattgagcgtcgcgtttaatcgcgggaaaacgttattttcgttcgcggcgttacgttcgcgaggttttcgggttcgtcggcgtttgtggggaattggggcgttggtcggtgcgcgggttgggacgttaagttatgaggaattaaattgggaaatttggcgtgggtttaggcgttttttaggaggtattcggcgt

SEQ ID NO: 19364 - DNA, 753 bp, Artificial Sequence
  chemically treated genomic DNA (Homo sapiens) CpG-island No: 19364
acgccgaatacctcctaaaaaacgcctaaacccacgccaaatttcccaatttaattcctcataacttaacgtcccaacccgcgcaccgaccaacgccccaattccccacaaacgccgacgaacccgaaaacctcgcgaacgtaacgccgcgaacgaaaataacgttttcccgcgattaaacgcgacgctcaattaccgaacgaaaaaaaacgcgtccgatttttctcaaaaaacgttaaaattatttttataacgaaaatcgaaaaaaaacgaaacgtaccccgacgtacgcgcgcgtcgtcctccccgacgctcctccacaactcgctaactcccgccgcgaaaaaacgtcataccgcccaaaaccccccgaaaaacgaccgccaccgccgccgctaccgccgcgaaacccccgacaccgccgccgccgccccctcctaaaaaaaacccaaaacaaaacaacgacccgaaaaacctacctctcgtcaaataaacgaacaaaaccgccgtcgcctcacgcgaaaaaaacgccccgaatatacgtaaaacgaacgcaaaacgactcgacgaaaacccgtcctcgccaaaaaccgaatcccgacgaaaaaaaacgccctccctaccccccgccacgacgaaacgtctacaaaataataacaaaattctaaattcttaaacgaaaaatctcgacttcaacttaacaaatatcgaacgaataaaactaaaatcctaaacgaaataacaaatacaatt

SEQ ID NO: 19365 - DNA, 595 bp, Artificial Sequence
  chemically treated genomic DNA (Homo sapiens) CpG-island No: 19365
gcgcggcgtttttgtttaaaatttcgtcgtcggttttgaatttcggcggacgcgtttcgacgtttttggaagattttgcgttttgtcggttcgtcggcgttcgggagttcgggaggcgggtgtgtacgcggggtgtttagggcgttttcgatcgaggttttttcgtcgtgtttcggggtagggggacggttgtaatttaggcgcgcgttttttttcggggtttttagtggtcgcgagggggcgcgtacggtttcgggaattcgcgcggcgtcgcgtttatttttattttagtttcgttaaaaatagttgtcgcgtttcgagtcgagttcgaaatagcggtttttagataaggtaggacgatttagcgttttcggggagcggaagggggagcgcgcggggggagcggtgttgggcgtagttcggtcgagtaggcgtcgttgtttttagcgtatttttattttgttttggcggttatattcgttttcgattgcgatttcgtttcgtcgttagtttggttgtttttttacgttttttatattgtatttttattttttgttttttatttttagttttatttttattttttattataatt

SEQ ID NO: 19366 - DNA, 595 bp, Artificial Sequence
  chemically treated genomic DNA (Homo sapiens) CpG-island No: 19366
aattataataaaaaataaaaataaaactaaaaataaaaaacaaaaaataaaaatacaatataaaaaacgtaaaaaaacaaccaaactaacgacgaaacgaaatcgcaatcgaaaacgaatataaccgccaaaacaaaataaaaatacgctaaaaacaacgacgcctactcgaccgaactacgcccaacaccgctccccccgcgcgctcccccttccgctccccgaaaacgctaaatcgtcctaccttatctaaaaaccgctatttcgaactcgactcgaaacgcgacaactatttttaacgaaactaaaataaaaataaacgcgacgccgcgcgaattcccgaaaccgtacgcgccccctcgcgaccactaaaaaccccgaaaaaaaacgcgcgcctaaattacaaccgtccccctaccccgaaacacgacgaaaaaacctcgatcgaaaacgccctaaacaccccgcgtacacacccgcctcccgaactcccgaacgccgacgaaccgacaaaacgcaaaatcttccaaaaacgtcgaaacgcgtccgccgaaattcaaaaccgacgacgaaattttaaacaaaaacgccgcgc

SEQ ID NO: 19367 - DNA, 595 bp, Artificial Sequence
  chemically treated genomic DNA (Homo sapiens) CpG-island No: 19367
agttatgatgaggaatggaggtgaagttgaggatgggggataggggatgaggatataatgtgggggacgtaggaaggtagttaggttagcggcggggcggggtcgtagtcgggggcgagtgtgatcgttagggtagagtgggggtgcgttggggatagcggcgtttgttcggtcgggttgcgtttagtatcgtttttttcgcgcgttttttttttcgtttttcggaagcgttgagtcgttttgttttatttgggggtcgttatttcgggttcggttcggagcgcggtaattatttttagcggagttggggtaaaaatggacgcggcgtcgcgcgggttttcgaggtcgtgcgcgttttttcgcgattattgagggtttcggggaggagcgcgcgtttgagttatagtcgtttttttatttcgaggtacggcgagggggtttcgatcgggggcgttttggatatttcgcgtgtatattcgtttttcgggttttcgggcgtcggcgagtcggtagggcgtagaattttttaggggcgtcgggacgcgttcgtcggggtttagagtcgacggcggagttttgggtaggggcgtcgcgt

SEQ ID NO: 19368 - DNA, 595 bp, Artificial Sequence
  chemically treated genomic DNA (Homo sapiens) CpG-island No: 19368
acgcgacgcccctacccaaaactccgccgtcgactctaaaccccgacgaacgcgtcccgacgcccctaaaaaattctacgccctaccgactcgccgacgcccgaaaacccgaaaaacgaatatacacgcgaaatatccaaaacgcccccgatcgaaaccccctcgccgtacctcgaaataaaaaaacgactataactcaaacgcgcgctcctccccgaaaccctcaataatcgcgaaaaaacgcgcacgacctcgaaaacccgcgcgacgccgcgtccatttttaccccaactccgctaaaaataattaccgcgctccgaaccgaacccgaaataacgacccccaaataaaacaaaacgactcaacgcttccgaaaaacgaaaaaaaaaacgcgcgaaaaaaacgatactaaacgcaacccgaccgaacaaacgccgctatccccaacgcacccccactctaccctaacgatcacactcgcccccgactacgaccccgccccgccgctaacctaactaccttcctacgtcccccacattatatcctcatcccctatcccccatcctcaacttcacctccattcctcatcataact

SEQ ID NO: 19369 - DNA, 676 bp, Artificial Sequence
  chemically treated genomic DNA (Homo sapiens) CpG-island No: 19369
  unsure (385, 513)
ttgatagcgtcgcgtcgcgtttagcggtcgtacgggggtgtcgaggcgtttgggggtttgcgtttcggggcgagcgtagcgtaaggttggcgcgcgcgtatggaggatgtttattgtatttggttttcgttatttggtttgttttcgggttgggttttgtttgtcgttttcgacggttacggtggggttcgagttgttcgtttcggtgtacgttatttgttaggttatgtgttttaggagttgggttcggagtttagcgagttcgagggcgtgcgcgaggcgttgcgtcgagtttttttgagcgtcgacgagcgttttcgttttttttggtttcgcgtggaaacgggcggttttacggtcgtagtgttgttggttttttcgcggnttttgtatttggcgtattgcggtgattttcgcgcggtgttgagtcgcgttggcgtcgtggtttttagtatagaggattatcggttttttcgatttcgggaacgcgagcgtatttacgtcgttggcggnattattcgtcgtcgtcgcgtcgagggttttttggtcgtgtcgcgagcgttgggcgattttatttataaggaggtttcggggaggtttttcgagttatagttcgtttttgcggagttagaggtggtcgtattggtacgttaggttgaggacgagtttatgtttt

SEQ ID NO: 19370 - DNA, 676 bp, Artificial Sequence
  chemically treated genomic DNA (Homo sapiens) CpG-island No: 19370
  unsure (164, 292)
aaaacataaactcgtcctcaacctaacgtaccaatacgaccacctctaactccgcaaaaacgaactataactcgaaaaacctccccgaaacctccttataaataaaatcgcccaacgctcgcgacacgaccaaaaaaccctcgacgcgacgacgacgaataatnccgccaacgacgtaaatacgctcgcgttcccgaaatcgaaaaaaccgataatcctctatactaaaaaccacgacgccaacgcgactcaacaccgcgcgaaaatcaccgcaatacgccaaatacaaaanccgcgaaaaaaccaacaacactacgaccgtaaaaccgcccgtttccacgcgaaaccaaaaaaaacgaaaacgctcgtcgacgctcaaaaaaactcgacgcaacgcctcgcgcacgccctcgaactcgctaaactccgaacccaactcctaaaacacataacctaacaaataacgtacaccgaaacgaacaactcgaaccccaccgtaaccgtcgaaaacgacaaacaaaacccaacccgaaaacaaaccaaataacgaaaaccaaatacaataaacatcctccatacgcgcgcgccaaccttacgctacgctcgccccgaaacgcaaacccccaaacgcctcgacacccccgtacgaccgctaaacgcgacgcgacgctatcaa

SEQ ID NO: 19371 - DNA, 676 bp, Artificial Sequence
  chemically treated genomic DNA (Homo sapiens) CpG-island No: 19371
  unsure (164, 292)
ggagtatgaattcgtttttagtttggcgtgttagtgcggttatttttggtttcgtagaaacgagttgtagttcggggggttttttcggagtttttttgtaggtaaagtcgtttaacgttcgcgatacggttagagagttttcgacgcggcggcggcggatggtntcgttagcggcgtggatgcgttcgcgttttcggggtcgaaggggtcggtggttttttgtgttgaaggttacggcgttagcgcggtttagtatcgcgcgggagttatcgtagtgcgttaggtatagaantcgcggggagattagtaatattacggtcgtgaagtcgttcgtttttacgcggggttagagggagcgaaggcgttcgtcggcgtttaagaaggttcggcgtagcgtttcgcgtacgttttcgggttcgttaggtttcgggtttagtttttggagtatatggtttggtaaatggcgtgtatcgaagcgggtagttcgagttttatcgtggtcgtcgaggacggtaaataaggtttagttcgggggtagattaggtaacgaaagttaagtgtagtgagtattttttatgcgcgcgcgttagttttgcgttgcgttcgtttcgaagcgtaggtttttagacgtttcggtattttcgtgcggtcgttgggcgcggcgcggcgttgttaa

SEQ ID NO: 19372 - DNA, 676 bp, Artificial Sequence
  chemically treated genomic DNA (Homo sapiens) CpG-island No: 19372
  unsure (385, 513)
ttaacaacgccgcgccgcgcccaacgaccgcacgaaaataccgaaacgtctaaaaacctacgcttcgaaacgaacgcaacgcaaaactaacgcgcgcgcataaaaaatactcactacacttaactttcgttacctaatctacccccgaactaaaccttatttaccgtcctcgacgaccacgataaaactcgaactacccgcttcgatacacgccatttaccaaaccatatactccaaaaactaaacccgaaacctaacgaacccgaaaacgtacgcgaaacgctacgccgaaccttcttaaacgccgacgaacgccttcgctccctctaaccccgcgtaaaaacgaacgacttcacgaccgtaatattactaatctccccgcganttctatacctaacgcactacgataactcccgcgcgatactaaaccgcgctaacgccgtaaccttcaacacaaaaaaccaccgaccccttcgaccccgaaaacgcgaacgcatccacgccgctaacganaccatccgccgccgccgcgtcgaaaactctctaaccgtatcgcgaacgttaaacgactttacctacaaaaaaactccgaaaaaaccccccgaactacaactcgtttctacgaaaccaaaaataaccgcactaacacgccaaactaaaaacgaattcatactcc

SEQ ID NO: 19373 - DNA, 1362 bp, Artificial Sequence
  chemically treated genomic DNA (Homo sapiens) CpG-island No: 19373
tcgttattcgcgtcgcggttattttttttcggtttttttttttttgcggcgtagagtgcgggtcgggcgggagtgcggcgagagtcggttggttgagtttagcgttcgaggaggcggcggcggcggcggcggtacggcggcggcggggttgtggggcggtgcggaagcgagaggcgaggagcgcgcgggtcgtggttagagtttggcggcggtttggcggagcggagagtagcgttcgcgtttcgtcgtgcggaggagtttcgtatataatagcggcgcgcgtagttcgcgttttttttttcggcgcgtttcgtttcgcgcgtcgagcgtttcgtttcgttttatttgttattagggagtgggcgggtattgttcgtcgtcgtcgtcgtcgcgcgggttatgggggtcgttcggcgttcggggtcgggttggcgaggcgtcgcgtcgtcgttgagacgggtttcgcgcgtagttcggcggcgtaggtaaggtcggtcgcgttatggtggattcggtgggtttcgcggaggcgtggaaggcgtagttttcggatttagagttttcgcgtatggagttgcgtttagtgggcgatatcgagtaggagttggagcgttgtaaggtttttattcggcgtttggagtaggaggtgaattaggagcgttttcgtatgatttatttgtagacgttgttggttaaggaaaagaagagttatgatcggtagcgatggggttttcggcgcgcggcgtaggttttcgacggcgttttcgagtttcgagcgttcgcgtcgcgttcgtagttagcgttcgtcgacggagtcgattcgtcgttcgtcgaggagttcgaggttcggttcgacggcgagggtttttcgggtaaggttaggttcgggatcgttcgtaggttcggggtagtcgcgtcgggggaacgggacgatcggggatttttcgttagcgtggcggcgtttaggtttaatttcgagcggattcgtaagggttatggttagttcggggcggacgtcgagaagtttttttacgtgaacgtcgagttttattacgagcgcggtttggtgaaggttaacgataaagaggtgtcggatcgtattagttttttgggtagttaggttatgtagatggagcgtaaaaagttttagtacggcgcgggttcgagcgtgggggatgtatttaggtttttttatcggggacgtttttcggagagtagttgcggcgtcgacggcgattacgaggacgtcgagttgaattttcgttttttgaaggataatttgatcgacgttaatggcggtagtaggtttttttggtcgtttttggagtattagttttattagagtatttacgtcgggggtat

SEQ ID NO: 19374 - DNA, 1362 bp, Artificial Sequence
  chemically treated genomic DNA (Homo sapiens) CpG-island No: 19374
atacccccgacgtaaatactctaataaaactaatactccaaaaacgaccaaaaaaacctactaccgccattaacgtcgatcaaattatccttcaaaaaacgaaaattcaactcgacgtcctcgtaatcgccgtcgacgccgcaactactctccgaaaaacgtccccgataaaaaaacctaaatacatcccccacgctcgaacccgcgccgtactaaaactttttacgctccatctacataacctaactacccaaaaaactaatacgatccgacacctctttatcgttaaccttcaccaaaccgcgctcgtaataaaactcgacgttcacgtaaaaaaacttctcgacgtccgccccgaactaaccataacccttacgaatccgctcgaaattaaacctaaacgccgccacgctaacgaaaaatccccgatcgtcccgttcccccgacgcgactaccccgaacctacgaacgatcccgaacctaaccttacccgaaaaaccctcgccgtcgaaccgaacctcgaactcctcgacgaacgacgaatcgactccgtcgacgaacgctaactacgaacgcgacgcgaacgctcgaaactcgaaaacgccgtcgaaaacctacgccgcgcgccgaaaaccccatcgctaccgatcataactcttcttttccttaaccaacaacgtctacaaataaatcatacgaaaacgctcctaattcacctcctactccaaacgccgaataaaaaccttacaacgctccaactcctactcgatatcgcccactaaacgcaactccatacgcgaaaactctaaatccgaaaactacgccttccacgcctccgcgaaacccaccgaatccaccataacgcgaccgaccttacctacgccgccgaactacgcgcgaaacccgtctcaacgacgacgcgacgcctcgccaacccgaccccgaacgccgaacgacccccataacccgcgcgacgacgacgacgacgaacaatacccgcccactccctaataacaaataaaacgaaacgaaacgctcgacgcgcgaaacgaaacgcgccgaaaaaaaaaacgcgaactacgcgcgccgctattatatacgaaactcctccgcacgacgaaacgcgaacgctactctccgctccgccaaaccgccgccaaactctaaccacgacccgcgcgctcctcgcctctcgcttccgcaccgccccacaaccccgccgccgccgtaccgccgccgccgccgccgcctcctcgaacgctaaactcaaccaaccgactctcgccgcactcccgcccgacccgcactctacgccgcaaaaaaaaaaaaaccgaaaaaaaataaccgcgacgcgaataacga

SEQ ID NO: 19375 - DNA, 1362 bp, Artificial Sequence
  chemically treated genomic DNA (Homo sapiens) CpG-island No: 19375
atgttttcgacgtagatgttttggtagggttggtattttaggggcggttaagggggtttgttatcgttattggcgtcgattaggttgttttttaggaagcgggggtttaattcggcgttttcgtagtcgtcgtcgacgtcgtagttgtttttcgaggagcgttttcggtaagggggtttggatgtattttttacgttcgagttcgcgtcgtgttgggattttttgcgttttatttgtatggtttggttgtttagggagttgatgcggttcgatatttttttgtcgttgatttttattaggtcgcgttcgtggtgaaattcgacgtttacgtagaagggtttttcggcgttcgtttcgggttggttatggtttttgcggattcgttcgaagttggatttgagcgtcgttacgttggcggggggttttcggtcgtttcgttttttcgacgcggttgtttcgggtttgcgggcggtttcgggtttggttttattcggagaattttcgtcgtcgggtcgggtttcgggtttttcggcgggcggcgggtcggtttcgtcggcgggcgttggttgcgggcgcgacgcggacgttcggggttcggaggcgtcgtcgggggtttgcgtcgcgcgtcggaagttttatcgttgtcggttatagttttttttttttttggttagtaacgtttgtaggtagattatgcggaagcgtttttggtttattttttgttttaggcgtcgaatggaggttttgtagcgttttagtttttgttcgatgtcgtttattgagcgtagttttatgcgcgggggttttgagttcgggaattgcgttttttacgttttcgcgaagtttatcgggtttattatggcgcggtcggttttatttgcgtcgtcgggttgcgcgcggggttcgttttagcggcggcgcggcgtttcgttagttcggtttcgggcgtcgggcggtttttatggttcgcgcggcggcggcggcggcgaataatgttcgtttattttttggtggtaggtgaggcggagcggggcgttcggcgcgcggggcggggcgcgtcggggggaagggcgcgggttgcgcgcgtcgttattgtgtgcggggttttttcgtacggcgaggcgcgggcgttgtttttcgtttcgttaggtcgtcgttagattttggttacggttcgcgcgtttttcgtttttcgttttcgtatcgttttatagtttcgtcgtcgtcgtgtcgtcgtcgtcgtcgtcgttttttcggacgttaagtttagttagtcggttttcgtcgtattttcgttcggttcgtattttgcgtcgtaggaaggggagggtcggggggaggtggtcgcggcgcggatgacgg

SEQ ID NO: 19376 - DNA, 1362 bp, Artificial Sequence
  chemically treated genomic DNA (Homo sapiens) CpG-island No: 19376
ccgtcatccgcgccgcgaccacctccccccgaccctccccttcctacgacgcaaaatacgaaccgaacgaaaatacgacgaaaaccgactaactaaacttaacgtccgaaaaaacgacgacgacgacgacgacacgacgacgacgaaactataaaacgatacgaaaacgaaaaacgaaaaacgcgcgaaccgtaaccaaaatctaacgacgacctaacgaaacgaaaaacaacgcccgcgcctcgccgtacgaaaaaaccccgcacacaataacgacgcgcgcaacccgcgcccttccccccgacgcgccccgccccgcgcgccgaacgccccgctccgcctcacctaccaccaaaaaataaacgaacattattcgccgccgccgccgccgcgcgaaccataaaaaccgcccgacgcccgaaaccgaactaacgaaacgccgcgccgccgctaaaacgaaccccgcgcgcaacccgacgacgcaaataaaaccgaccgcgccataataaacccgataaacttcgcgaaaacgtaaaaaacgcaattcccgaactcaaaacccccgcgcataaaactacgctcaataaacgacatcgaacaaaaactaaaacgctacaaaacctccattcgacgcctaaaacaaaaaataaaccaaaaacgcttccgcataatctacctacaaacgttactaaccaaaaaaaaaaaaaactataaccgacaacgataaaacttccgacgcgcgacgcaaacccccgacgacgcctccgaaccccgaacgtccgcgtcgcgcccgcaaccaacgcccgccgacgaaaccgacccgccgcccgccgaaaaacccgaaacccgacccgacgacgaaaattctccgaataaaaccaaacccgaaaccgcccgcaaacccgaaacaaccgcgtcgaaaaaacgaaacgaccgaaaaccccccgccaacgtaacgacgctcaaatccaacttcgaacgaatccgcaaaaaccataaccaacccgaaacgaacgccgaaaaacccttctacgtaaacgtcgaatttcaccacgaacgcgacctaataaaaatcaacgacaaaaaaatatcgaaccgcatcaactccctaaacaaccaaaccatacaaataaaacgcaaaaaatcccaacacgacgcgaactcgaacgtaaaaaatacatccaaacccccttaccgaaaacgctcctcgaaaaacaactacgacgtcgacgacgactacgaaaacgccgaattaaacccccgcttcctaaaaaacaacctaatcgacgccaataacgataacaaacccccttaaccgcccctaaaataccaaccctaccaaaacatctacgtcgaaaacat

SEQ ID NO: 19377 - DNA, 1136 bp, Artificial Sequence
  chemically treated genomic DNA (Homo sapiens) CpG-island No: 19377
  unsure (521)
aggggcggaggcgcgagcggtcgggtttttgggttgcgtttcggcgacggtcgttcgagacgggtgtcgaggatagggatcgcggaggatgtggattttttttttggtttgtttaggcgcgcgcgttttttcgtttcggggtacgtagttcggtcgggcgtattcgtcgttttcgggtcggcggggtagttatcgggataagggttatagcgttttcgtcgttcggttaaggacgcgtagttcgcgttttcgtttcgtttcgtcggcgcgattcgtacgggcgcgtttttcgtagaggggcgtcggtataaagtcgttttatataatggttcggttcggcgtagttcgttttgtaattcggtttcgcgtagttgtatttatatttgggtaacgagggtttgtggtttacgggtatttagattttttgtattcggttttgcgttagttttaacggtattttcgcggttgcgcgacggttcgtttttcggggtcgagatttcgacgttggtaggagagcggtnagcgattttcggaataaaggaggagaggggggcgtgcgtcggcgcgcggtcgggcgtttttttgcgttgttaggggaaacgtgtttgggttaagtttcggattttcgtttgtgcggggttcgacgtgtgttgcgagggtagcgaggttggggatgtcggtacggtcggttcgttcgttcggaaagttttgggatgttcgggcgtagtgatagtcgcgttttcgttattaggttttgtcgttcgtttttttttcggtttggttgggatgtttcgcgtatcgtcggtttttaaagagttcgggttggtcgtagacgcgtacgttagtttcggggcgggtcgtattttttgggttttagtttttttttacgtggggaggagggtgggcgagtcgggaagtagtttgcgagttttttttgcggtcggcgacggcggtgtattagttttcgtcgttttgtttcgggtttggagcgcgtttagttttgttgaagggttttggttgttgttattttttcgtttcgttgttttttcgggacgtttggtatagttttttcgattaatttcggttttttattttaattgtgttggtcgggaggagagtagagacgtagttttgtt

SEQ ID NO: 19378 - DNA, 1136 bp, Artificial Sequence
  chemically treated genomic DNA (Homo sapiens) CpG-island No: 19378
  unsure (616)
aacaaaactacgtctctactctcctcccgaccaacacaattaaaataaaaaaccgaaattaatcgaaaaaactataccaaacgtcccgaaaaaacaacgaaacgaaaaaataacaacaaccaaaacccttcaacaaaactaaacgcgctccaaacccgaaacaaaacgacgaaaactaatacaccgccgtcgccgaccgcaaaaaaaactcgcaaactacttcccgactcgcccaccctcctccccacgtaaaaaaaaactaaaacccaaaaaatacgacccgccccgaaactaacgtacgcgtctacgaccaacccgaactctttaaaaaccgacgatacgcgaaacatcccaaccaaaccgaaaaaaaaacgaacgacaaaacctaataacgaaaacgcgactatcactacgcccgaacatcccaaaactttccgaacgaacgaaccgaccgtaccgacatccccaacctcgctaccctcgcaacacacgtcgaaccccgcacaaacgaaaatccgaaacttaacccaaacacgtttcccctaacaacgcaaaaaaacgcccgaccgcgcgccgacgcacgcccccctctcctcctttattccgaaaatcgctnaccgctctcctaccaacgtcgaaatctcgaccccgaaaaacgaaccgtcgcgcaaccgcgaaaataccgttaaaactaacgcaaaaccgaatacaaaaaatctaaatacccgtaaaccacaaaccctcgttacccaaatataaatacaactacgcgaaaccgaattacaaaacgaactacgccgaaccgaaccattatataaaacgactttataccgacgcccctctacgaaaaacgcgcccgtacgaatcgcgccgacgaaacgaaacgaaaacgcgaactacgcgtccttaaccgaacgacgaaaacgctataacccttatcccgataactaccccgccgacccgaaaacgacgaatacgcccgaccgaactacgtaccccgaaacgaaaaaacgcgcgcgcctaaacaaaccaaaaaaaaaatccacatcctccgcgatccctatcctcgacacccgtctcgaacgaccgtcgccgaaacgcaacccaaaaacccgaccgctcgcgcctccgcccct

SEQ ID NO: 19379 - DNA, 1136 bp, Artificial Sequence
  chemically treated genomic DNA (Homo sapiens) CpG-island No: 19379
  unsure (616)
ggtaggattgcgtttttgtttttttttcggttagtatagttgaggtgaggggtcggaattagtcggggaagttgtgttagacgtttcgaggggataacgggacgaggggataatagtagttaggattttttagtagggttgggcgcgttttaggttcggggtagggcggcgggagttggtgtatcgtcgtcgtcggtcgtagggggagttcgtaggttgtttttcggttcgtttatttttttttttacgtggaagggggttgggatttaaggaatgcggttcgtttcgaggttgacgtacgcgtttgcggttagttcggattttttaaaagtcggcggtgcgcggggtattttagttaagtcggagaggaggcgagcggtagggtttggtggcgagagcgcggttgttattgcgttcgagtattttagagtttttcgagcggacgagtcggtcgtgtcggtatttttagtttcgttattttcgtagtatacgtcgagtttcgtataggcgagggttcggaatttagtttaagtacgttttttttggtagcgtaaggaaacgttcggtcgcgcgtcggcgtacgtttttttttttttttttgtttcgggggtcgttngtcgtttttttgttagcgtcgggatttcggtttcgggaggcgggtcgtcgcgtagtcgcgaagatgtcgttggaattgacgtagagtcgagtgtagaagatttgggtgttcgtggattataggttttcgttgtttagatgtgagtgtagttgcgcggagtcgggttgtagggcgggttgcgtcgggtcgggttattgtgtggggcggttttgtgtcgacgtttttttgcggggggcgcgttcgtgcgggtcgcgtcggcggggcggggcggaggcgcgggttgcgcgtttttggtcgggcggcgggggcgttgtggtttttgtttcggtggttgtttcgtcggttcggaaacggcgagtgcgttcggtcgggttgcgtatttcgagacggagggacgcgcgcgtttgggtaggttagggaggggatttatatttttcgcgatttttgttttcgatattcgtttcgggcggtcgtcgtcggagcgtagtttagggattcggtcgttcgcgttttcgttttt

SEQ ID NO: 19380 - DNA, 1136 bp, Artificial Sequence
  chemically treated genomic DNA (Homo sapiens) CpG-island No: 19380
  unsure (521)
aaaaacgaaaacgcgaacgaccgaatccctaaactacgctccgacgacgaccgcccgaaacgaatatcgaaaacaaaaatcgcgaaaaatataaatcccctccctaacctacccaaacgcgcgcgtccctccgtctcgaaatacgcaacccgaccgaacgcactcgccgtttccgaaccgacgaaacaaccaccgaaacaaaaaccacaacgcccccgccgcccgaccaaaaacgcgcaacccgcgcctccgccccgccccgccgacgcgacccgcacgaacgcgccccccgcaaaaaaacgtcgacacaaaaccgccccacacaataacccgacccgacgcaacccgccctacaacccgactccgcgcaactacactcacatctaaacaacgaaaacctataatccacgaacacccaaatcttctacactcgactctacgtcaattccaacgacatcttcgcgactacgcgacgacccgcctcccgaaaccgaaatcccgacgctaacaaaaaaacgacnaacgacccccgaaacaaaaaaaaaaaaaaaaacgtacgccgacgcgcgaccgaacgtttccttacgctaccaaaaaaaacgtacttaaactaaattccgaaccctcgcctatacgaaactcgacgtatactacgaaaataacgaaactaaaaataccgacacgaccgactcgtccgctcgaaaaactctaaaatactcgaacgcaataacaaccgcgctctcgccaccaaaccctaccgctcgcctcctctccgacttaactaaaataccccgcgcaccgccgacttttaaaaaatccgaactaaccgcaaacgcgtacgtcaacctcgaaacgaaccgcattccttaaatcccaacccccttccacgtaaaaaaaaaaataaacgaaccgaaaaacaacctacgaactccccctacgaccgacgacgacgatacaccaactcccgccgccctaccccgaacctaaaacgcgcccaaccctactaaaaaatcctaactactattatcccctcgtcccgttatcccctcgaaacgtctaacacaacttccccgactaattccgacccctcacctcaactatactaaccgaaaaaaaaacaaaaacgcaatcctacc

SEQ ID NO: 19381 - DNA, 669 bp, Artificial Sequence
  chemically treated genomic DNA (Homo sapiens) CpG-island No: 19381
tcggttttcgtagtttgtattagttcgcgatttgtgatagtcgtgtagttaggttagaggcgtgcggggaagatttgggttgtttttggtggggaatcgtcgttcgcgtcgggacggatgtaatttttgtaaacgaagttttagtataggagcgttgcgtcgttttgtagagaggtgtatatttagcgttgaggttgggttgtgattggagggaaggcggcgttcgttgaaatttatatcgcggcggaaaagtttgcgtagaggttgttatacgtcgtttacgtttcgtatgttttatagggagggcgttcgcgtttaggcggcgatcggggttgttttcgtttcgcgcgttcgttttattcgggtttttatttttttcgattcgtcgtttgtcgaggggtttcggaacgcgtaatatcggttatttggtttgtgtttcgttatttttttttacgtttcgatttttattttttttttcgtttcgatttttatttcggtatttcgtttttcgcgtcgtttttttagagtttttgttttcgcgatagttttgttgacggtttggttttcgcgttttggcggttgtttagaaattcgatgcgttgtatttggatttgttttttgtagtgggagtatatgttagaggcgatattttaaacgtttaggggagag

SEQ ID NO: 19382 - DNA, 669 bp, Artificial Sequence
  chemically treated genomic DNA (Homo sapiens) CpG-island No: 19382
ctctcccctaaacgtttaaaatatcgcctctaacatatactcccactacaaaaaacaaatccaaatacaacgcatcgaatttctaaacaaccgccaaaacgcgaaaaccaaaccgtcaacaaaactatcgcgaaaacaaaaactctaaaaaaacgacgcgaaaaacgaaataccgaaataaaaatcgaaacgaaaaaaaaaataaaaatcgaaacgtaaaaaaaaataacgaaacacaaaccaaataaccgatattacgcgttccgaaacccctcgacaaacgacgaatcgaaaaaaataaaaacccgaataaaacgaacgcgcgaaacgaaaacaaccccgatcgccgcctaaacgcgaacgccctccctataaaacatacgaaacgtaaacgacgtataacaacctctacgcaaacttttccgccgcgatataaatttcaacgaacgccgccttccctccaatcacaacccaacctcaacgctaaatatacacctctctacaaaacgacgcaacgctcctatactaaaacttcgtttacaaaaattacatccgtcccgacgcgaacgacgattccccaccaaaaacaacccaaatcttccccgcacgcctctaacctaactacacgactatcacaaatcgcgaactaatacaaactacgaaaaccga

SEQ ID NO: 19383 - DNA, 669 bp, Artificial Sequence
  chemically treated genomic DNA (Homo sapiens) CpG-island No: 19383
tttttttttgggcgtttagggtgtcgtttttggtatgtgtttttattgtagaaaataagtttaaatgtaacgtatcgggtttttgaatagtcgttagagcgcggaaattagatcgttagtaaagttgtcgcgggaataggggttttgagagggcggcgcggggggcggggtgtcggagtgggggtcgaggcgggagggggagtgggggtcgaggcgtgggggagggtggcggggtataggttaggtggtcgatgttgcgcgtttcggggtttttcggtaggcggcgggtcgggaggagtggaggttcgggtggggcgggcgcgcggggcgggagtagtttcggtcgtcgtttgggcgcgggcgttttttttgtggagtatgcgggacgtgagcgacgtgtggtagtttttgcgtagattttttcgtcgcggtgtaggttttagcgagcgtcgttttttttttaattatagtttagttttagcgttaagtgtgtatttttttgtaaggcggcgtagcgtttttgtattgaggtttcgtttgtaaaagttatattcgtttcggcgcgggcggcggttttttattaaaagtaatttagatttttttcgtacgtttttgatttgattgtacgattgttataagtcgcgagttggtgtaaattgcgagggtcgg

SEQ ID NO: 19384 - DNA, 669 bp, Artificial Sequence
  chemically treated genomic DNA (Homo sapiens) CpG-island No: 19384
ccgaccctcgcaatttacaccaactcgcgacttataacaatcgtacaatcaaatcaaaaacgtacgaaaaaaatctaaattacttttaataaaaaaccgccgcccgcgccgaaacgaatataacttttacaaacgaaacctcaatacaaaaacgctacgccgccttacaaaaaaatacacacttaacgctaaaactaaactataattaaaaaaaaaacgacgctcgctaaaacctacaccgcgacgaaaaaatctacgcaaaaactaccacacgtcgctcacgtcccgcatactccacaaaaaaaacgcccgcgcccaaacgacgaccgaaactactcccgccccgcgcgcccgccccacccgaacctccactcctcccgacccgccgcctaccgaaaaaccccgaaacgcgcaacatcgaccacctaacctataccccgccaccctcccccacgcctcgacccccactccccctcccgcctcgacccccactccgacaccccgccccccgcgccgccctctcaaaacccctattcccgcgacaactttactaacgatctaatttccgcgctctaacgactattcaaaaacccgatacgttacatttaaacttattttctacaataaaaacacataccaaaaacgacaccctaaacgcccaaaaaaaaa

SEQ ID NO: 19385 - DNA, 1075 bp, Artificial Sequence
  chemically treated genomic DNA (Homo sapiens) CpG-island No: 19385
ggtgatttattttcggttttgtttggtagcgttgtattttttaatttaaatttcggtcggtcgttcgtcgggggtatagagtgtgcgtcgggtcgcgcggtaattggttttcgcgtcgattttcgttcgcgagcgtcgtcgtttttttttttcgtttcgcgtttttttttttcggtttcgcgcgtcgtttgtttttcgagttagtcgttgatagtcgcggcgtcgcgagttttttttttttttacgatcgaggtaggtaaacgttcggggtgggaggaacgcgggcgggggtaggggagtcgcgggggtcgagtgaggatttcgggtttcgggttttaggcgtaagggtgttcggtcgggcggggtcgggattttagtgaggaggggtcgggggttgtttcgcgggcgcgtgacggtttcgggtttgttcggttgcgttggttttcgttcgggtgaggcggtttggtttcgttttttaggttaggaaagttttttttattgcgcgttggggggttgggggagttggcggagttacgttagggaggtcggtggcgtcggggtgttttagcgttttttgtatttcgcgcgggttcggtttagcgggcgatcgttggcgtttagggaatttcgggagggtcgttagcgggtttcgtaggcgcggggcggggaggggcgtttgggggtcgcggggttcgcgtttttcgttcgttggtcgtttttcggaggtcgagatcggggtttagaacgttttttggtaaagtttggcgttttcgcgatgtttagagggtgtttggggggatggagagaggggcgttcgtcggggtagtttcgggagtttcggtgtttttcgtcgtagttgtagcgtttttttcgggaggcggtttagttttttattttcgtcgtttgagttttttcgaggggggttgtagttttgcggtcgttgttatcgtttggagaagcggtttacgcggattgacgggcgggggcggggtttcgggtttcggcgggggcggggttcggggaggttttattttttgttttttaggggcggggagagaggagttgtaggtttgcg

SEQ ID NO: 19386 - DNA, 1075 bp, Artificial Sequence
  chemically treated genomic DNA (Homo sapiens) CpG-island No: 19386
cgcaaacctacaactcctctctccccgcccctaaaaaacaaaaaataaaacctccccgaaccccgcccccgccgaaacccgaaaccccgcccccgcccgtcaatccgcgtaaaccgcttctccaaacgataacaacgaccgcaaaactacaacccccctcgaaaaaactcaaacgacgaaaataaaaaactaaaccgcctcccgaaaaaaacgctacaactacgacgaaaaacaccgaaactcccgaaactaccccgacgaacgcccctctctccatccccccaaacaccctctaaacatcgcgaaaacgccaaactttaccaaaaaacgttctaaaccccgatctcgacctccgaaaaacgaccaacgaacgaaaaacgcgaaccccgcgacccccaaacgcccctccccgccccgcgcctacgaaacccgctaacgaccctcccgaaattccctaaacgccaacgatcgcccgctaaaccgaacccgcgcgaaatacaaaaaacgctaaaacaccccgacgccaccgacctccctaacgtaactccgccaactcccccaaccccccaacgcgcaataaaaaaaactttcctaacctaaaaaacgaaaccaaaccgcctcacccgaacgaaaaccaacgcaaccgaacaaacccgaaaccgtcacgcgcccgcgaaacaacccccgacccctcctcactaaaatcccgaccccgcccgaccgaacacccttacgcctaaaacccgaaacccgaaatcctcactcgacccccgcgactcccctacccccgcccgcgttcctcccaccccgaacgtttacctacctcgatcgtaaaaaaaaaaaaaactcgcgacgccgcgactatcaacgactaactcgaaaaacaaacgacgcgcgaaaccgaaaaaaaaaaacgcgaaacgaaaaaaaaaaacgacgacgctcgcgaacgaaaatcgacgcgaaaaccaattaccgcgcgacccgacgcacactctatacccccgacgaacgaccgaccgaaatttaaattaaaaaatacaacgctaccaaacaaaaccgaaaataaatcacc

SEQ ID NO: 19387 - DNA, 1075 bp, Artificial Sequence
  chemically treated genomic DNA (Homo sapiens) CpG-island No: 19387
cgtagatttgtagttttttttttttcgtttttggagaatagagggtggggttttttcggatttcgttttcgtcgaggttcgaggtttcgttttcgttcgttagttcgcgtgggtcgtttttttaggcggtggtaacggtcgtaaggttgtagtttttttcggagaagtttaggcggcgaggatgaagggttgggtcgtttttcgggaggaacgttgtagttgcggcgggaggtatcgaggttttcggaattatttcggcgggcgtttttttttttatttttttaagtattttttgggtatcgcggaagcgttaggttttgttaaggggcgttttgggtttcgatttcggttttcgaggggcggttaacgggcggggagcgcgagtttcgcggtttttaggcgttttttttcgtttcgcgtttgcggagttcgttggcggttttttcggagttttttgggcgttagcgatcgttcgttgggtcggattcgcgcggggtgtagggggcgttgagatatttcggcgttatcgatttttttaacgtggtttcgttagtttttttagttttttaacgcgtagtaaagggagtttttttaatttgaaaagcgaagttaagtcgttttattcgagcggagattagcgtagtcgggtaggttcgagatcgttacgcgttcgcggggtagttttcggtttttttttattggggtttcgatttcgttcggtcgggtatttttgcgtttgggattcgaggttcggggtttttattcggttttcgcggtttttttgttttcgttcgcgttttttttatttcgggcgtttatttgtttcggtcgtgaggagaggagaagttcgcggcgtcgcggttgttagcgattggttcggaggataggcgacgcgcggggtcgagggggagggacgcggggcggggaagggaagcggcggcgttcgcgggcggaggtcggcgcggggattaattgtcgcgcggttcggcgtatattttgtgttttcggcgggcggtcggtcgaggtttaagttaaagggtgtagcgttgttaagtagggtcgggaatgagttatt

SEQ ID NO: 19388 - DNA, 1075 bp, Artificial Sequence
  chemically treated genomic DNA (Homo sapiens) CpG-island No: 19388
aataactcattcccgaccctacttaacaacgctacaccctttaacttaaacctcgaccgaccgcccgccgaaaacacaaaatatacgccgaaccgcgcgacaattaatccccgcgccgacctccgcccgcgaacgccgccgcttcccttccccgccccgcgtccctccccctcgaccccgcgcgtcgcctatcctccgaaccaatcgctaacaaccgcgacgccgcgaacttctcctctcctcacgaccgaaacaaataaacgcccgaaataaaaaaaacgcgaacgaaaacaaaaaaaccgcgaaaaccgaataaaaaccccgaacctcgaatcccaaacgcaaaaatacccgaccgaacgaaatcgaaaccccaataaaaaaaaaccgaaaactaccccgcgaacgcgtaacgatctcgaacctacccgactacgctaatctccgctcgaataaaacgacttaacttcgcttttcaaattaaaaaaactccctttactacgcgttaaaaaactaaaaaaactaacgaaaccacgttaaaaaaatcgataacgccgaaatatctcaacgccccctacaccccgcgcgaatccgacccaacgaacgatcgctaacgcccaaaaaactccgaaaaaaccgccaacgaactccgcaaacgcgaaacgaaaaaaaacgcctaaaaaccgcgaaactcgcgctccccgcccgttaaccgcccctcgaaaaccgaaatcgaaacccaaaacgccccttaacaaaacctaacgcttccgcgatacccaaaaaatacttaaaaaaataaaaaaaaaaacgcccgccgaaataattccgaaaacctcgatacctcccgccgcaactacaacgttcctcccgaaaaacgacccaacccttcatcctcgccgcctaaacttctccgaaaaaaactacaaccttacgaccgttaccaccgcctaaaaaaacgacccacgcgaactaacgaacgaaaacgaaacctcgaacctcgacgaaaacgaaatccgaaaaaaccccaccctctattctccaaaaacgaaaaaaaaaaaactacaaatctacg

SEQ ID NO: 19389 - DNA, 706 bp, Artificial Sequence
  chemically treated genomic DNA (Homo sapiens) CpG-island No: 19389
agtcggggttatacgttttttatcgcgtgcggttacgagacgtttttaagggagtattttggtattcggaagtcgcgatttttggttttgagttcgggtttagttttcgggtttacgtggtcggagtcggtagttgattggacgcgggtcgttttattttttggtcgtcgcgggattcgtaggattgagattatggaggcggtggcggtggtcgcggcggtgggggttttttttttggtcggggtcgggggcgcggtaggcgacgaggttcgggaggcggcggtcgtgcgggcgttcgtggttcggttgttggggttaggtttcgcggtcgattttttcgtgtcggtggagcgcgttttggttgttaagtcgggtttggatatttatagtttgggcggcggcggcgcggcgcgcgtgcgggtgcgcggttttacgggcgtggcggtcgtcgcggggttgtatcgttatttgcgcgatttttgtggttgttacgtggtttggttcggtttttagttgcgtttgtcgcggttattgttagtcgtgtcgggggagttgatcgaggttacgtttaataggtatcgtttcgaagttttttcgcgttcgttcgaggcgtttattttttttcggagtcgttgttatttaaatcgggaggttgagcggggagcgttggtcggaaggtttagttgcgtcgtttttagtagttgtg

SEQ ID NO: 19390 - DNA, 706 bp, Artificial Sequence
  chemically treated genomic DNA (Homo sapiens) CpG-island No: 19390
cacaactactaaaaacgacgcaactaaaccttccgaccaacgctccccgctcaacctcccgatttaaataacaacgactccgaaaaaaaataaacgcctcgaacgaacgcgaaaaaacttcgaaacgatacctattaaacgtaacctcgatcaactcccccgacacgactaacaataaccgcgacaaacgcaactaaaaaccgaaccaaaccacgtaacaaccacaaaaatcgcgcaaataacgatacaaccccgcgacgaccgccacgcccgtaaaaccgcgcacccgcacgcgcgccgcgccgccgccgcccaaactataaatatccaaacccgacttaacaaccaaaacgcgctccaccgacacgaaaaaatcgaccgcgaaacctaaccccaacaaccgaaccacgaacgcccgcacgaccgccgcctcccgaacctcgtcgcctaccgcgcccccgaccccgaccaaaaaaaaaacccccaccgccgcgaccaccgccaccgcctccataatctcaatcctacgaatcccgcgacgaccaaaaaataaaacgacccgcgtccaatcaactaccgactccgaccacgtaaacccgaaaactaaacccgaactcaaaaccaaaaatcgcgacttccgaataccaaaatactcccttaaaaacgtctcgtaaccgcacgcgataaaaaacgtataaccccgact

SEQ ID NO: 19391 - DNA, 706 bp, Artificial Sequence
  chemically treated genomic DNA (Homo sapiens) CpG-island No: 19391
tatagttgttggaggcggcgtagttgggtttttcggttagcgtttttcgtttagtttttcgatttgggtggtagcggtttcgggagggggtaagcgtttcgggcggacgcggggaagtttcggggcggtatttgttgggcgtggtttcggttagttttttcggtacggttggtagtggtcgcggtaggcgtagttgagagtcggattaggttacgtggtagttatagaagtcgcgtaggtagcggtgtagtttcgcggcggtcgttacgttcgtggagtcgcgtattcgtacgcgcgtcgcgtcgtcgtcgtttaggttgtaggtgtttaagttcggtttggtagttagagcgcgttttatcgatacggagaagtcggtcgcggggtttggttttagtagtcgggttacgagcgttcgtacggtcgtcgtttttcgggtttcgtcgtttgtcgcgttttcggtttcggttaggagaaggatttttatcgtcgcggttatcgttatcgtttttatggttttagttttgcgggtttcgcgacggttagggggtggggcggttcgcgtttaattagttgtcggtttcggttacgtggattcgaaggttaagttcgggtttagggttaggagtcgcggttttcgggtattaggatatttttttgggggcgtttcgtgatcgtacgcggtggggagcgtgtgatttcggtt

SEQ ID NO: 19392 - DNA, 706 bp, Artificial Sequence
  chemically treated genomic DNA (Homo sapiens) CpG-island No: 19392
aaccgaaatcacacgctccccaccgcgtacgatcacgaaacgcccccaaaaaaatatcctaatacccgaaaaccgcgactcctaaccctaaacccgaacttaaccttcgaatccacgtaaccgaaaccgacaactaattaaacgcgaaccgccccaccccctaaccgtcgcgaaacccgcaaaactaaaaccataaaaacgataacgataaccgcgacgataaaaatccttctcctaaccgaaaccgaaaacgcgacaaacgacgaaacccgaaaaacgacgaccgtacgaacgctcgtaacccgactactaaaaccaaaccccgcgaccgacttctccgtatcgataaaacgcgctctaactaccaaaccgaacttaaacacctacaacctaaacgacgacgacgcgacgcgcgtacgaatacgcgactccacgaacgtaacgaccgccgcgaaactacaccgctacctacgcgacttctataactaccacgtaacctaatccgactctcaactacgcctaccgcgaccactaccaaccgtaccgaaaaaactaaccgaaaccacgcccaacaaataccgccccgaaacttccccgcgtccgcccgaaacgcttaccccctcccgaaaccgctaccacccaaatcgaaaaactaaacgaaaaacgctaaccgaaaaacccaactacgccgcctccaacaactata

SEQ ID NO: 19393 - DNA, 684 bp, Artificial Sequence
  chemically treated genomic DNA (Homo sapiens) CpG-island No: 19393
ggacgtagcggtgttgttttgggtcgtggttagggtcggggtcggggtcggtgttggggtaggagatgggatttggcgtttgggtcgttttcgtttttgtttatttgcggttttcgggttagtagcgtgagtttgatcgagtgcggttttgtggatatcgtttttatgtagaaggtgttgggcggtttcgattaggtgatggatcgtacgaatattcggatttttcgttttttgtattaatatttttattatagtaaggagatttatcgcgaggaggcgtagtattttgaggaggtggtgaaggtgagcggggggcgggatttcgggagcgggggcggtgcgtcgttttgcgcgtagtcggggttagagtttttttttcgtcgtcgtaggttttttttatcgttatgcgcgtttcgaagtcgattttgcgttattttataattaggcgttttttgtattagttgttgatgcgtttggacgatttttttggtttcgattacgtcgtcgttatgtatcgggacgtgttcgtcgacgatttcgtagaggtcgaggttggggtcggggttggggtcgaggtcgggggcggggtcggtgggatgggagattttgagtttagcgattttttggtcgtttcgtaagaaaggtttcgttagttattgtttttcgcgtttttttttgtttttt

SEQ ID NO: 19394 - DNA, 684 bp, Artificial Sequence
  chemically treated genomic DNA (Homo sapiens) CpG-island No: 19394
aaaaaacaaaaaaaaacgcgaaaaacaataactaacgaaacctttcttacgaaacgaccaaaaaatcgctaaactcaaaatctcccatcccaccgaccccgcccccgacctcgaccccaaccccgaccccaacctcgacctctacgaaatcgtcgacgaacacgtcccgatacataacgacgacgtaatcgaaaccaaaaaaatcgtccaaacgcatcaacaactaatacaaaaaacgcctaattataaaataacgcaaaatcgacttcgaaacgcgcataacgataaaaaaaacctacgacgacgaaaaaaaaactctaaccccgactacgcgcaaaacgacgcaccgcccccgctcccgaaatcccgccccccgctcaccttcaccacctcctcaaaatactacgcctcctcgcgataaatctccttactataataaaaatattaatacaaaaaacgaaaaatccgaatattcgtacgatccatcacctaatcgaaaccgcccaacaccttctacataaaaacgatatccacaaaaccgcactcgatcaaactcacgctactaacccgaaaaccgcaaataaacaaaaacgaaaacgacccaaacgccaaatcccatctcctaccccaacaccgaccccgaccccgaccctaaccacgacccaaaacaacaccgctacgtcc

SEQ ID NO: 19395 - DNA, 684 bp, Artificial Sequence
  chemically treated genomic DNA (Homo sapiens) CpG-island No: 19395
aggagataaaggagggcgcgggagatagtggttgacggagttttttttgcggggcggttagaggatcgttgagtttagggttttttattttatcggtttcgttttcggtttcggttttagtttcggttttagtttcggtttttgcgggatcgtcggcgaatacgtttcggtgtatggcggcggcgtagtcgaagttaaaggggtcgtttaggcgtattagtagttggtgtaggaagcgtttggttgtgaagtagcgtagggtcggtttcggggcgcgtatagcggtgaggaagatttgcggcggcgggagaggagttttggtttcggttgcgcgtaggacgacgtatcgttttcgttttcggagtttcgtttttcgtttatttttattatttttttagggtgttgcgttttttcgcggtagatttttttgttgtggtggaggtattagtgtaagaggcggaaggttcgggtgttcgtgcggtttattatttggtcgggatcgtttaatattttttgtatgaaggcggtgtttatagggtcgtattcgattaggtttacgttgttggttcgagagtcgtaagtgggtagggacggaggcgatttaggcgttaagttttattttttgttttagtatcggtttcgatttcggttttggttacgatttagaatagtatcgttgcgttt

SEQ ID NO: 19396 - DNA, 684 bp, Artificial Sequence
  chemically treated genomic DNA (Homo sapiens) CpG-island No: 19396
aaacgcaacgatactattctaaatcgtaaccaaaaccgaaatcgaaaccgatactaaaacaaaaaataaaacttaacgcctaaatcgcctccgtccctacccacttacgactctcgaaccaacaacgtaaacctaatcgaatacgaccctataaacaccgccttcatacaaaaaatattaaacgatcccgaccaaataataaaccgcacgaacacccgaaccttccgcctcttacactaatacctccaccacaacaaaaaaatctaccgcgaaaaaacgcaacaccctaaaaaaataataaaaataaacgaaaaacgaaactccgaaaacgaaaacgatacgtcgtcctacgcgcaaccgaaaccaaaactcctctcccgccgccgcaaatcttcctcaccgctatacgcgccccgaaaccgaccctacgctacttcacaaccaaacgcttcctacaccaactactaatacgcctaaacgacccctttaacttcgactacgccgccgccatacaccgaaacgtattcgccgacgatcccgcaaaaaccgaaactaaaaccgaaactaaaaccgaaaccgaaaacgaaaccgataaaataaaaaaccctaaactcaacgatcctctaaccgccccgcaaaaaaaactccgtcaaccactatctcccgcgccctcctttatctcct

SEQ ID NO: 19397 - DNA, 571 bp, Artificial Sequence
  chemically treated genomic DNA (Homo sapiens) CpG-island No: 19397
gcgcggggaggtcgtttttagggtaacgtggggagtcggtcggtcggatagtgcgcgtgtatatattatttgcggcggtgtgttgataagttaattgaggggattttattttataaaacgcgttttatgtcgtcgttattttattgtttaattcggggagggtaggtacggcggggagtagtttcgaaggaggttggcgttaggttaagcgtcgggttttgacggttggaatcgtggagtaaagtttttgggttgcgtatgcgcgatgtttcgttttgttttatttttcggtcgcggattggcgggcgcgggttacgtgggtacgttattcgttttttcgtcgtagggggttcgttcgttggttcgttttcggttcggtgggtataagatgacggagtcgggcgtttttttcgaggatttttgggttaaggtaagtttcgtgggcgcgtacgtcggcgaggggagggcgggtcgggttcgtgtacgtaggggggtcggaagacgaggggttttttttttgtttttaaagttttttacgtttttcgtgtttcggggttgtagagaagatagt

SEQ ID NO: 19398 - DNA, 571 bp, Artificial Sequence
  chemically treated genomic DNA (Homo sapiens) CpG-island No: 19398
actatcttctctacaaccccgaaacacgaaaaacgtaaaaaactttaaaaacaaaaaaaaaacccctcgtcttccgacccccctacgtacacgaacccgacccgccctcccctcgccgacgtacgcgcccacgaaacttaccttaacccaaaaatcctcgaaaaaaacgcccgactccgtcatcttatacccaccgaaccgaaaacgaaccaacgaacgaaccccctacgacgaaaaaacgaataacgtacccacgtaacccgcgcccgccaatccgcgaccgaaaaataaaacaaaacgaaacatcgcgcatacgcaacccaaaaactttactccacgattccaaccgtcaaaacccgacgcttaacctaacgccaacctccttcgaaactactccccgccgtacctaccctccccgaattaaacaataaaataacgacgacataaaacgcgttttataaaataaaatcccctcaattaacttatcaacacaccgccgcaaataatatatacacgcgcactatccgaccgaccgactccccacgttaccctaaaaacgacctccccgcgc

SEQ ID NO: 19399 - DNA, 571 bp, Artificial Sequence
  chemically treated genomic DNA (Homo sapiens) CpG-island No: 19399
gttgttttttttgtagtttcggggtacggagagcgtgggggattttggggataggagggaagtttttcgtttttcggtttttttacgtgtacgagttcgattcgtttttttttcgtcggcgtgcgcgtttacggggtttgttttgatttaagggttttcgggagaggcgttcggtttcgttattttgtatttatcggatcggaaacgggttagcgggcgggttttttgcggcgaggaagcgggtggcgtgtttacgtgattcgcgttcgttaattcgcgatcgagaggtggggtagggcgaagtatcgcgtatgcgtagtttaaagattttattttacggttttagtcgttaaggttcggcgtttggtttggcgttagtttttttcgagattgtttttcgtcgtgtttgtttttttcgggttaggtagtggaatggcggcgatatgaagcgcgttttgtaagatggagtttttttaattggtttgttagtatatcgtcgtagatagtgtgtgtacgcgtattgttcggtcggtcggttttttacgttattttgagggcggttttttcgcgt

SEQ ID NO: 19400 - DNA, 571 bp, Artificial Sequence
  chemically treated genomic DNA (Homo sapiens) CpG-island No: 19400
acgcgaaaaaaccgccctcaaaataacgtaaaaaaccgaccgaccgaacaatacgcgtacacacactatctacgacgatatactaacaaaccaattaaaaaaactccatcttacaaaacgcgcttcatatcgccgccattccactacctaacccgaaaaaaacaaacacgacgaaaaacaatctcgaaaaaaactaacgccaaaccaaacgccgaaccttaacgactaaaaccgtaaaataaaatctttaaactacgcatacgcgatacttcgccctaccccacctctcgatcgcgaattaacgaacgcgaatcacgtaaacacgccacccgcttcctcgccgcaaaaaacccgcccgctaacccgtttccgatccgataaatacaaaataacgaaaccgaacgcctctcccgaaaacccttaaatcaaaacaaaccccgtaaacgcgcacgccgacgaaaaaaaaacgaatcgaactcgtacacgtaaaaaaaccgaaaaacgaaaaacttccctcctatccccaaaatcccccacgctctccgtaccccgaaactacaaaaaaaacaac

SEQ ID NO: 19401 - DNA, 729 bp, Artificial Sequence
  chemically treated genomic DNA (Homo sapiens) CpG-island No: 19401
tattttgaatcggattaaattaaattaaattaaattaaattaaattagattagatattttttttcgcggaattttagagaggtcgaattgggataatcggatgtatttgattttttacgttattgagtgtatttttgtagaaatgggcgttttggttttcgcgaggtagtgcgatttgttatcgttttttagttttttcgttttttattaagttcgcgtacgttcggttcgcgcgtttgtttttcgattcggtatttcggtcggtttttagtagcgcgtatgcgcgcgtttttaggttatttgaagagagagggcggggtcgaggggttgagttcgcggggggagggaatagcgttgattacgtgacgtggttttagtgtttatattcgtagcgggtcgggggttcggttttagttaggcgtttagtttcgtttcggttttattttcggtggagggtcgtttttgagcgggcggcgggtcgacggcgagcgcgggcggcggcggtgacggaggcgtcgttgttagggggcgtgcggtagcgcggcggcggcggcggcggcggcggcggcggaggcggcggcggcggcggcggcggcggcggttgggtttcgagcgttcgtagtttatttttcgggggcgggttttcggcgttagtagggttgaagagaagatggaggagttggtggtggaagtgcggggttttaatggcgttttttataaggtatttgg

SEQ ID NO: 19402 - DNA, 729 bp, Artificial Sequence
  chemically treated genomic DNA (Homo sapiens) CpG-island No: 19402
ccaaataccttataaaaaacgccattaaaaccccgcacttccaccaccaactcctccatcttctcttcaaccctactaacgccgaaaacccgcccccgaaaaataaactacgaacgctcgaaacccaaccgccgccgccgccgccgccgccgccgcctccgccgccgccgccgccgccgccgccgccgcgctaccgcacgccccctaacaacgacgcctccgtcaccgccgccgcccgcgctcgccgtcgacccgccgcccgctcaaaaacgaccctccaccgaaaataaaaccgaaacgaaactaaacgcctaactaaaaccgaacccccgacccgctacgaatataaacactaaaaccacgtcacgtaatcaacgctattccctccccccgcgaactcaacccctcgaccccgccctctctcttcaaataacctaaaaacgcgcgcatacgcgctactaaaaaccgaccgaaataccgaatcgaaaaacaaacgcgcgaaccgaacgtacgcgaacttaataaaaaacgaaaaaactaaaaaacgataacaaatcgcactacctcgcgaaaaccaaaacgcccatttctacaaaaatacactcaataacgtaaaaaatcaaatacatccgattatcccaattcgacctctctaaaattccgcgaaaaaaaatatctaatctaatttaatttaatttaatttaatttaatttaatccgattcaaaata

SEQ ID NO: 19403 - DNA, 729 bp, Artificial Sequence
  chemically treated genomic DNA (Homo sapiens) CpG-island No: 19403
ttaagtattttgtagaaagcgttattggagtttcgtatttttattattagtttttttattttttttttagttttgttagcgtcgggagttcgttttcgagaggtgggttgcgggcgttcgaggtttagtcgtcgtcgtcgtcgtcgtcgtcgtcgttttcgtcgtcgtcgtcgtcgtcgtcgtcgtcgcgttgtcgtacgttttttggtagcggcgttttcgttatcgtcgtcgttcgcgttcgtcgtcggttcgtcgttcgtttagaggcggttttttatcggaagtgaaatcgaaacggagttgagcgtttgattgaggtcgaattttcggttcgttgcgggtgtaaatattgaaattacgttacgtgattaacgttgtttttttttttcgcgggtttagtttttcggtttcgttttttttttttaagtggtttgggagcgcgcgtatgcgcgttgttgggaatcggtcggggtgtcgggtcgaaagatagacgcgcgggtcgggcgtgcgcgggtttggtggagggcgggaaggttgaagggcggtgataggtcgtattgtttcgcgagggttagaacgtttatttttgtagaggtgtatttagtggcgtgggaaattaaatgtattcggttattttagttcggtttttttgggatttcgcgggagggggtgtttggtttggtttggtttggtttggtttggtttggtttggttcggtttaaagta

SEQ ID NO: 19404 - DNA, 729 bp, Artificial Sequence
  chemically treated genomic DNA (Homo sapiens) CpG-island No: 19404
tactttaaaccgaaccaaaccaaaccaaaccaaaccaaaccaaaccaaaccaaacaccccctcccgcgaaatcccaaaaaaaccgaactaaaataaccgaatacatttaatttcccacgccactaaatacacctctacaaaaataaacgttctaaccctcgcgaaacaatacgacctatcaccgcccttcaaccttcccgccctccaccaaacccgcgcacgcccgacccgcgcgtctatctttcgacccgacaccccgaccgattcccaacaacgcgcatacgcgcgctcccaaaccacttaaaaaaaaaaaacgaaaccgaaaaactaaacccgcgaaaaaaaaaaacaacgttaatcacgtaacgtaatttcaatatttacacccgcaacgaaccgaaaattcgacctcaatcaaacgctcaactccgtttcgatttcacttccgataaaaaaccgcctctaaacgaacgacgaaccgacgacgaacgcgaacgacgacgataacgaaaacgccgctaccaaaaaacgtacgacaacgcgacgacgacgacgacgacgacgacgacgaaaacgacgacgacgacgacgacgacgacgactaaacctcgaacgcccgcaacccacctctcgaaaacgaactcccgacgctaacaaaactaaaaaaaaaataaaaaaactaataataaaaatacgaaactccaataacgctttctacaaaatacttaa

SEQ ID NO: 19405 - DNA, 804 bp, Artificial Sequence
  chemically treated genomic DNA (Homo sapiens) CpG-island No: 19405
tcgtagttttcgttttgttattcgtttttattgattcgtattttttgcgtaggagtcgcgttgtgtttttggagtttacgcgttatagttcggtcgtggggttgtacgtcgtcgttacgttgcgtttcgagttttcggcggtcggtcgcgttttggtcgtttttagcgttcgtttttttgcgttgcgtcgttttagcgcgggtttttcgttgtttttgtttatttcggtacgttcgttttcggttagatttcgcgttttttatcggtagcgtttcgttttttcgcggggtttcgttcggtagcgttttatttttcgtagcgtttcgttttttcgtagcgtttcgttttttcgtagggtttcgtttcggtagcgtttcgttttttcgtagggtttcgtttcggtagcgtttcgttttttcgtagggtttcgtttcggtagcgtttttttcgtttttttgatcgcgttttttataggtgtgtttgttgttgttcgtcgtgtatttcgtcgtggtcgaggttcgtatttggtatagggaagggcgttggcgcgtgttgcggttcggagtttgggcgcggtggttgttggtggcgttgacggcggttacggtattggtacgtttcgtttagttgggtgtcgttgatcgttagtggattcgtttcgtgcgcggtcgttcgcgtcgttttattagtttcgattaggtggcgtagttgagtttcgtagttcgtggtttggcggtttcgttgttttttttgtttttggttaaggtgagggttgggtcggtgggcgcggggttgggcgtatat

SEQ ID NO: 19406 - DNA, 804 bp, Artificial Sequence
  chemically treated genomic DNA (Homo sapiens) CpG-island No: 19406
atatacgcccaaccccgcgcccaccgacccaaccctcaccttaaccaaaaacaaaaaaaacaacgaaaccgccaaaccacgaactacgaaactcaactacgccacctaatcgaaactaataaaacgacgcgaacgaccgcgcacgaaacgaatccactaacgatcaacgacacccaactaaacgaaacgtaccaataccgtaaccgccgtcaacgccaccaacaaccaccgcgcccaaactccgaaccgcaacacgcgccaacgcccttccctataccaaatacgaacctcgaccacgacgaaatacacgacgaacaacaacaaacacacctataaaaaacgcgatcaaaaaaacgaaaaaaacgctaccgaaacgaaaccctacgaaaaaacgaaacgctaccgaaacgaaaccctacgaaaaaacgaaacgctaccgaaacgaaaccctacgaaaaaacgaaacgctacgaaaaaacgaaacgctacgaaaaataaaacgctaccgaacgaaaccccgcgaaaaaacgaaacgctaccgataaaaaacgcgaaatctaaccgaaaacgaacgtaccgaaataaacaaaaacaacgaaaaacccgcgctaaaacgacgcaacgcaaaaaaacgaacgctaaaaacgaccaaaacgcgaccgaccgccgaaaactcgaaacgcaacgtaacgacgacgtacaaccccacgaccgaactataacgcgtaaactccaaaaacacaacgcgactcctacgcaaaaaatacgaatcaataaaaacgaataacaaaacgaaaactacga

SEQ ID NO: 19407 - DNA, 804 bp, Artificial Sequence
  chemically treated genomic DNA (Homo sapiens) CpG-island No: 19407
gtgtgcgtttagtttcgcgtttatcggtttagtttttattttgattaaaagtaggaagagtagcgaggtcgttaggttacgggttgcggagtttagttgcgttatttggtcgaagttagtgaagcggcgcgggcggtcgcgtacgaaacgggtttattggcggttagcggtatttagttgggcgaggcgtattagtgtcgtggtcgtcgttagcgttattagtagttatcgcgtttaggtttcgagtcgtagtacgcgttagcgtttttttttgtgttaagtacgggtttcggttacggcgaagtgtacggcgaatagtagtaggtatatttgtggggggcgcggttaggagggcgggagggacgttgtcggggcggggttttgcgagggggcgggacgttgtcggggcggggttttacgagggggcgggacgttgtcggggcggggttttgcgagggggcgggacgttgcgagggggcggggcgttgcgaggggtgagacgttgtcgggcggggtttcgcgagggggcgggacgttgtcggtgggaggcgcggggtttggtcggggacgggcgtatcgaggtgagtagaggtagcgagaggttcgcgttgaggcggcgtagcgtaaaggggcggacgttgagggcggttagggcgcggtcggtcgtcgggaattcgaggcgtagcgtgacggcggcgtgtagttttacggtcgggttgtagcgcgtgagttttaggaatatagcgcggtttttgcgtagagggtgcgggttagtaggagcgggtggtagggcgggagttgcgg

SEQ ID NO: 19408 - DNA, 804 bp, Artificial Sequence
  chemically treated genomic DNA (Homo sapiens) CpG-island No: 19408
ccgcaactcccgccctaccacccgctcctactaacccgcaccctctacgcaaaaaccgcgctatattcctaaaactcacgcgctacaacccgaccgtaaaactacacgccgccgtcacgctacgcctcgaattcccgacgaccgaccgcgccctaaccgccctcaacgtccgcccctttacgctacgccgcctcaacgcgaacctctcgctacctctactcacctcgatacgcccgtccccgaccaaaccccgcgcctcccaccgacaacgtcccgccccctcgcgaaaccccgcccgacaacgtctcacccctcgcaacgccccgccccctcgcaacgtcccgccccctcgcaaaaccccgccccgacaacgtcccgccccctcgtaaaaccccgccccgacaacgtcccgccccctcgcaaaaccccgccccgacaacgtccctcccgccctcctaaccgcgccccccacaaatatacctactactattcgccgtacacttcgccgtaaccgaaacccgtacttaacacaaaaaaaaacgctaacgcgtactacgactcgaaacctaaacgcgataactactaataacgctaacgacgaccacgacactaatacgcctcgcccaactaaataccgctaaccgccaataaacccgtttcgtacgcgaccgcccgcgccgcttcactaacttcgaccaaataacgcaactaaactccgcaacccgtaacctaacgacctcgctactcttcctacttttaatcaaaataaaaactaaaccgataaacgcgaaactaaacgcacac

SEQ ID NO: 19409 - DNA, 1264 bp, Artificial Sequence
  chemically treated genomic DNA (Homo sapiens) CpG-island No: 19409
gagggatgcgggagggggagggggaggggggtcggtcggtcgtgggggtggggcgatagtgatattatttcggagtcggtttttaagcggcggtcggtcggggacggggaagagagggatagtcggagcgaggtggcgagtcgttgagttcgtcgcggtttcgagagcggttgtagtcgtcgtcgtcgggaaggagagggcgaggcgcgttcgagtcgtcgtcgtcgtcgttatcgtcgtcgtcgttattatcgttatcggagtcgcgggttagtcgggtagttttcgcgggtttcggtcggggcggggggcgcgggttataggtttttgtttcggtcgtcgtttgtagatcgcgggcgtcgatgtcgttcgcgtttcgttaggatgagtttcgggtcgggcgaggagtcgtcgtagtcgtcgtcgttcgagtcgcgggtaggagtttcgggagtcgtcgtcgtcgtcgtcgtcgttcggtcgggtttcgacgtcgttcgcgcgttttcgggttttcgatatatatgagattttttaggtttatttttaagtgtttcgtggattgtttttgattgcgtcgttcgcgtttcgtatttcgtcgttcgttcgtcgtttcgtttttcggttcggtcgtttttcggttttcggtcggttcgcgttttcggggtttttttcggtgtcgtcggtgtttttcgtttgatcgtcgtttttcgtgaggcgtcgcgatttcggttcggtcgtgcggttcgtcggggttatggcgaagaagagcgtcgagaacggtatttatagcgtgttcggcgacgagaagaagggtttttttatcgcgttcgggttcgacggggtttcggttaagggcgacggtttcgtgggtttggggatattcggcggtcgtttggtcgtgtcgtcgcgcgagatttggacgcgttagatggattttattatgtcgtgcgtgggtttcgtcgtgggtttgggtaacgtgtggcgttttttttatttgtgttataagaacggcggaggtgagttttttcgttcgtcgcggtttttttttttagtaggtcgtcggttttcgttcgattttcggagtcgtcgcggaggggtgaagttcgggtaacgggtggttttcgggtacgcgggggtcggggtcgtttttcgttcgtcgttgtcgttcggtggtcgggtcgggcgtttttatttttttcgtagttatgtgtttggtatggtggggggagggggtcggcgatgttcgcgaggttgtttttta

SEQ ID NO: 19410 - DNA, 1264 bp, Artificial Sequence
  chemically treated genomic DNA (Homo sapiens) CpG-island No: 19410
taaaaaacaacctcgcgaacatcgccgaccccctccccccaccataccaaacacataactacgaaaaaaataaaaacgcccgacccgaccaccgaacgacaacgacgaacgaaaaacgaccccgacccccgcgtacccgaaaaccacccgttacccgaacttcacccctccgcgacgactccgaaaatcgaacgaaaaccgacgacctactaaaaaaaaaaaccgcgacgaacgaaaaaactcacctccgccgttcttataacacaaataaaaaaaacgccacacgttacccaaacccacgacgaaacccacgcacgacataataaaatccatctaacgcgtccaaatctcgcgcgacgacacgaccaaacgaccgccgaatatccccaaacccacgaaaccgtcgcccttaaccgaaaccccgtcgaacccgaacgcgataaaaaaacccttcttctcgtcgccgaacacgctataaataccgttctcgacgctcttcttcgccataaccccgacgaaccgcacgaccgaaccgaaatcgcgacgcctcacgaaaaacgacgatcaaacgaaaaacaccgacgacaccgaaaaaaaccccgaaaacgcgaaccgaccgaaaaccgaaaaacgaccgaaccgaaaaacgaaacgacgaacgaacgacgaaatacgaaacgcgaacgacgcaatcaaaaacaatccacgaaacacttaaaaataaacctaaaaaatctcatatatatcgaaaacccgaaaacgcgcgaacgacgtcgaaacccgaccgaacgacgacgacgacgacgacgactcccgaaactcctacccgcgactcgaacgacgacgactacgacgactcctcgcccgacccgaaactcatcctaacgaaacgcgaacgacatcgacgcccgcgatctacaaacgacgaccgaaacaaaaacctataacccgcgccccccgccccgaccgaaacccgcgaaaactacccgactaacccgcgactccgataacgataataacgacgacgacgataacgacgacgacgacgactcgaacgcgcctcgccctctccttcccgacgacgacgactacaaccgctctcgaaaccgcgacgaactcaacgactcgccacctcgctccgactatccctctcttccccgtccccgaccgaccgccgcttaaaaaccgactccgaaataatatcactatcgccccacccccacgaccgaccgacccccctccccctccccctcccgcatccctc

SEQ ID NO: 19411 - DNA, 1264 bp, Artificial Sequence
  chemically treated genomic DNA (Homo sapiens) CpG-island No: 19411
tggggggtagtttcgcgggtatcgtcggttttttttttttattatgttaggtatatgattgcgaggggggtggaggcgttcggttcggttatcgagcggtagcggcggacgaggggcggtttcgattttcgcgtgttcgggggttattcgttgttcggattttattttttcgcggcggtttcgggggtcgggcgggggtcggcggtttgttgggggaggaggtcgcggcgggcgggggaatttattttcgtcgtttttgtagtataggtaggggaagcgttatacgttgtttaagtttacggcgaagtttacgtacgatatgatgaagtttatttggcgcgtttaggtttcgcgcggcggtacggttaggcggtcgtcgggtgtttttaggtttacggggtcgtcgtttttggtcggggtttcgtcgggttcgggcgcgatgagggggttttttttttcgtcgtcggatacgttatagatgtcgttttcggcgttttttttcgttatggtttcggcgggtcgtacggtcgggtcggggtcgcggcgttttacggggggcggcggttaggcggggggtatcggcggtatcggggagggtttcgagggcgcgggtcggtcgggggtcggggggcggtcgggtcgggggacggggcggcgggcggacggcggggtgcggggcgcgggcggcgtagttagaagtagtttacgaagtatttgaaagtgagtttgaagaattttatgtgtgtcgggggttcgggggcgcgcgggcggcgtcggggttcggtcgggcggcggcggcggcggcggcggttttcgaggtttttgttcgcggttcgggcggcggcggttgcggcggtttttcgttcgattcgagatttattttaacggggcgcgggcgatatcggcgttcgcggtttgtaaacgacggtcggagtaggggtttgtggttcgcgtttttcgtttcggtcggggttcgcggaggttgttcggttggttcgcgatttcggtggcggtggtggcggcggcggcggtggcggcggcggcggcggttcgggcgcgtttcgttttttttttttcggcggcggcggttgtagtcgttttcggggtcgcggcgggtttagcgattcgttatttcgtttcgattatttttttttttttcgttttcggtcggtcgtcgtttaaaaatcgatttcggggtgatgttattatcgttttatttttacggtcggtcggtttttttttttttttttttttcgtatttttt

SEQ ID NO: 19412 - DNA, 1264 bp, Artificial Sequence
  chemically treated genomic DNA (Homo sapiens) CpG-island No: 19412
aaaaaatacgaaaaaaaaaaaaaaaaaaaaaccgaccgaccgtaaaaataaaacgataataacatcaccccgaaatcgatttttaaacgacgaccgaccgaaaacgaaaaaaaaaaaaataatcgaaacgaaataacgaatcgctaaacccgccgcgaccccgaaaacgactacaaccgccgccgccgaaaaaaaaaaaacgaaacgcgcccgaaccgccgccgccgccgccaccgccgccgccgccaccaccgccaccgaaatcgcgaaccaaccgaacaacctccgcgaaccccgaccgaaacgaaaaacgcgaaccacaaacccctactccgaccgtcgtttacaaaccgcgaacgccgatatcgcccgcgccccgttaaaataaatctcgaatcgaacgaaaaaccgccgcaaccgccgccgcccgaaccgcgaacaaaaacctcgaaaaccgccgccgccgccgccgccgcccgaccgaaccccgacgccgcccgcgcgcccccgaacccccgacacacataaaattcttcaaactcactttcaaatacttcgtaaactacttctaactacgccgcccgcgccccgcaccccgccgtccgcccgccgccccgtcccccgacccgaccgccccccgacccccgaccgacccgcgccctcgaaaccctccccgataccgccgataccccccgcctaaccgccgccccccgtaaaacgccgcgaccccgacccgaccgtacgacccgccgaaaccataacgaaaaaaaacgccgaaaacgacatctataacgtatccgacgacgaaaaaaaaaaccccctcatcgcgcccgaacccgacgaaaccccgaccaaaaacgacgaccccgtaaacctaaaaacacccgacgaccgcctaaccgtaccgccgcgcgaaacctaaacgcgccaaataaacttcatcatatcgtacgtaaacttcgccgtaaacttaaacaacgtataacgcttcccctacctatactacaaaaacgacgaaaataaattcccccgcccgccgcgacctcctcccccaacaaaccgccgacccccgcccgacccccgaaaccgccgcgaaaaaataaaatccgaacaacgaataacccccgaacacgcgaaaatcgaaaccgcccctcgtccgccgctaccgctcgataaccgaaccgaacgcctccacccccctcgcaatcatatacctaacataataaaaaaaaaaaaccgacgatacccgcgaaactacccccca

SEQ ID NO: 19413 - DNA, 963 bp, Artificial Sequence
  chemically treated genomic DNA (Homo sapiens) CpG-island No: 19413
cggttagtcgtgggggtggggcgatagtgatattatttcggagtcggtttttaagcggttgtcggtcgggaatcgggaagagaggaatagtcggaacgcggtggcgagtcgttgagttcgtcgcggtttcgagagcggttgtagtcgtcgtcgtttagaaggagagggcgaggcgcgtttgagtcgtcgtcgtcgttatcggagtttcgggtgagtcgggtagtcgtcgcgggtttcggtcggggtcgggggcgcgggttataggtttttgttttagtcgtcgtttgtagattgcgagcgtcgatatcgttcgtgtttcgttaggttgagtttcgggtcggtcgaggagtcgtggtagtcgttatcgttcgagtcgcgggtaagagttttcggaatcgttgtcgcggacgtttggtcgggtttcgtcgacgttcgcgcgttttcgggtttttgatatataggagattttttaggtttatttttaagtgtttcgtggattgtttttgattgcgtcgtttgtgattcgtatttcgtcgttttttcgtcgtttcgtttttcggttcggtcgtttttcggttttcggtcggttcgcgttttcggggtttttttcggtgtcgtcggtgtttcgcgtttgatcgtagtttttcgtagggtgtcgcgattttagttcggtcgtgaggttcgtaggggttatggcgaagaagagcgtcgagaacggtatttgtagcgtgttcggcgattagaagaagggtttttttatcgcgttcgggttcgacggggttcgggttaagggcgacggtttcgcgggtttggggatattcggcggcggtttggtcgtgtcgtcgcgcgcgatagatttggacgcgttagatggattttattatgtcgtgtgtgggttttatcgtgggtttgggtaacgtgtggcgttttttttatttgtgttataagaatggcggaggtgag

SEQ ID NO: 19414 - DNA, 963 bp, Artificial Sequence
  chemically treated genomic DNA (Homo sapiens) CpG-island No: 19414
ctcacctccgccattcttataacacaaataaaaaaaacgccacacgttacccaaacccacgataaaacccacacacgacataataaaatccatctaacgcgtccaaatctatcgcgcgcgacgacacgaccaaaccgccgccgaatatccccaaacccgcgaaaccgtcgcccttaacccgaaccccgtcgaacccgaacgcgataaaaaaacccttcttctaatcgccgaacacgctacaaataccgttctcgacgctcttcttcgccataacccctacgaacctcacgaccgaactaaaatcgcgacaccctacgaaaaactacgatcaaacgcgaaacaccgacgacaccgaaaaaaaccccgaaaacgcgaaccgaccgaaaaccgaaaaacgaccgaaccgaaaaacgaaacgacgaaaaaacgacgaaatacgaatcacaaacgacgcaatcaaaaacaatccacgaaacacttaaaaataaacctaaaaaatctcctatatatcaaaaacccgaaaacgcgcgaacgtcgacgaaacccgaccaaacgtccgcgacaacgattccgaaaactcttacccgcgactcgaacgataacgactaccacgactcctcgaccgacccgaaactcaacctaacgaaacacgaacgatatcgacgctcgcaatctacaaacgacgactaaaacaaaaacctataacccgcgcccccgaccccgaccgaaacccgcgacgactacccgactcacccgaaactccgataacgacgacgacgactcaaacgcgcctcgccctctccttctaaacgacgacgactacaaccgctctcgaaaccgcgacgaactcaacgactcgccaccgcgttccgactattcctctcttcccgattcccgaccgacaaccgcttaaaaaccgactccgaaataatatcactatcgccccacccccacgactaaccg

SEQ ID NO: 19415 - DNA, 963 bp, Artificial Sequence
  chemically treated genomic DNA (Homo sapiens) CpG-island No: 19415
tttattttcgttatttttgtagtataggtaggggaagcgttatacgttgtttaggtttacggtgaagtttatatacgatatgatgaagtttatttggcgcgtttaggtttatcgcgcgcggcggtacggttaggtcgtcgtcgggtgtttttaggttcgcggggtcgtcgtttttggttcgggtttcgtcgggttcgggcgcgatgaggggattttttttttggtcgtcggatacgttatagatgtcgttttcggcgttttttttcgttatggtttttgcgggttttacggtcgggttggggtcgcggtattttgcggggggttgcggttaggcgcggggtatcggcggtatcggggagggtttcgagggcgcggatcggtcgggggtcggggggcggtcgggtcgggggacggggcggcgggagagcggcggggtgcgggttataggcggcgtagttagaagtagtttacgaagtatttgaaagtgagtttgaagaattttttgtgtgttaggggttcgggggcgcgcgggcgtcggcggggttcggttaggcgttcgcggtagcggtttcggaggtttttgttcgcggttcgggcggtggcggttgttacggtttttcggtcgattcgaggtttagtttagcggggtacgggcgatatcggcgttcgtagtttgtaagcggcggttggagtaggggtttgtggttcgcgttttcggtttcggtcggggttcgcggcggttgttcggtttattcgagatttcggtggcggcggcggcggtttaggcgcgtttcgttttttttttttgggcggcggcggttgtagtcgttttcggggtcgcggcgggtttagcgattcgttatcgcgtttcgattgttttttttttttcggttttcggtcggtagtcgtttaaaaatcgatttcggggtgatgttattatcgttttatttttacggttggtcg

SEQ ID NO: 19416 - DNA, 963 bp, Artificial Sequence
  chemically treated genomic DNA (Homo sapiens) CpG-island No: 19416
cgaccaaccgtaaaaataaaacgataataacatcaccccgaaatcgatttttaaacgactaccgaccgaaaaccgaaaaaaaaaaaacaatcgaaacgcgataacgaatcgctaaacccgccgcgaccccgaaaacgactacaaccgccgccgcccaaaaaaaaaaaacgaaacgcgcctaaaccgccgccgccgccaccgaaatctcgaataaaccgaacaaccgccgcgaaccccgaccgaaaccgaaaacgcgaaccacaaacccctactccaaccgccgcttacaaactacgaacgccgatatcgcccgtaccccgctaaactaaacctcgaatcgaccgaaaaaccgtaacaaccgccaccgcccgaaccgcgaacaaaaacctccgaaaccgctaccgcgaacgcctaaccgaaccccgccgacgcccgcgcgcccccgaacccctaacacacaaaaaattcttcaaactcactttcaaatacttcgtaaactacttctaactacgccgcctataacccgcaccccgccgctctcccgccgccccgtcccccgacccgaccgccccccgacccccgaccgatccgcgccctcgaaaccctccccgataccgccgataccccgcgcctaaccgcaaccccccgcaaaataccgcgaccccaacccgaccgtaaaacccgcaaaaaccataacgaaaaaaaacgccgaaaacgacatctataacgtatccgacgaccaaaaaaaaaatcccctcatcgcgcccgaacccgacgaaacccgaaccaaaaacgacgaccccgcgaacctaaaaacacccgacgacgacctaaccgtaccgccgcgcgcgataaacctaaacgcgccaaataaacttcatcatatcgtatataaacttcaccgtaaacctaaacaacgtataacgcttcccctacctatactacaaaaataacgaaaataaa

SEQ ID NO: 19417 - DNA, 1413 bp, Artificial Sequence
  chemically treated genomic DNA (Homo sapiens) CpG-island No: 19417
cggtttcgcgagcgtggatcgtttcgtggttatgagcgggaagaattacgggttttcgttaggggttgggatggatttcgcgggcgggaggcggagggtattcggtttattttagcggaggatatcgcgtgggttcgttgagataacgtttcgcggtgatggattttatgattttcggagtagagttttggttgcgttgtatcgcgggagggaggggttgcgtttattgcggggttacgagagggaggggtcggggtcggggtcggggtcggggtcggggtcggggtcggggtcggggtcggggcgggataggaattcgcgtaagcgcggaaatgtttacggtcgcgttttttcgcgcgtatcgcggcgatattcgggtcgttttcggaaggtacggacgtcgcgtcgcgttttcggggcgttttatttgcgtttacggtcgacgtttcggtagcggcgggtaggtgttacgatttttggacgtttgtcgttttttttcgggaatggaacgtttagagaagcgtaggtttatatttaaaatataaggcggtattgttgcgtgtgtatcggcgattttgcggttagcgttttgggtttcgtttcgggaacgtttaggagtttgagagcgtcgcgttatattcggtagggtcgtagcggcgcgtacgcgacggggtgtcgtttattgggtagtaggagcgttagttaagggcgaggggcgggaatttcgtgtaatttgagtatggttattggcgaggataggcgaagaggaggacggataggcggggttgggcggggtttttcgtgggcgtttggagtttattaggagcgatcgaagcggaggcggggagcgaggtagttgtgggtttcggcgggcggagattagggttgtttttttacgtttcgttttcgtttcggtatcgtttttcgcgtttgtaagttttgggtcggttttgcggggtatgcgtcgagttttttttttttgtagatcggtggttattgttttttttcggggacgaggcggataggcgtcgtttgagattagggttcgggaagtttcgtgagtcgttttcgtttcggcgtcgtcgaggggtcgtttcgttttttttattttattgtgttgcgaaagtgtttcggggcgcgtttggggggtcgtggggaagtagggtcgcgtttattcggtagcgtttagggagaggtgggtagagcggggcgggcggtcgttttgggggaagtggcgtttggaggtgtttgtgtattatttcgcggtggcgcgcggtggggtaataaagtttttttcgttttttgatagcggcggtcgtcggggagggaattttgttttgttgcgggcggtcgtgggttggggcgttttttggtttgattgttttttgggggaggtaggaaaggcgagtttcg

SEQ ID NO: 19418 - DNA, 1413 bp, Artificial Sequence
  chemically treated genomic DNA (Homo sapiens) CpG-island No: 19418
cgaaactcgcctttcctacctcccccaaaaaacaatcaaaccaaaaaacgccccaacccacgaccgcccgcaacaaaacaaaattccctccccgacgaccgccgctatcaaaaaacgaaaaaaactttattaccccaccgcgcgccaccgcgaaataatacacaaacacctccaaacgccacttcccccaaaacgaccgcccgccccgctctacccacctctccctaaacgctaccgaataaacgcgaccctacttccccacgaccccccaaacgcgccccgaaacactttcgcaacacaataaaataaaaaaaacgaaacgacccctcgacgacgccgaaacgaaaacgactcacgaaacttcccgaaccctaatctcaaacgacgcctatccgcctcgtccccgaaaaaaaacaataaccaccgatctacaaaaaaaaaaaactcgacgcataccccgcaaaaccgacccaaaacttacaaacgcgaaaaacgataccgaaacgaaaacgaaacgtaaaaaaacaaccctaatctccgcccgccgaaacccacaactacctcgctccccgcctccgcttcgatcgctcctaataaactccaaacgcccacgaaaaaccccgcccaaccccgcctatccgtcctcctcttcgcctatcctcgccaataaccatactcaaattacacgaaattcccgcccctcgcccttaactaacgctcctactacccaataaacgacaccccgtcgcgtacgcgccgctacgaccctaccgaatataacgcgacgctctcaaactcctaaacgttcccgaaacgaaacccaaaacgctaaccgcaaaatcgccgatacacacgcaacaataccgccttatattttaaatataaacctacgcttctctaaacgttccattcccgaaaaaaaacgacaaacgtccaaaaatcgtaacacctacccgccgctaccgaaacgtcgaccgtaaacgcaaataaaacgccccgaaaacgcgacgcgacgtccgtaccttccgaaaacgacccgaatatcgccgcgatacgcgcgaaaaaacgcgaccgtaaacatttccgcgcttacgcgaattcctatcccgccccgaccccgaccccgaccccgaccccgaccccgaccccgaccccgaccccgacccctccctctcgtaaccccgcaataaacgcaacccctccctcccgcgatacaacgcaaccaaaactctactccgaaaatcataaaatccatcaccgcgaaacgttatctcaacgaacccacgcgatatcctccgctaaaataaaccgaataccctccgcctcccgcccgcgaaatccatcccaacccctaacgaaaacccgtaattcttcccgctcataaccacgaaacgatccacgctcgcgaaaccg

SEQ ID NO: 19419 - DNA, 1413 bp, Artificial Sequence
  chemically treated genomic DNA (Homo sapiens) CpG-island No: 19419
cggggttcgttttttttattttttttaggagatagttaggttaggaagcgttttagtttacgatcgttcgtagtagagtaggatttttttttcggcggtcgtcgttgttaagggacggggaagattttgttattttatcgcgcgttatcgcggaatggtgtatagatatttttagacgttattttttttaagacggtcgttcgtttcgttttgtttatttttttttggacgttgtcgggtgggcgcggttttgtttttttacgattttttagacgcgtttcgaggtattttcgtagtatagtggagtgggaagggcggggcggtttttcgacggcgtcgaggcgagagcggtttacggggtttttcgggttttgattttaggcgacgtttgttcgtttcgttttcgggggaagatagtgattatcggtttgtaaaggaaggggattcggcgtatgtttcgtagggtcggtttaggatttgtaggcgcggaaggcggtgtcgaggcgggggcggggcgtggagggatagttttagttttcgttcgtcggggtttatagttgtttcgtttttcgttttcgtttcggtcgtttttggtaagttttaggcgtttacgggaagtttcgtttagtttcgtttattcgttttttttttcgtttgttttcgttaatgattatgtttagattgtacggaattttcgtttttcgtttttgattgacgtttttgttgtttagtggacgatatttcgtcgcgtgcgcgtcgttgcggttttgtcgggtgtggcgcggcgtttttaggtttttaggcgttttcggggcgagatttagggcgttggtcgtagagtcgtcggtgtatacgtaatagtgtcgttttgtgttttgggtgtggatttgcgtttttttaagcgttttattttcgagaaggggcgataaacgtttagaggtcgtggtatttgttcgtcgttgtcggggcgtcggtcgtgggcgtaagtgaagcgtttcgggagcgcggcgcgacgttcgtgtttttcgagggcggttcgggtgtcgtcgcggtgcgcgcgggagggcgcggtcgtgggtattttcgcgtttgcgcgggtttttgtttcgtttcggtttcggtttcggtttcggtttcggtttcggtttcggtttcggtttcggtttttttttttcgtggtttcgtagtagacgtagtttttttttttcgcggtgtagcgtagttagggttttgtttcgggagttatggagtttattatcgcggagcgttattttagcggatttacgcggtgtttttcgttggggtgggtcgagtatttttcgtttttcgttcgcgagatttattttagtttttggcgggggttcgtggtttttttcgtttatggttacggaacggtttacgttcgcggagtcg

SEQ ID NO: 19420 - DNA, 1413 bp, Artificial Sequence
  chemically treated genomic DNA (Homo sapiens) CpG-island No: 19420
cgactccgcgaacgtaaaccgttccgtaaccataaacgaaaaaaaccacgaacccccgccaaaaactaaaataaatctcgcgaacgaaaaacgaaaaatactcgacccaccccaacgaaaaacaccgcgtaaatccgctaaaataacgctccgcgataataaactccataactcccgaaacaaaaccctaactacgctacaccgcgaaaaaaaaaaactacgtctactacgaaaccacgaaaaaaaaaaaccgaaaccgaaaccgaaaccgaaaccgaaaccgaaaccgaaaccgaaaccgaaacgaaacaaaaacccgcgcaaacgcgaaaatacccacgaccgcgccctcccgcgcgcaccgcgacgacacccgaaccgccctcgaaaaacacgaacgtcgcgccgcgctcccgaaacgcttcacttacgcccacgaccgacgccccgacaacgacgaacaaataccacgacctctaaacgtttatcgccccttctcgaaaataaaacgcttaaaaaaacgcaaatccacacccaaaacacaaaacgacactattacgtatacaccgacgactctacgaccaacgccctaaatctcgccccgaaaacgcctaaaaacctaaaaacgccgcgccacacccgacaaaaccgcaacgacgcgcacgcgacgaaatatcgtccactaaacaacaaaaacgtcaatcaaaaacgaaaaacgaaaattccgtacaatctaaacataatcattaacgaaaacaaacgaaaaaaaaaacgaataaacgaaactaaacgaaacttcccgtaaacgcctaaaacttaccaaaaacgaccgaaacgaaaacgaaaaacgaaacaactataaaccccgacgaacgaaaactaaaactatccctccacgccccgcccccgcctcgacaccgccttccgcgcctacaaatcctaaaccgaccctacgaaacatacgccgaatccccttcctttacaaaccgataatcactatcttcccccgaaaacgaaacgaacaaacgtcgcctaaaatcaaaacccgaaaaaccccgtaaaccgctctcgcctcgacgccgtcgaaaaaccgccccgcccttcccactccactatactacgaaaatacctcgaaacgcgtctaaaaaatcgtaaaaaaacaaaaccgcgcccacccgacaacgtccaaaaaaaaataaacaaaacgaaacgaacgaccgtcttaaaaaaaataacgtctaaaaatatctatacaccattccgcgataacgcgcgataaaataacaaaatcttccccgtcccttaacaacgacgaccgccgaaaaaaaaatcctactctactacgaacgatcgtaaactaaaacgcttcctaacctaactatctcctaaaaaaaataaaaaaaacgaaccccg

SEQ ID NO: 19421 - DNA, 894 bp, Artificial Sequence
  chemically treated genomic DNA (Homo sapiens) CpG-island No: 19421
cggaggcgcggttgcggaggatgtgagtttagtttgggcgtcggttagtcggggcgtagcgggcgggggcgcgtacggttcgtacgttcggtcggttagttagttagttcgcgcgtttttgttttgtaggttcgcgtggagtagagtagtcggaggtttcgggagttgcgttgcggttcggaagggggtggtttggaggggttcgttcggggagatggaaggacgtacggagttttcgttttcgttcgttcggcgtttcggggcgttttttatcgatggatattagtttgatgttttcgcggtttaggaattcgagcgttatcgatacgtttttaagttgtatttggcggaaagtgggtcgttggttgtgtttgcggtgtatttttttttggttgagtatttttaatagcgcgataagtcgtagttcgtcgtttaggttcgtttgtaggttggcgatgcgtttgtttacgtattttaggtgttcgttgtattagcgcgtgaaagtgttttgttggatttttttttacggcgcgtttttcgttaggtttttttcggtggtcggtatttcggcgtttcgcgtgtcgacgtcgtcgttcggagtcgcgtttgttgcgttttggttcgttcgagagtgggagttatttattttgaggcgcgagaagtcgggggggcggtgttgtagtttcggcgaggggacggttttttaattaaagtcgtaggtatttaggcgcgcgggaggcgaggtagggagtagaggttgcgttgcggagagagcgagttttttaaatgcgggaggagggcggggttagagggcgggttttttgcggggaggggtcgtggggtggggtttcgagggcgcgtttgttttatttcgtttcgttcgttggaatgttt

SEQ ID NO: 19422 - DNA, 894 bp, Artificial Sequence
  chemically treated genomic DNA (Homo sapiens) CpG-island No: 19422
aaacattccaacgaacgaaacgaaataaaacaaacgcgccctcgaaaccccaccccacgacccctccccgcaaaaaacccgccctctaaccccgccctcctcccgcatttaaaaaactcgctctctccgcaacgcaacctctactccctacctcgcctcccgcgcgcctaaatacctacgactttaattaaaaaaccgtcccctcgccgaaactacaacaccgcccccccgacttctcgcgcctcaaaataaataactcccactctcgaacgaaccaaaacgcaacaaacgcgactccgaacgacgacgtcgacacgcgaaacgccgaaataccgaccaccgaaaaaaacctaacgaaaaacgcgccgtaaaaaaaaatccaacaaaacactttcacgcgctaatacaacgaacacctaaaatacgtaaacaaacgcatcgccaacctacaaacgaacctaaacgacgaactacgacttatcgcgctattaaaaatactcaaccaaaaaaaaatacaccgcaaacacaaccaacgacccactttccgccaaatacaacttaaaaacgtatcgataacgctcgaattcctaaaccgcgaaaacatcaaactaatatccatcgataaaaaacgccccgaaacgccgaacgaacgaaaacgaaaactccgtacgtccttccatctccccgaacgaacccctccaaaccacccccttccgaaccgcaacgcaactcccgaaacctccgactactctactccacgcgaacctacaaaacaaaaacgcgcgaactaactaactaaccgaccgaacgtacgaaccgtacgcgcccccgcccgctacgccccgactaaccgacgcccaaactaaactcacatcctccgcaaccgcgcctccg

SEQ ID NO: 19423 - DNA, 894 bp, Artificial Sequence
  chemically treated genomic DNA (Homo sapiens) CpG-island No: 19423
gggtattttaacgggcggggcggggtggggtaggcgcgttttcgaagttttattttacggttttttttcgtaggaggttcgttttttggtttcgtttttttttcgtatttaaagggttcgtttttttcgtagcgtaatttttgttttttgtttcgtttttcgcgcgtttaggtgtttgcgattttaattaaagggtcgttttttcgtcgaggttgtagtatcgttttttcggtttttcgcgttttaaaatgagtagtttttattttcgggcgggttagagcgtagtaggcgcggtttcgggcggcggcgtcgatacgcgggacgtcgagatgtcggttatcgagaaggatttggcggaggacgcgtcgtggaagaagatttagtagaatatttttacgcgttggtgtaacgagtatttgaagtgcgtgagtaagcgtatcgttaatttgtagacggatttgagcgacgggttgcggtttatcgcgttgttggaggtgtttagttagaagaagatgtatcgtaagtataattagcggtttatttttcgttaaatgtagtttgagaacgtgtcggtggcgttcgagtttttggatcgcgagagtattaaattggtgtttatcggtgagggacgtttcgaagcgtcgggcgggcgggggcggggatttcgtgcgtttttttattttttcgggcggatttttttaaattattttttttcgggtcgtagcgtaattttcgaggttttcggttgttttgttttacgcgggtttgtagaataaaggcgcgcgggttggttggttggtcggtcgggcgtgcgaatcgtacgcgttttcgttcgttgcgtttcggttggtcggcgtttaggttgaatttatatttttcgtagtcgcgttttcg

SEQ ID NO: 19424 - DNA, 894 bp, Artificial Sequence
  chemically treated genomic DNA (Homo sapiens) CpG-island No: 19424
cgaaaacgcgactacgaaaaatataaattcaacctaaacgccgaccaaccgaaacgcaacgaacgaaaacgcgtacgattcgcacgcccgaccgaccaaccaaccaacccgcgcgcctttattctacaaacccgcgtaaaacaaaacaaccgaaaacctcgaaaattacgctacgacccgaaaaaaaataatttaaaaaaatccgcccgaaaaaataaaaaaacgcacgaaatccccgcccccgcccgcccgacgcttcgaaacgtccctcaccgataaacaccaatttaatactctcgcgatccaaaaactcgaacgccaccgacacgttctcaaactacatttaacgaaaaataaaccgctaattatacttacgatacatcttcttctaactaaacacctccaacaacgcgataaaccgcaacccgtcgctcaaatccgtctacaaattaacgatacgcttactcacgcacttcaaatactcgttacaccaacgcgtaaaaatattctactaaatcttcttccacgacgcgtcctccgccaaatccttctcgataaccgacatctcgacgtcccgcgtatcgacgccgccgcccgaaaccgcgcctactacgctctaacccgcccgaaaataaaaactactcattttaaaacgcgaaaaaccgaaaaaacgatactacaacctcgacgaaaaaacgaccctttaattaaaatcgcaaacacctaaacgcgcgaaaaacgaaacaaaaaacaaaaattacgctacgaaaaaaacgaaccctttaaatacgaaaaaaaaacgaaaccaaaaaacgaacctcctacgaaaaaaaaccgtaaaataaaacttcgaaaacgcgcctaccccaccccgccccgcccgttaaaataccc

SEQ ID NO: 19425 - DNA, 520 bp, Artificial Sequence
  chemically treated genomic DNA (Homo sapiens) CpG-island No: 19425
ttgcgtttttcggtttttttgttcgttttttttaatttcgttttcggtcgacgaggagcgcggcgattttacggcgcgaagtcgggtcgcggagattttatttgttgtttttgagagcgatcggtgatcgatgatcgcggggtggcgttcggatcgttttcgcgttcgcgttcgcgttaggcgtttcggggattttgtcggcgttcgttgcgcgcgacgcgtttttacgcgaatgggtcgtcgtcgttcgtttttttgttggtcgtattttcgtttcgcgttcgtttcgcgttcggttcggttcggcgagaaagttttaattggtaaaattgtttaggagttcgggacgggtgcgtggggggcgggggtgcgggggtacgtcgtgagttttagcgattcgtcgtcggcgacgtcgtttttcgagatgagtttatcgtcggcgagggtcgttaggttttgggggagggagggtttcgtgggggagtcgtttttagcgtttatagggattgtagggttcgtg

SEQ ID NO: 19426 - DNA, 520 bp, Artificial Sequence
  chemically treated genomic DNA (Homo sapiens) CpG-island No: 19426
cacgaaccctacaatccctataaacgctaaaaacgactcccccacgaaaccctccctcccccaaaacctaacgaccctcgccgacgataaactcatctcgaaaaacgacgtcgccgacgacgaatcgctaaaactcacgacgtacccccgcacccccgccccccacgcacccgtcccgaactcctaaacaattttaccaattaaaactttctcgccgaaccgaaccgaacgcgaaacgaacgcgaaacgaaaatacgaccaacaaaaaaacgaacgacgacgacccattcgcgtaaaaacgcgtcgcgcgcaacgaacgccgacaaaatccccgaaacgcctaacgcgaacgcgaacgcgaaaacgatccgaacgccaccccgcgatcatcgatcaccgatcgctctcaaaaacaacaaataaaatctccgcgacccgacttcgcgccgtaaaatcgccgcgctcctcgtcgaccgaaaacgaaattaaaaaaaacgaacaaaaaaaccgaaaaacgcaa

SEQ ID NO: 19427 - DNA, 520 bp, Artificial Sequence
  chemically treated genomic DNA (Homo sapiens) CpG-island No: 19427
tacgagttttgtagtttttgtgggcgttggaggcgatttttttacgaagtttttttttttttagggtttggcggttttcgtcggcggtgagtttatttcggggggcggcgtcgtcggcggcgggtcgttggagtttacggcgtgttttcgtattttcgttttttacgtattcgtttcgggtttttgggtaattttattaattaaggttttttcgtcgggtcgggtcgggcgcggggcgggcgcggggcgggggtgcggttaataagaaggcgggcggcggcggtttattcgcgtggaggcgcgtcgcgcgtagcggacgtcgatagaattttcgaggcgtttggcgcgggcgcgggcgcgaaggcgattcgggcgttatttcgcggttatcggttatcggtcgtttttaggaatagtaggtgaggttttcgcggttcggtttcgcgtcgtagggtcgtcgcgtttttcgtcggtcgggggcggggttggagaaggcgggtagagaggtcggaaaacgtag

SEQ ID NO: 19428 - DNA, 520 bp, Artificial Sequence
  chemically treated genomic DNA (Homo sapiens) CpG-island No: 19428
ctacgttttccgacctctctacccgccttctccaaccccgcccccgaccgacgaaaaacgcgacgaccctacgacgcgaaaccgaaccgcgaaaacctcacctactattcctaaaaacgaccgataaccgataaccgcgaaataacgcccgaatcgccttcgcgcccgcgcccgcgccaaacgcctcgaaaattctatcgacgtccgctacgcgcgacgcgcctccacgcgaataaaccgccgccgcccgccttcttattaaccgcacccccgccccgcgcccgccccgcgcccgacccgacccgacgaaaaaaccttaattaataaaattacccaaaaacccgaaacgaatacgtaaaaaacgaaaatacgaaaacacgccgtaaactccaacgacccgccgccgacgacgccgccccccgaaataaactcaccgccgacgaaaaccgccaaaccctaaaaaaaaaaaaacttcgtaaaaaaatcgcctccaacgcccacaaaaactacaaaactcgta

SEQ ID NO: 19429 - DNA, 1314 bp, Artificial Sequence
  chemically treated genomic DNA (Homo sapiens) CpG-island No: 19429
aagcgtcgatttcgttcgttcgtacgtttcgggtttttcgcgcgtaggtttcgttttttttatttcgtcgtacgttatagggtgacgtttgggtttttagtcgtatcgttttgattttcgcgcgggtttcgttttttgtcgttagttaatttgtgcgtttgtgatttttgggttcgtagtttcgtttgtttttatagcgatatcggtttgtattgttttgattttcgcgcgggtttcgttttttacgtcgttagttaatttatgtattagtggcgttcgggttcgtagtatcgttcgtttttatcgcgagattttttgtttcgcgttcgcgcgggtttttttttttttatcgttagttaattttcgttttgtgacgtatgggttcgcggtttcgttcgtttttatcgcgagattttttgtttcgcgttcgcgcgggtttcgttttttttattattagttaattttcgtgtttgtgatatatgggtttgcggtttcgttcgtttttatcgcgagatcggtttttatcgttttgattttcgggcgggtttcgtttttttcgtcgttagttaattttcgcgttgatgacgtttgggttcgcggttttagttttttagtttttagggtacggtcggtttgtgtcggttgttttcgcggttaggtttcgtttcgcgtagcgcgcgtagtttgcggagttagcggtcgtgacgcgataacgattcggttgtgacgcgataacgattcggttgtgacgcgagcgcggtcgttttcgatgcgttcgtgtcgttttcgtcgtgtttttcggtagtcgttgttcggtcggttttggtaggttcgggtcgtcgttaggttttcgtttgagttcgtattcgttatggataattacgtagatttttcggatatcgagttgattattttgttgcgtcggtataatatttcgtacgggtttgtagtaggtacgcggcggcgggcgggatttttttcgggtttttttttcgtgtttcgtttcgcgattttttcgttgtttttttcgcgcgtttttttcggttcgcggttttgatcgtttcgtgttcggttaggattaattcgtaggttttacgagaagaagattttcgagtacgagatttagaggcggcggttttcgttttttagttcgttcgtcgtttttttttatagtttttttggtgagagtttcgtttgtggggatagtttgggacgcggggaggatggggtcgcgagggtgtggtaggggggtcggtcgagagcggtattggagaaaggggagggaagtttgggggggtaaatagttttgttttt

SEQ ID NO: 19430 - DNA, 1314 bp, Artificial Sequence
  chemically treated genomic DNA (Homo sapiens) CpG-island No: 19430
aaaaacaaaactatttacccccccaaacttccctcccctttctccaataccgctctcgaccgacccccctaccacaccctcgcgaccccatcctccccgcgtcccaaactatccccacaaacgaaactctcaccaaaaaaactataaaaaaaaacgacgaacgaactaaaaaacgaaaaccgccgcctctaaatctcgtactcgaaaatcttcttctcgtaaaacctacgaattaatcctaaccgaacacgaaacgatcaaaaccgcgaaccgaaaaaaacgcgcgaaaaaaacaacgaaaaaatcgcgaaacgaaacacgaaaaaaaaacccgaaaaaaatcccgcccgccgccgcgtacctactacaaacccgtacgaaatattataccgacgcaacaaaataatcaactcgatatccgaaaaatctacgtaattatccataacgaatacgaactcaaacgaaaacctaacgacgacccgaacctaccaaaaccgaccgaacaacgactaccgaaaaacacgacgaaaacgacacgaacgcatcgaaaacgaccgcgctcgcgtcacaaccgaatcgttatcgcgtcacaaccgaatcgttatcgcgtcacgaccgctaactccgcaaactacgcgcgctacgcgaaacgaaacctaaccgcgaaaacaaccgacacaaaccgaccgtaccctaaaaactaaaaaactaaaaccgcgaacccaaacgtcatcaacgcgaaaattaactaacgacgaaaaaaacgaaacccgcccgaaaatcaaaacgataaaaaccgatctcgcgataaaaacgaacgaaaccgcaaacccatatatcacaaacacgaaaattaactaataataaaaaaaacgaaacccgcgcgaacgcgaaacaaaaaatctcgcgataaaaacgaacgaaaccgcgaacccatacgtcacaaaacgaaaattaactaacgataaaaaaaaaaaaacccgcgcgaacgcgaaacaaaaaatctcgcgataaaaacgaacgatactacgaacccgaacgccactaatacataaattaactaacgacgtaaaaaacgaaacccgcgcgaaaatcaaaacaatacaaaccgatatcgctataaaaacaaacgaaactacgaacccaaaaatcacaaacgcacaaattaactaacgacaaaaaacgaaacccgcgcgaaaatcaaaacgatacgactaaaaacccaaacgtcaccctataacgtacgacgaaataaaaaaaacgaaacctacgcgcgaaaaacccgaaacgtacgaacgaacgaaatcgacgctt

SEQ ID NO: 19431 - DNA, 1314 bp, Artificial Sequence
  chemically treated genomic DNA (Homo sapiens) CpG-island No: 19431
ggagatagaattgtttgtttttttagattttttttttttttttttagtgtcgttttcgatcggtttttttgttatattttcgcgattttatttttttcgcgttttaggttgtttttataggcgaggtttttattagagaagttataagaggaggcggcggacgagttggggggcgagagtcgtcgtttttgggtttcgtattcgaagatttttttttcgtaaagtttacgagttgattttggtcggatacggggcggttagggtcgcgggtcggggaaggcgcgcggggagggtagcggggaggtcgcgaggcggagtacgaggagggggttcggaaggggtttcgttcgtcgtcgcgtatttattataggttcgtgcgggatgttgtatcggcgtagtaaggtggttagttcggtattcgaaagatttgcgtagttgtttatggcgggtgcgggtttaggcggaggtttggcggcggttcgggtttattaaaatcggtcgagtaacggttgtcgaggagtacggcgggggcggtacgagcgtatcgggagcggtcgcgttcgcgttatagtcgaatcgttgtcgcgttatagtcgaatcgttgtcgcgttacggtcgttggtttcgtaggttgcgcgcgttgcgcggggcgggatttaatcgcgggagtagtcggtatagatcggtcgtgttttgagagttgggaggttggggtcgcgagtttaaacgttattaacgcgaggattggttagcggcggagagggcggggttcgttcgggagttagggcggtgggaatcggtttcgcgatgggagcgggcggggtcgtaagtttatatgttataagtacggggattggttagtgatggagggggcggggttcgcgcgggcgcggagtaaaaggtttcgcggtgggagcgagcggggtcgcgagtttatacgttataaaacggggattggttagcgatggagggggaggggttcgcgcgggcgcggagtagaaggtttcgcggtgggagcgagcggtattgcgagttcggacgttattaatgtatggattggttagcggcgtagggggcggggttcgcgcgggagttagggtaatgtaaatcggtatcgttgtgggagtaggcggggttgcgggtttaaaagttataaacgtatagattggttagcggtagggggcggggttcgcgcgggagttagggcgatgcggttgggagtttagacgttattttgtggcgtgcggcggggtgagaggggcggggtttgcgcgcgagggattcgggacgtgcgagcgggcgaagtcggcgttt

SEQ ID NO: 19432 - DNA, 1314 bp, Artificial Sequence
  chemically treated genomic DNA (Homo sapiens) CpG-island No: 19432
aaacgccgacttcgcccgctcgcacgtcccgaatccctcgcgcgcaaaccccgcccctctcaccccgccgcacgccacaaaataacgtctaaactcccaaccgcatcgccctaactcccgcgcgaaccccgccccctaccgctaaccaatctatacgtttataacttttaaacccgcaaccccgcctactcccacaacgataccgatttacattaccctaactcccgcgcgaaccccgccccctacgccgctaaccaatccatacattaataacgtccgaactcgcaataccgctcgctcccaccgcgaaaccttctactccgcgcccgcgcgaacccctccccctccatcgctaaccaatccccgttttataacgtataaactcgcgaccccgctcgctcccaccgcgaaaccttttactccgcgcccgcgcgaaccccgccccctccatcactaaccaatccccgtacttataacatataaacttacgaccccgcccgctcccatcgcgaaaccgattcccaccgccctaactcccgaacgaaccccgccctctccgccgctaaccaatcctcgcgttaataacgtttaaactcgcgaccccaacctcccaactctcaaaacacgaccgatctataccgactactcccgcgattaaatcccgccccgcgcaacgcgcgcaacctacgaaaccaacgaccgtaacgcgacaacgattcgactataacgcgacaacgattcgactataacgcgaacgcgaccgctcccgatacgctcgtaccgcccccgccgtactcctcgacaaccgttactcgaccgattttaataaacccgaaccgccgccaaacctccgcctaaacccgcacccgccataaacaactacgcaaatctttcgaataccgaactaaccaccttactacgccgatacaacatcccgcacgaacctataataaatacgcgacgacgaacgaaaccccttccgaaccccctcctcgtactccgcctcgcgacctccccgctaccctccccgcgcgccttccccgacccgcgaccctaaccgccccgtatccgaccaaaatcaactcgtaaactttacgaaaaaaaaatcttcgaatacgaaacccaaaaacgacgactctcgccccccaactcgtccgccgcctcctcttataacttctctaataaaaacctcgcctataaaaacaacctaaaacgcgaaaaaaataaaatcgcgaaaatataacaaaaaaaccgatcgaaaacgacactaaaaaaaaaaaaaaaaaatctaaaaaaacaaacaattctatctcc

SEQ ID NO: 19433 - DNA, 1418 bp, Artificial Sequence
  chemically treated genomic DNA (Homo sapiens) CpG-island No: 19433
tttttcggcggtcgtcgttgttaagggacggggaagattttgttattttatcgcgcgttatcgcggaatggtgtatagatatttttagacgttattttttttaagacggtcgttcgtttcgttttgtttatttttttttggacgttgtcgggtgggcgcggttttgtttttttacgattttttagacgcgtttcgaggtattttcgtagtatagtggagtgggaagggcggggcggtttttcgacggcgtcgaggcgagagcggtttacggggtttttcgggttttgattttaggcgacgtttgttcgtttcgttttcgggggaagatagtgattatcggtttgtaaaggaaggggattcggcgtatgtttcgtagggtcggtttaggattcgtaggcgcggaaggcggtgtcgaggcgggggcggggcgtggagggatagttttagttttcgttcgtcggggtttatagttgtttcgtttttcgttttcgtttcggtcgttttcggtaagttttaggcgtttacgggaagtttcgtttagtttcgtttattcgttttttttttcgtttgttttcgttaatgattatgtttagattgtacggaattttcgtttttcgtttttgattgacgtttttgttgtttagtggacgatatttcgtcgcgtgcgcgtcgttgcggttttgtcgggtgtggcgcggcgtttttaggtttttaggcgttttcggggcgagatttagggcgttggtcgtagagtcgtcggtgtatacgtaatagtgtcgttttgtgttttgggtgtggatttgcgtttttttaagcgttttattttcgagaaggggcgagaaacgtttagaggtcgtggtatttgttcgtcgttgtcggggcgtcggtcgtgggcgtaagtgaaagcgtttcgggagcgcggcgcgacgttcgtgtttttcgagggcggttcgggtgtcgtcgcggtgcgcgcgggagggcgcggtcgtgggtattttcgcgtttgcgcgggtttttgtttcgtttcggtttcggtttcggtttcggtttcggtttcggtttcggtttcggtttcggtttttttttttcgtggtttcgtagtagacgtagtttttttttttcgcggtgtagcgtagttagggttttgtttcgggagttatggagtttattatcgcggagcgttattttagcggatttacgcggtgtttttcgttggggtgggtcgagtatttttcgtttttcgttcgcgagatttattttagtttttggcgggggttcgtggtttttttcgtttatggttacggaacggtttacgttcgcggagtcgtaggttgagtttttgttggtgagggataaggtcgtggtttttcgtggttggtggtttttacggaggagtttgttgggagtacgttcgtgta

SEQ ID NO: 19434 - DNA, 1418 bp, Artificial Sequence
  chemically treated genomic DNA (Homo sapiens) CpG-island No: 19434
tacacgaacgtactcccaacaaactcctccgtaaaaaccaccaaccacgaaaaaccacgaccttatccctcaccaacaaaaactcaacctacgactccgcgaacgtaaaccgttccgtaaccataaacgaaaaaaaccacgaacccccgccaaaaactaaaataaatctcgcgaacgaaaaacgaaaaatactcgacccaccccaacgaaaaacaccgcgtaaatccgctaaaataacgctccgcgataataaactccataactcccgaaacaaaaccctaactacgctacaccgcgaaaaaaaaaaactacgtctactacgaaaccacgaaaaaaaaaaaccgaaaccgaaaccgaaaccgaaaccgaaaccgaaaccgaaaccgaaaccgaaacgaaacaaaaacccgcgcaaacgcgaaaatacccacgaccgcgccctcccgcgcgcaccgcgacgacacccgaaccgccctcgaaaaacacgaacgtcgcgccgcgctcccgaaacgctttcacttacgcccacgaccgacgccccgacaacgacgaacaaataccacgacctctaaacgtttctcgccccttctcgaaaataaaacgcttaaaaaaacgcaaatccacacccaaaacacaaaacgacactattacgtatacaccgacgactctacgaccaacgccctaaatctcgccccgaaaacgcctaaaaacctaaaaacgccgcgccacacccgacaaaaccgcaacgacgcgcacgcgacgaaatatcgtccactaaacaacaaaaacgtcaatcaaaaacgaaaaacgaaaattccgtacaatctaaacataatcattaacgaaaacaaacgaaaaaaaaaacgaataaacgaaactaaacgaaacttcccgtaaacgcctaaaacttaccgaaaacgaccgaaacgaaaacgaaaaacgaaacaactataaaccccgacgaacgaaaactaaaactatccctccacgccccgcccccgcctcgacaccgccttccgcgcctacgaatcctaaaccgaccctacgaaacatacgccgaatccccttcctttacaaaccgataatcactatcttcccccgaaaacgaaacgaacaaacgtcgcctaaaatcaaaacccgaaaaaccccgtaaaccgctctcgcctcgacgccgtcgaaaaaccgccccgcccttcccactccactatactacgaaaatacctcgaaacgcgtctaaaaaatcgtaaaaaaacaaaaccgcgcccacccgacaacgtccaaaaaaaaataaacaaaacgaaacgaacgaccgtcttaaaaaaaataacgtctaaaaatatctatacaccattccgcgataacgcgcgataaaataacaaaatcttccccgtcccttaacaacgacgaccgccgaaaaa

SEQ ID NO: 19435 - DNA, 1418 bp, Artificial Sequence
  chemically treated genomic DNA (Homo sapiens) CpG-island No: 19435
tatacgggcgtgtttttagtaggttttttcgtgagggttattagttacgggaaattacgattttgttttttattagtaaaagtttagtttgcggtttcgcgagcgtggatcgtttcgtggttatgagcgggaagaattacgggttttcgttaggggttgggatggatttcgcgggcgggaggcggagggtattcggtttattttagcggaggatatcgcgtgggttcgttgagataacgtttcgcggtgatggattttatgattttcggagtagagttttggttgcgttgtatcgcgggagggaggggttgcgtttattgcggggttacgagagggaggggtcggggtcggggtcggggtcggggtcggggtcggggtcggggtcggggtcggggcgggataggaattcgcgtaagcgcggaaatgtttacggtcgcgttttttcgcgcgtatcgcggcgatattcgggtcgttttcggaaggtacggacgtcgcgtcgcgttttcggggcgtttttatttgcgtttacggtcgacgtttcggtagcggcgggtaggtgttacgatttttggacgtttttcgttttttttcgggaatggaacgtttagagaagcgtaggtttatatttaaaatataaggcggtattgttgcgtgtgtatcggcgattttgcggttagcgttttgggtttcgtttcgggaacgtttaggagtttgagagcgtcgcgttatattcggtagggtcgtagcggcgcgtacgcgacggggtgtcgtttattgggtagtaggagcgttagttaagggcgaggggcgggaatttcgtgtaatttgagtatggttattggcgaggataggcgaagaggaggacggataggcggggttgggcggggtttttcgtgggcgtttggagtttatcgggagcgatcgaagcggaggcggggagcgaggtagttgtgggtttcggcgggcggagattagggttgtttttttacgtttcgttttcgtttcggtatcgtttttcgcgtttgcgagttttgggtcggttttgcggggtatgcgtcgagttttttttttttgtagatcggtggttattgttttttttcggggacgaggcggataggcgtcgtttgagattagggttcgggaagtttcgtgagtcgttttcgtttcggcgtcgtcgaggggtcgtttcgttttttttattttattgtgttgcgaaagtgtttcggggcgcgtttggggggtcgtggggaagtagggtcgcgtttattcggtagcgtttagggagaggtgggtagagcggggcgggcggtcgttttgggggaagtggcgtttggaggtgtttgtgtattatttcgcggtggcgcgcggtggggtaataaagtttttttcgttttttgatagcggcggtcgtcggggag

SEQ ID NO: 19436 - DNA, 1418 bp, Artificial Sequence
  chemically treated genomic DNA (Homo sapiens) CpG-island No: 19436
ctccccgacgaccgccgctatcaaaaaacgaaaaaaactttattaccccaccgcgcgccaccgcgaaataatacacaaacacctccaaacgccacttcccccaaaacgaccgcccgccccgctctacccacctctccctaaacgctaccgaataaacgcgaccctacttccccacgaccccccaaacgcgccccgaaacactttcgcaacacaataaaataaaaaaaacgaaacgacccctcgacgacgccgaaacgaaaacgactcacgaaacttcccgaaccctaatctcaaacgacgcctatccgcctcgtccccgaaaaaaaacaataaccaccgatctacaaaaaaaaaaaactcgacgcataccccgcaaaaccgacccaaaactcgcaaacgcgaaaaacgataccgaaacgaaaacgaaacgtaaaaaaacaaccctaatctccgcccgccgaaacccacaactacctcgctccccgcctccgcttcgatcgctcccgataaactccaaacgcccacgaaaaaccccgcccaaccccgcctatccgtcctcctcttcgcctatcctcgccaataaccatactcaaattacacgaaattcccgcccctcgcccttaactaacgctcctactacccaataaacgacaccccgtcgcgtacgcgccgctacgaccctaccgaatataacgcgacgctctcaaactcctaaacgttcccgaaacgaaacccaaaacgctaaccgcaaaatcgccgatacacacgcaacaataccgccttatattttaaatataaacctacgcttctctaaacgttccattcccgaaaaaaaacgaaaaacgtccaaaaatcgtaacacctacccgccgctaccgaaacgtcgaccgtaaacgcaaataaaaacgccccgaaaacgcgacgcgacgtccgtaccttccgaaaacgacccgaatatcgccgcgatacgcgcgaaaaaacgcgaccgtaaacatttccgcgcttacgcgaattcctatcccgccccgaccccgaccccgaccccgaccccgaccccgaccccgaccccgaccccgacccctccctctcgtaaccccgcaataaacgcaacccctccctcccgcgatacaacgcaaccaaaactctactccgaaaatcataaaatccatcaccgcgaaacgttatctcaacgaacccacgcgatatcctccgctaaaataaaccgaataccctccgcctcccgcccgcgaaatccatcccaacccctaacgaaaacccgtaattcttcccgctcataaccacgaaacgatccacgctcgcgaaaccgcaaactaaacttttactaataaaaaacaaaatcgtaatttcccgtaactaataaccctcacgaaaaaacctactaaaaacacgcccgtata

SEQ ID NO: 19437 - DNA, 539 bp, Artificial Sequence
  chemically treated genomic DNA (Homo sapiens) CpG-island No: 19437
cgggtttttcgcgattatgtggcgaagttttattcgttagttggtcgttcgcggttttggtattcggttatttttttgatttgcgtatgtgttgggttacgttcgggcgtaaggttaagagcggttgcgtttatggttatgacgtttgatagagcgtttattcgttttcgataggattttatggtttttacgcgcgtagatagatcgtttatataagttatgcgtaggcggaggagcgttttttttttttcggtgtggtgagtaagcgtagttgtcgttttttgcggtgtcgttgttggtttttatattttttaggtttgttttcgtttttcgtttcgattttttttttttcgttgtagttattgaagattttggtgtcgttatgggtcgtcgtttcgttcgttggtgagttttgaattcgtgtatttttattgttgggaaacgggcggggaaagaagtgtttatggttcgttgaaaataattgtggggtggagtttttttcgtgcggcggttttgttttgggaattgattttatgttt

SEQ ID NO: 19438 - DNA, 539 bp, Artificial Sequence
  chemically treated genomic DNA (Homo sapiens) CpG-island No: 19438
aaacataaaatcaattcccaaaacaaaaccgccgcacgaaaaaaactccaccccacaattattttcaacgaaccataaacacttctttccccgcccgtttcccaacaataaaaatacacgaattcaaaactcaccaacgaacgaaacgacgacccataacgacaccaaaatcttcaataactacaacgaaaaaaaaaaaatcgaaacgaaaaacgaaaacaaacctaaaaaatataaaaaccaacaacgacaccgcaaaaaacgacaactacgcttactcaccacaccgaaaaaaaaaaaacgctcctccgcctacgcataacttatataaacgatctatctacgcgcgtaaaaaccataaaatcctatcgaaaacgaataaacgctctatcaaacgtcataaccataaacgcaaccgctcttaaccttacgcccgaacgtaacccaacacatacgcaaatcaaaaaaataaccgaataccaaaaccgcgaacgaccaactaacgaataaaacttcgccacataatcgcgaaaaacccg

SEQ ID NO: 19439 - DNA, 539 bp, Artificial Sequence
  chemically treated genomic DNA (Homo sapiens) CpG-island No: 19439
aaatatagggttagtttttaagatagggtcgtcgtacgggggaggttttattttataattgtttttagcgggttataggtattttttttttcgttcgttttttagtagtgaaagtatacggatttaagatttattaacgggcggggcggcggtttatggcgatattaggatttttagtggttgtaacgaaaaagagagagtcggaacggaagacgagaatagatttaaaaggtgtgagaattagtaacggtatcgtaagagacgataattgcgtttatttattatatcgaagggaaagaggcgttttttcgtttgcgtatggtttatataggcggtttgtttgcgcgcgtaagaattatagagttttgtcgaagacgggtggacgttttgttagacgttatgattatagacgtagtcgtttttggttttgcgttcgggcgtagtttagtatatgcgtagattagagaggtgatcgggtattagggtcgcgggcggttagttgacgaatggggtttcgttatatggtcgcgagaagttcg

SEQ ID NO: 19440 - DNA, 539 bp, Artificial Sequence
  chemically treated genomic DNA (Homo sapiens) CpG-island No: 19440
cgaacttctcgcgaccatataacgaaaccccattcgtcaactaaccgcccgcgaccctaatacccgatcacctctctaatctacgcatatactaaactacgcccgaacgcaaaaccaaaaacgactacgtctataatcataacgtctaacaaaacgtccacccgtcttcgacaaaactctataattcttacgcgcgcaaacaaaccgcctatataaaccatacgcaaacgaaaaaacgcctctttcccttcgatataataaataaacgcaattatcgtctcttacgataccgttactaattctcacaccttttaaatctattctcgtcttccgttccgactctctctttttcgttacaaccactaaaaatcctaatatcgccataaaccgccgccccgcccgttaataaatcttaaatccgtatactttcactactaaaaaacgaacgaaaaaaaaaatacctataacccgctaaaaacaattataaaataaaacctcccccgtacgacgaccctatcttaaaaactaaccctatattt

SEQ ID NO: 19441 - DNA, 504 bp, Artificial Sequence
  chemically treated genomic DNA (Homo sapiens) CpG-island No: 19441
ttcgtcgtttcggggttggtttcgttgtcgttaagcggttcgtgcgcgttttcgatagtcggtcgggttgggtatcggcgtaggttcgtttttcggcggttgtatcgggtcggggtgttagcgttcgttttttcgttttttttcgtttcgtagcgcgtttacggtttgtgatttcggagatcgttttttagtgacgagagagcggggtcgggcgttgtttcggtttgatttgcgaagggatttcggtttagtattttgttgcgtcgcgttttcgttcgttcgtgcgcgggttagttaggggttagtgtgtcgaggcggtagaggtcgtagtttagaggcgttttataggtcggttcggggcgttgggagttcggtcggcggtcgggtggggtggtttttgtacgtgaaagtggtcgtttttcgcggtgtcgtcgtttatttggattttggttagtagcgtcgttatgggtttggtgggtatttatagttgtttttggattagtg

SEQ ID NO: 19442 - DNA, 504 bp, Artificial Sequence
  chemically treated genomic DNA (Homo sapiens) CpG-island No: 19442
cactaatccaaaaacaactataaatacccaccaaacccataacgacgctactaaccaaaatccaaataaacgacgacaccgcgaaaaacgaccactttcacgtacaaaaaccaccccacccgaccgccgaccgaactcccaacgccccgaaccgacctataaaacgcctctaaactacgacctctaccgcctcgacacactaacccctaactaacccgcgcacgaacgaacgaaaacgcgacgcaacaaaatactaaaccgaaatcccttcgcaaatcaaaccgaaacaacgcccgaccccgctctctcgtcactaaaaaacgatctccgaaatcacaaaccgtaaacgcgctacgaaacgaaaaaaaacgaaaaaacgaacgctaacaccccgacccgatacaaccgccgaaaaacgaacctacgccgatacccaacccgaccgactatcgaaaacgcgcacgaaccgcttaacgacaacgaaaccaaccccgaaacgacgaa

SEQ ID NO: 19443 - DNA, 504 bp, Artificial Sequence
  chemically treated genomic DNA (Homo sapiens) CpG-island No: 19443
tattggtttagaagtagttgtaggtgtttattaagtttatgacgacgttgttggttagggtttaggtgagcggcggtatcgcggggaacggttatttttacgtgtagaggttattttattcgatcgtcggtcgggtttttagcgtttcgggtcgatttgtggaacgtttttaggttgcgatttttatcgtttcgatatattggtttttgattggttcgcgtacggacggacgggggcgcggcgtaatagggtattggatcgaggttttttcgtaggttaggtcggagtagcgttcggtttcgttttttcgttattggggagcggttttcgaagttataggtcgtgggcgcgttgcggaacgggaggaaacgggaaagcgggcgttggtatttcggttcggtgtaatcgtcggaaagcgaatttgcgtcggtgtttagttcgatcgattgtcgaaagcgcgtacgggtcgtttgacggtagcgaggttagtttcggggcggcggg

SEQ ID NO: 19444 - DNA, 504 bp, Artificial Sequence
  chemically treated genomic DNA (Homo sapiens) CpG-island No: 19444
cccgccgccccgaaactaacctcgctaccgtcaaacgacccgtacgcgctttcgacaatcgatcgaactaaacaccgacgcaaattcgctttccgacgattacaccgaaccgaaataccaacgcccgctttcccgtttcctcccgttccgcaacgcgcccacgacctataacttcgaaaaccgctccccaataacgaaaaaacgaaaccgaacgctactccgacctaacctacgaaaaaacctcgatccaataccctattacgccgcgcccccgtccgtccgtacgcgaaccaatcaaaaaccaatatatcgaaacgataaaaatcgcaacctaaaaacgttccacaaatcgacccgaaacgctaaaaacccgaccgacgatcgaataaaataacctctacacgtaaaaataaccgttccccgcgataccgccgctcacctaaaccctaaccaacaacgtcgtcataaacttaataaacacctacaactacttctaaaccaata

SEQ ID NO: 19445 - DNA, 513 bp, Artificial Sequence
  chemically treated genomic DNA (Homo sapiens) CpG-island No: 19445
gtttaattatttgcggttttgtcggtcggttcgcgttggggttaatggaggtgcgaggcggggttcgggcgggggtaacggttatttgatttgcggttgtcgaggtcgttgaggtagtggaggttgaggttatgatggcggttatggcgacggttcgagtgcggatggggtcgcggtgcgtttaggcgttttggcgtatgtcgtggttgtcggtgtttttgtcgttggcggcggcggcggcggcggtagcggcggagtagtaggtttcgttggtgttgtggtcgagtgatcggtgagcgggtcggggtgggatgcgttgtggcggttgaggcgttttcgttcgatttcggcgttgttttaggcgaggggtggtgaggttcggaggtggattgttttttgttcgggggttcgtagcgaatttgtcggcgatagagttttagtttatatgcgttttcgtttgatagtattttttttgtgttttgttagggatttgtgggtttttgcggtcgatat

SEQ ID NO: 19446 - DNA, 513 bp, Artificial Sequence
  chemically treated genomic DNA (Homo sapiens) CpG-island No: 19446
atatcgaccgcaaaaacccacaaatccctaacaaaacacaaaaaaaatactatcaaacgaaaacgcatataaactaaaactctatcgccgacaaattcgctacgaacccccgaacaaaaaacaatccacctccgaacctcaccacccctcgcctaaaacaacgccgaaatcgaacgaaaacgcctcaaccgccacaacgcatcccaccccgacccgctcaccgatcactcgaccacaacaccaacgaaacctactactccgccgctaccgccgccgccgccgccgccaacgacaaaaacaccgacaaccacgacatacgccaaaacgcctaaacgcaccgcgaccccatccgcactcgaaccgtcgccataaccgccatcataacctcaacctccactacctcaacgacctcgacaaccgcaaatcaaataaccgttacccccgcccgaaccccgcctcgcacctccattaaccccaacgcgaaccgaccgacaaaaccgcaaataattaaac

SEQ ID NO: 19447 - DNA, 513 bp, Artificial Sequence
  chemically treated genomic DNA (Homo sapiens) CpG-island No: 19447
gtgtcggtcgtaggagtttataagtttttggtagggtatagaagaggtgttgttagacgggggcgtatgtggattggagttttgtcgtcggtagattcgttgcgagttttcgagtaaggaatagtttattttcgggttttattatttttcgtttaggatagcgtcggagtcgggcgagggcgttttagtcgttatagcgtattttatttcggttcgtttatcggttattcgattatagtattagcgggatttgttgtttcgtcgttgtcgtcgtcgtcgtcgtcgttaacgataaaaatatcggtagttacggtatgcgttagagcgtttgggcgtatcgcggttttattcgtattcgagtcgtcgttatggtcgttattatagttttagtttttattgttttagcggtttcgatagtcgtagattaggtgatcgttgttttcgttcgagtttcgtttcgtatttttattggttttagcgcgggtcgatcggtagggtcgtaggtaattggat

SEQ ID NO: 19448 - DNA, 513 bp, Artificial Sequence
  chemically treated genomic DNA (Homo sapiens) CpG-island No: 19448
atccaattacctacgaccctaccgatcgacccgcgctaaaaccaataaaaatacgaaacgaaactcgaacgaaaacaacgatcacctaatctacgactatcgaaaccgctaaaacaataaaaactaaaactataataacgaccataacgacgactcgaatacgaataaaaccgcgatacgcccaaacgctctaacgcataccgtaactaccgatatttttatcgttaacgacgacgacgacgacgacaacgacgaaacaacaaatcccgctaatactataatcgaataaccgataaacgaaccgaaataaaatacgctataacgactaaaacgccctcgcccgactccgacgctatcctaaacgaaaaataataaaacccgaaaataaactattccttactcgaaaactcgcaacgaatctaccgacgacaaaactccaatccacatacgcccccgtctaacaacacctcttctataccctaccaaaaacttataaactcctacgaccgacac

SEQ ID NO: 19449 - DNA, 1280 bp, Artificial Sequence
  chemically treated genomic DNA (Homo sapiens) CpG-island No: 19449
tggttgttttttttttaataaaataaacgcgggtcgttatgcgttgggttttttgtcgtttatttttgcgttgggttttaggcgcgtgttcgtcggagggatgcgggaggatggagtttggcgagggggaggcgaagaggtattcgcggagatcgggaggggttttagtaagttgggttttaatcgtttagggtagggaggggcggtcgggtcgagtttcggtgcgtttcggcgttttaggaggtcgtcgtgataatggtagttttcgcgtcgtgagggggtcgttttaggttgtcgtagcggcgcgcgttcggtcgcggggtcgcgtcgagattttcgggggggtgggcgggggtggggaggtgggcgggcgcgcgcggggcggggcggggcggggcgcggcgggtggggcggggcgcgcgcggttttcgcgacggattttttttgggtcgtagtatcggtcgtcggttcgtttcgttcgtttcgtttcgcgtttttttagattttcggcgagtagcgtcgttcgcggagtcgcgttggtgttgtggttcgggttttggtagttttttcgggaggcgagtcggggaggcggtggtttttgtcggttgcggcggggcgcgggaagaggcgggattttttgacgcggcggaggggtcgggcgacggtcgacgcgtcgttatttttggtttagtgcggtggcggcggcggcggtggcggcggcgattgttgcggtgaaggaggaggaggagtcgagcgggcgttggtatcgaggtttgattatggacgaggaatacgatgtgatcgtgttggggatcggttttatcgtaagtgcggtttcggcgtttttggttttgcgtcgtgttttcgttatttttcgcgatgatgcggtcgtcggtttattttttggttattgttattttttgcgtttcgtttttcgaaaagtcggcgtcgtgtttatttcgttgtttttttagcgacgtcgtttttgttcgttgttatgattttattttttcgaagaggttttttttttggtcgttttttgggttattcgggttcgattttcggcgtttttttattttttttatttttgttcgttggatcggaaaacgtatttttattcggttcgatgtttacgatttcgtttatttatcgtttttatttattacggtatttattcgtcgttcgtatttattgttcgtttagcgttgttttttagcgtttttttttattttgcgttaatttcggtggggatgaagtagaaggatttggggttagggggt

SEQ ID NO: 19450 - DNA, 1280 bp, Artificial Sequence
  chemically treated genomic DNA (Homo sapiens) CpG-island No: 19450
accccctaaccccaaatccttctacttcatccccaccgaaattaacgcaaaataaaaaaaaacgctaaaaaacaacgctaaacgaacaataaatacgaacgacgaataaataccgtaataaataaaaacgataaataaacgaaatcgtaaacatcgaaccgaataaaaatacgttttccgatccaacgaacaaaaataaaaaaaataaaaaaacgccgaaaatcgaacccgaataacccaaaaaacgaccaaaaaaaaaacctcttcgaaaaaataaaatcataacaacgaacaaaaacgacgtcgctaaaaaaacaacgaaataaacacgacgccgacttttcgaaaaacgaaacgcaaaaaataacaataaccaaaaaataaaccgacgaccgcatcatcgcgaaaaataacgaaaacacgacgcaaaaccaaaaacgccgaaaccgcacttacgataaaaccgatccccaacacgatcacatcgtattcctcgtccataatcaaacctcgataccaacgcccgctcgactcctcctcctccttcaccgcaacaatcgccgccgccaccgccgccgccgccaccgcactaaaccaaaaataacgacgcgtcgaccgtcgcccgacccctccgccgcgtcaaaaaatcccgcctcttcccgcgccccgccgcaaccgacaaaaaccaccgcctccccgactcgcctcccgaaaaaactaccaaaacccgaaccacaacaccaacgcgactccgcgaacgacgctactcgccgaaaatctaaaaaaacgcgaaacgaaacgaacgaaacgaaccgacgaccgatactacgacccaaaaaaaatccgtcgcgaaaaccgcgcgcgccccgccccacccgccgcgccccgccccgccccgccccgcgcgcgcccgcccacctccccacccccgcccacccccccgaaaatctcgacgcgaccccgcgaccgaacgcgcgccgctacgacaacctaaaacgaccccctcacgacgcgaaaactaccattatcacgacgacctcctaaaacgccgaaacgcaccgaaactcgacccgaccgcccctccctaccctaaacgattaaaacccaacttactaaaacccctcccgatctccgcgaatacctcttcgcctccccctcgccaaactccatcctcccgcatccctccgacgaacacgcgcctaaaacccaacgcaaaaataaacgacaaaaaacccaacgcataacgacccgcgtttattttattaaaaaaaaaacaacca

SEQ ID NO: 19451 - DNA, 1280 bp, Artificial Sequence
  chemically treated genomic DNA (Homo sapiens) CpG-island No: 19451
gttttttgattttaggtttttttattttatttttatcgggattagcgtaagatgggaagggacgttgagaggtaacgttaggcgggtaatgggtgcgggcgacgggtggatgtcgtgatgggtgggggcgatgggtgggcggggtcgtgggtatcgggtcgagtgggggtgcgtttttcggtttagcgggtaggggtagggaagatgggagggcgtcgggggtcggattcgggtagtttaggaggcggttaggaagggggttttttcggggagatggggttatggtaacgagtagaggcgacgtcgttgggggagtagcggggtgggtacggcgtcggtttttcggggagcggagcgtagaagatggtagtgattagaggatgggtcggcggtcgtattatcgcgggggatggcgagggtacgacgtagggttaggggcgtcggggtcgtatttacggtgagatcggtttttagtacgattatatcgtatttttcgtttatggttaggtttcggtgttagcgttcgttcggttttttttttttttttatcgtagtagtcgtcgtcgttatcgtcgtcgtcgttatcgtattggattaaagatggcggcgcgtcggtcgtcgttcgattttttcgtcgcgttaaagagtttcgttttttttcgcgtttcgtcgtaatcggtaggggttatcgttttttcggttcgtttttcgggagggttgttagggttcgggttatagtattagcgcggtttcgcgggcgacgttgttcgtcgagagtttagagaggcgcggggcggggcgggcggggcgggtcggcggtcggtgttgcggtttaggaagaattcgtcgcgggagtcgcgcgcgtttcgttttattcgtcgcgtttcgtttcgtttcgtttcgcgcgcgttcgtttatttttttattttcgtttattttttcgggagtttcggcgcggtttcgcggtcgggcgcgcgtcgttgcggtagtttggggcggtttttttacgacgcgaaggttgttattgttacgacggttttttgagacgtcgaagcgtatcgggattcggttcgatcgtttttttttattttgagcggttagggtttagtttgttaaagtttttttcggttttcgcggatgttttttcgtttttttttcgttaggttttattttttcgtattttttcggcgagtacgcgtttaaagtttagcgtagaaatgagcgataagaggtttaacgtatggcgattcgcgtttattttattaggaaggaaataatta

SEQ ID NO: 19452 - DNA, 1280 bp, Artificial Sequence
  chemically treated genomic DNA (Homo sapiens) CpG-island No: 19452
taattatttccttcctaataaaataaacgcgaatcgccatacgttaaacctcttatcgctcatttctacgctaaactttaaacgcgtactcgccgaaaaaatacgaaaaaataaaacctaacgaaaaaaaaacgaaaaaacatccgcgaaaaccgaaaaaaactttaacaaactaaaccctaaccgctcaaaataaaaaaaaacgatcgaaccgaatcccgatacgcttcgacgtctcaaaaaaccgtcgtaacaataacaaccttcgcgtcgtaaaaaaaccgccccaaactaccgcaacgacgcgcgcccgaccgcgaaaccgcgccgaaactcccgaaaaaataaacgaaaataaaaaaataaacgaacgcgcgcgaaacgaaacgaaacgaaacgcgacgaataaaacgaaacgcgcgcgactcccgcgacgaattcttcctaaaccgcaacaccgaccgccgacccgccccgcccgccccgccccgcgcctctctaaactctcgacgaacaacgtcgcccgcgaaaccgcgctaatactataacccgaaccctaacaaccctcccgaaaaacgaaccgaaaaaacgataacccctaccgattacgacgaaacgcgaaaaaaaacgaaactctttaacgcgacgaaaaaatcgaacgacgaccgacgcgccgccatctttaatccaatacgataacgacgacgacgataacgacgacgactactacgataaaaaaaaaaaaaaaaccgaacgaacgctaacaccgaaacctaaccataaacgaaaaatacgatataatcgtactaaaaaccgatctcaccgtaaatacgaccccgacgcccctaaccctacgtcgtaccctcgccatcccccgcgataatacgaccgccgacccatcctctaatcactaccatcttctacgctccgctccccgaaaaaccgacgccgtacccaccccgctactcccccaacgacgtcgcctctactcgttaccataaccccatctccccgaaaaaacccccttcctaaccgcctcctaaactacccgaatccgacccccgacgccctcccatcttccctacccctacccgctaaaccgaaaaacgcacccccactcgacccgatacccacgaccccgcccacccatcgcccccacccatcacgacatccacccgtcgcccgcacccattacccgcctaacgttacctctcaacgtcccttcccatcttacgctaatcccgataaaaataaaataaaaaaacctaaaatcaaaaaac

SEQ ID NO: 19453 - DNA, 617 bp, Artificial Sequence
  chemically treated genomic DNA (Homo sapiens) CpG-island No: 19453
taacgtcgaggtagcgcgaggggttggggaatttagttttcggggtttataggagtcggcggcgggggttggggcgggagtttacgtaggattaggggcggttttcggcggggcggggcgggcggtggttacgtttcgggttagttggcgcgcggcggggcggggtattcgtgcgttttttggtggttgacgttacggcgcgggcgttagtgattgttcggtcgttatcgtcgttgtcgttgtcgttgtcgttgtcgtcgtcgtcgtcgttcgtcgtcgtcgtcgtcgtcgtcgtcgttgttatggtttaatataagggcgtcgcgagcgaggtcggtcgcgttatgtatttgatgaagaagcgggagaagtagcgcgagtagatggagtagatgaagtagcgtatcgcggaggtgcgagtcggggagtttcggagtatgcgcgttgtttaggttttttggcggtttcgcgttacgtttcggttttggaagttttggggcggtggttacggagcgcgggcggcgcgtcggggtaggtttttggttcgttgatttttagtagggtatatagaagtaagttagcgatagttttatttgtgaaatgggtttggagtcggg

SEQ ID NO: 19454 - DNA, 617 bp, Artificial Sequence
  chemically treated genomic DNA (Homo sapiens) CpG-island No: 19454
cccgactccaaacccatttcacaaataaaactatcgctaacttacttctatataccctactaaaaatcaacgaaccaaaaacctaccccgacgcgccgcccgcgctccgtaaccaccgccccaaaacttccaaaaccgaaacgtaacgcgaaaccgccaaaaaacctaaacaacgcgcatactccgaaactccccgactcgcacctccgcgatacgctacttcatctactccatctactcgcgctacttctcccgcttcttcatcaaatacataacgcgaccgacctcgctcgcgacgcccttatattaaaccataacaacgacgacgacgacgacgacgacgacgaacgacgacgacgacgacaacgacaacgacaacgacaacgacgataacgaccgaacaatcactaacgcccgcgccgtaacgtcaaccaccaaaaaacgcacgaataccccgccccgccgcgcgccaactaacccgaaacgtaaccaccgcccgccccgccccgccgaaaaccgcccctaatcctacgtaaactcccgccccaacccccgccgccgactcctataaaccccgaaaactaaattccccaacccctcgcgctacctcgacgtta

SEQ ID NO: 19455 - DNA, 617 bp, Artificial Sequence
  chemically treated genomic DNA (Homo sapiens) CpG-island No: 19455
ttcggttttaggtttattttatagatgagattgtcgttggtttgtttttgtgtgttttgttggaagttagcgagttaggggtttgtttcggcgcgtcgttcgcgtttcgtggttatcgttttagggtttttagggtcggagcgtggcgcggggtcgttaggggatttgggtagcgcgtatgtttcgaggtttttcggttcgtattttcgcgatgcgttgttttatttgttttatttgttcgcgttgtttttttcgtttttttattaggtgtatggcgcggtcggtttcgttcgcggcgtttttgtattgagttatggtagcggcggcggcggcggcggcggcggcgggcggcggcggcggcgatagcgatagcggtagcggtagcggcggtggcggtcgaatagttattgacgttcgcgtcgtgacgttagttattaggagacgtacggatgtttcgtttcgtcgcgcgttagttggttcggagcgtgattatcgttcgtttcgtttcgtcggagatcgtttttggttttgcgtggattttcgttttagttttcgtcgtcggtttttgtggatttcggaggttgaattttttagtttttcgcgttgtttcgacgtta

SEQ ID NO: 19456 - DNA, 617 bp, Artificial Sequence
  chemically treated genomic DNA (Homo sapiens) CpG-island No: 19456
taacgtcgaaacaacgcgaaaaactaaaaaattcaacctccgaaatccacaaaaaccgacgacgaaaactaaaacgaaaatccacgcaaaaccaaaaacgatctccgacgaaacgaaacgaacgataatcacgctccgaaccaactaacgcgcgacgaaacgaaacatccgtacgtctcctaataactaacgtcacgacgcgaacgtcaataactattcgaccgccaccgccgctaccgctaccgctatcgctatcgccgccgccgccgcccgccgccgccgccgccgccgccgccgctaccataactcaatacaaaaacgccgcgaacgaaaccgaccgcgccatacacctaataaaaaaacgaaaaaaacaacgcgaacaaataaaacaaataaaacaacgcatcgcgaaaatacgaaccgaaaaacctcgaaacatacgcgctacccaaatcccctaacgaccccgcgccacgctccgaccctaaaaaccctaaaacgataaccacgaaacgcgaacgacgcgccgaaacaaacccctaactcgctaacttccaacaaaacacacaaaaacaaaccaacgacaatctcatctataaaataaacctaaaaccgaa

SEQ ID NO: 19457 - DNA, 802 bp, Artificial Sequence
  chemically treated genomic DNA (Homo sapiens) CpG-island No: 19457
agtttttcgggttagagatcgtcgggggcgtgttttgagttggggacgcgatttttcggcgggggtgtatttgagaggtcgggattagcgaggtcgcgtttcggtggtaggtgatttcgggcgcgttttcgagcgttagggtggggcgaggcggacgcgcgttttaggttcgagggggtgtggcgcgggcgcgcgcgggtttcggggtcgttcgaggcggcgggcggggagtcggggcgcgggggaggcgcgcgtcgcggaacgcgttatcgagcgaagggggtcggttggtcgggcgggtttttttttaggtcgcgggggttagggttgcgcgcgaggtttttggtttcggggagtagcggtttcgtttgcgttttttgtcgtcgcgtttttttcggtcgggcgttttcggacgttttcgtttcgcgcggtggtacggttcgggtttaaaaggtttcggcggttttcgggttagtttagtgtgtgggcggcggcggcggcggttgcgcgtttggggttcggggcgcggggcgaggtcgtggggacgtgcgagcggggtcgcggtggggttcgggggcgcgtttacgtggttagagggcggttattcggagttagcggagggataggtaggtggtcgttatcgtcgtcgttcgtgcggggttaaatagttcggggttcggggtttcggtagttcgggggttcggttcggtttgtgggggttaggttttatttttgttcgtcggcgtcggtttgttcgattttttgtgtttcgtatggtggggacgttaatttaagattaata

SEQ ID NO: 19458 - DNA, 802 bp, Artificial Sequence
  chemically treated genomic DNA (Homo sapiens) CpG-island No: 19458
tattaatcttaaattaacgtccccaccatacgaaacacaaaaaatcgaacaaaccgacgccgacgaacaaaaataaaacctaacccccacaaaccgaaccgaacccccgaactaccgaaaccccgaaccccgaactatttaaccccgcacgaacgacgacgataacgaccacctacctatccctccgctaactccgaataaccgccctctaaccacgtaaacgcgcccccgaaccccaccgcgaccccgctcgcacgtccccacgacctcgccccgcgccccgaaccccaaacgcgcaaccgccgccgccgccgcccacacactaaactaacccgaaaaccgccgaaaccttttaaacccgaaccgtaccaccgcgcgaaacgaaaacgtccgaaaacgcccgaccgaaaaaaacgcgacgacaaaaaacgcaaacgaaaccgctactccccgaaaccaaaaacctcgcgcgcaaccctaacccccgcgacctaaaaaaaaacccgcccgaccaaccgacccccttcgctcgataacgcgttccgcgacgcgcgcctcccccgcgccccgactccccgcccgccgcctcgaacgaccccgaaacccgcgcgcgcccgcgccacaccccctcgaacctaaaacgcgcgtccgcctcgccccaccctaacgctcgaaaacgcgcccgaaatcacctaccaccgaaacgcgacctcgctaatcccgacctctcaaatacacccccgccgaaaaatcgcgtccccaactcaaaacacgcccccgacgatctctaacccgaaaaact

SEQ ID NO: 19459 - DNA, 802 bp, Artificial Sequence
  chemically treated genomic DNA (Homo sapiens) CpG-island No: 19459
tgttggttttgggttggcgtttttattatgcggggtataaggagtcgggtaggtcggcgtcgacgggtagggatagggtttgatttttataggtcgagtcggattttcgggttgtcggagtttcgggtttcgagttgtttggtttcgtacggacggcgacgatgacggttatttatttgttttttcgttggtttcgggtggtcgttttttggttacgtggacgcgttttcgagttttatcgcggtttcgttcgtacgtttttacggtttcgtttcgcgtttcgggttttaagcgcgtagtcgtcgtcgtcgtcgtttatatattgggttggttcgggggtcgtcggagttttttaaattcggatcgtattatcgcgcggggcgggggcgttcggggacgttcggtcgagggggacgcggcggtaggggacgtaggcggggtcgttgtttttcggggttagggatttcgcgcgtagttttgattttcgcgatttgaagggggattcgttcggttagtcgatttttttcgttcgatggcgcgtttcgcggcgcgcgtttttttcgcgtttcggtttttcgttcgtcgtttcgggcgatttcggaattcgcgcgcgttcgcgttatattttttcgggtttggggcgcgcgttcgtttcgttttattttggcgttcggagacgcgttcggggttatttgttatcggggcgcggtttcgttggtttcggttttttaggtgtattttcgtcgaggagtcgcgtttttagtttaagatacgttttcgacggtttttaattcggagggtt

SEQ ID NO: 19460 - DNA, 802 bp, Artificial Sequence
  chemically treated genomic DNA (Homo sapiens) CpG-island No: 19460
aaccctccgaattaaaaaccgtcgaaaacgtatcttaaactaaaaacgcgactcctcgacgaaaatacacctaaaaaaccgaaaccaacgaaaccgcgccccgataacaaataaccccgaacgcgtctccgaacgccaaaataaaacgaaacgaacgcgcgccccaaacccgaaaaaatataacgcgaacgcgcgcgaattccgaaatcgcccgaaacgacgaacgaaaaaccgaaacgcgaaaaaaacgcgcgccgcgaaacgcgccatcgaacgaaaaaaatcgactaaccgaacgaatcccccttcaaatcgcgaaaatcaaaactacgcgcgaaatccctaaccccgaaaaacaacgaccccgcctacgtcccctaccgccgcgtccccctcgaccgaacgtccccgaacgcccccgccccgcgcgataatacgatccgaatttaaaaaactccgacgacccccgaaccaacccaatatataaacgacgacgacgacgactacgcgcttaaaacccgaaacgcgaaacgaaaccgtaaaaacgtacgaacgaaaccgcgataaaactcgaaaacgcgtccacgtaaccaaaaaacgaccacccgaaaccaacgaaaaaacaaataaataaccgtcatcgtcgccgtccgtacgaaaccaaacaactcgaaacccgaaactccgacaacccgaaaatccgactcgacctataaaaatcaaaccctatccctacccgtcgacgccgacctacccgactccttataccccgcataataaaaacgccaacccaaaaccaaca

SEQ ID NO: 19461 - DNA, 805 bp, Artificial Sequence
  chemically treated genomic DNA (Homo sapiens) CpG-island No: 19461
gatcgtatacgttagtttcggtttttttttgttatttttttcgtcggtttttcgttcgttttttttttttttttttcgagtttagttttcgttcgtcgtaagtagtttttagttcggaaaggatataatatgtgcggtcgtattcgtgattttttggcgtagacgcggcgtttttgttcggatttggcgcgtgcgttgggggagttttatcggtcggagttgcggttgtgtttacgttttcgcggtagttgtggttatttcggttattttcgtcgttagcgttttcgtttgcgtttgtattcgcgtttcgtatgatcgtcgtcgcgtcgtttcgattttattttcgaagcgtaggttttacgtttcgttttttttgtggttttttttcgaagtttcgttttttgcgtacgatttcgtttatacgcgtttgcgtaggtttttggagagtttgattggcgcgtggttagttttcgttaagcggttttgtcgggggttttttgagattcggttagcggttgagaggttgcggttttttttagaaattttgttttttcgcgcgtaattcgattttagagcgttggtgtaaattgatttatagtcggttcggttttaggaagttaattttgacggggtttttgaagatatcgtggtcgtttattttagaggcgtatttcgcgaggtttcgtttttaagcgcgttttgtgattttagcgcgtttgcgttggcggggtttttttttttgtttttggaggttttagtgaggttttgcggtgtttggacggtttttcgtttcgttttttatttg

SEQ ID NO: 19462 - DNA, 805 bp, Artificial Sequence
  chemically treated genomic DNA (Homo sapiens) CpG-island No: 19462
caaataaaaaacgaaacgaaaaaccgtccaaacaccgcaaaacctcactaaaacctccaaaaacaaaaaaaaaaaccccgccaacgcaaacgcgctaaaatcacaaaacgcgcttaaaaacgaaacctcgcgaaatacgcctctaaaataaacgaccacgatatcttcaaaaaccccgtcaaaattaacttcctaaaaccgaaccgactataaatcaatttacaccaacgctctaaaatcgaattacgcgcgaaaaaacaaaatttctaaaaaaaaccgcaacctctcaaccgctaaccgaatctcaaaaaacccccgacaaaaccgcttaacgaaaactaaccacgcgccaatcaaactctccaaaaacctacgcaaacgcgtataaacgaaatcgtacgcaaaaaacgaaacttcgaaaaaaaaccacaaaaaaaacgaaacgtaaaacctacgcttcgaaaataaaatcgaaacgacgcgacgacgatcatacgaaacgcgaatacaaacgcaaacgaaaacgctaacgacgaaaataaccgaaataaccacaactaccgcgaaaacgtaaacacaaccgcaactccgaccgataaaactcccccaacgcacgcgccaaatccgaacaaaaacgccgcgtctacgccaaaaaatcacgaatacgaccgcacatattatatcctttccgaactaaaaactacttacgacgaacgaaaactaaactcgaaaaaaaaaaaaaaaaaacgaacgaaaaaccgacgaaaaaaataacaaaaaaaaaccgaaactaacgtatacgatc

SEQ ID NO: 19463 - DNA, 805 bp, Artificial Sequence
  chemically treated genomic DNA (Homo sapiens) CpG-island No: 19463
taggtaagaaacggggcgggaagtcgtttaggtatcgtagggttttattggggtttttagggataagggggaaggtttcgttagcgtaggcgcgttaaggttataaggcgcgtttaggggcggagtttcgcggggtgcgtttttgggataggcgattacggtgtttttaaaagtttcgttagggttggttttttggggtcggatcgattgtgggttagtttgtattagcgttttggaatcgagttacgcgcgaaagggtagagtttttggaggaaatcgtagttttttaatcgttgatcgggttttagaaggttttcggtagggtcgtttggcgggaattgattacgcgttagttaggttttttagggatttgcgtaggcgcgtgtgggcggagtcgtgcgtagggggcggggtttcgggaaggagttatagagagggcggggcgtaggatttgcgtttcgggggtggagtcggagcggcgcggcggcggttatgcgggacgcggatgtagacgtaggcggaggcgttgacggcggggatggtcggggtggttatagttgtcgcgggggcgtggatatagtcgtagtttcggtcggtggagtttttttagcgtacgcgttaggttcgggtagagacgtcgcgtttgcgttagggggttacgaatgcggtcgtatatattgtatttttttcgagttgggggttgtttgcggcggacgagggttggattcggggagaaggaaaggagggcgggcggggggtcgacggaaagggtagtagggggggatcggggttggcgtatacggtt

SEQ ID NO: 19464 - DNA, 805 bp, Artificial Sequence
  chemically treated genomic DNA (Homo sapiens) CpG-island No: 19464
aaccgtatacgccaaccccgatccccccctactaccctttccgtcgaccccccgcccgccctcctttccttctccccgaatccaaccctcgtccgccgcaaacaacccccaactcgaaaaaaatacaatatatacgaccgcattcgtaaccccctaacgcaaacgcgacgtctctacccgaacctaacgcgtacgctaaaaaaactccaccgaccgaaactacgactatatccacgcccccgcgacaactataaccaccccgaccatccccgccgtcaacgcctccgcctacgtctacatccgcgtcccgcataaccgccgccgcgccgctccgactccacccccgaaacgcaaatcctacgccccgccctctctataactccttcccgaaaccccgccccctacgcacgactccgcccacacgcgcctacgcaaatccctaaaaaacctaactaacgcgtaatcaattcccgccaaacgaccctaccgaaaaccttctaaaacccgatcaacgattaaaaaactacgatttcctccaaaaactctaccctttcgcgcgtaactcgattccaaaacgctaatacaaactaacccacaatcgatccgaccccaaaaaaccaaccctaacgaaacttttaaaaacaccgtaatcgcctatcccaaaaacgcaccccgcgaaactccgcccctaaacgcgccttataaccttaacgcgcctacgctaacgaaaccttcccccttatccctaaaaaccccaataaaaccctacgatacctaaacgacttcccgccccgtttcttaccta

SEQ ID NO: 19465 - DNA, 600 bp, Artificial Sequence
  chemically treated genomic DNA (Homo sapiens) CpG-island No: 19465
tttggtcgcgcggagggtgggaggtaagggttgagttcgcggtttttagacggcgaagtttacgcgttcgttttcgagggtagttttttcggttttcggttttcggttcggttttttcgtgttcgttttcggttttgtcggtttttttgttaggagcgggcgagagagcgcgtcggattcggcggttcggttcggggattttatttgtaggttgtattcgcggttttgtagcgtttttatcgttagttgtatggcggtcgcgacggcgtttattcgggtcggcgcgtattttaattatttttcgtcgcgcgtcgtcgtttcgggcgcgcgttggaatcgttcgtcgtcgtcggaagtagcgagaggggcgcgttcgtcgttcgcgtttttcggtttcgtttttttgtttcgttcgcgtttcggtttcgtttttcggtttaattgcgtttcgggaggagttttttcggggtttcgtttagtacgcgcgtatcgatcgttttggtcggcggattttttttaaagtaacgacgcgggggagttgggagtaggaattagtcgggttaggttggcgttatttgggagttgggatatggagaaggg

SEQ ID NO: 19466 - DNA, 600 bp, Artificial Sequence
  chemically treated genomic DNA (Homo sapiens) CpG-island No: 19466
cccttctccatatcccaactcccaaataacgccaacctaacccgactaattcctactcccaactcccccgcgtcgttactttaaaaaaaatccgccgaccaaaacgatcgatacgcgcgtactaaacgaaaccccgaaaaaactcctcccgaaacgcaattaaaccgaaaaacgaaaccgaaacgcgaacgaaacaaaaaaacgaaaccgaaaaacgcgaacgacgaacgcgcccctctcgctacttccgacgacgacgaacgattccaacgcgcgcccgaaacgacgacgcgcgacgaaaaataattaaaatacgcgccgacccgaataaacgccgtcgcgaccgccatacaactaacgataaaaacgctacaaaaccgcgaatacaacctacaaataaaatccccgaaccgaaccgccgaatccgacgcgctctctcgcccgctcctaacaaaaaaaccgacaaaaccgaaaacgaacacgaaaaaaccgaaccgaaaaccgaaaaccgaaaaaactaccctcgaaaacgaacgcgtaaacttcgccgtctaaaaaccgcgaactcaacccttacctcccaccctccgcgcgaccaaa

SEQ ID NO: 19467 - DNA, 600 bp, Artificial Sequence
  chemically treated genomic DNA (Homo sapiens) CpG-island No: 19467
tttttttttatgttttagtttttagatgacgttaatttggttcgattggtttttgtttttaattttttcgcgtcgttgttttgggaggggttcgtcggttagggcggtcgatgcgcgcgtgttaggcgggatttcggggggatttttttcggggcgtaattgggtcggggggcggggtcggggcgcggacggggtaggagggcggggtcgggaagcgcgggcggcgggcgcgtttttttcgttgttttcggcggcggcgggcggttttagcgcgcgttcggggcggcggcgcgcggcggggggtggttggggtgcgcgtcggttcgagtggacgtcgtcgcgatcgttatgtagttgacggtgaaggcgttgtagggtcgcgagtgtagtttgtaggtagggttttcgggtcgggtcgtcgggttcggcgcgttttttcgttcgtttttggtagggggatcggtagggtcgagggcgggtacggggaggtcgggtcgagggtcgggagtcgggagagttgttttcgggggcggacgcgtgggtttcgtcgtttgggggtcgcgggtttaatttttgttttttatttttcgcgcggttagg

SEQ ID NO: 19468 - DNA, 600 bp, Artificial Sequence
  chemically treated genomic DNA (Homo sapiens) CpG-island No: 19468
cctaaccgcgcgaaaaataaaaaacaaaaattaaacccgcgacccccaaacgacgaaacccacgcgtccgcccccgaaaacaactctcccgactcccgaccctcgacccgacctccccgtacccgccctcgaccctaccgatccccctaccaaaaacgaacgaaaaaacgcgccgaacccgacgacccgacccgaaaaccctacctacaaactacactcgcgaccctacaacgccttcaccgtcaactacataacgatcgcgacgacgtccactcgaaccgacgcgcaccccaaccaccccccgccgcgcgccgccgccccgaacgcgcgctaaaaccgcccgccgccgccgaaaacaacgaaaaaaacgcgcccgccgcccgcgcttcccgaccccgccctcctaccccgtccgcgccccgaccccgccccccgacccaattacgccccgaaaaaaatccccccgaaatcccgcctaacacgcgcgcatcgaccgccctaaccgacgaacccctcccaaaacaacgacgcgaaaaaattaaaaacaaaaaccaatcgaaccaaattaacgtcatctaaaaactaaaacataaaaaaaaa

SEQ ID NO: 19469 - DNA, 648 bp, Artificial Sequence
  chemically treated genomic DNA (Homo sapiens) CpG-island No: 19469
agttcgggcgcgaatttgggagggaggaaaggaagggtacgtcgtcgttttatagtcggcgattcgttcgggtcgtttcggagtttgggggggttttttacgttatttttgggtttcgcggtttcgttaggtttcgtaaacgcgcggcggcggcggcggtttttttttgttaggttcggtcgggcgttcgagtgggcgatcgcggagtagggtcggggttagaggtcgtttttttttcggaggtttttatttgttatagttatcgcgtagtttagttgtagcgtttgtttggtaggtagtcgttcgcgagttcggtttgttagggtttcgttttatcgaagtttttttttttttcgtttcgcgcgttagggtttcgttttttttttagcgtttagtttaatttcggttgttcgttgggtttcgatcggttgtgacgtttttgggagtgacgcgtcggcgcgggcgcggtgcgggtgagttggtcggcgtttggcgttgtttggattaatcgtttggtagcgtatttgaagttgttgtgatcgttggggcgattcgttttgggagggagttttaggtattttcgattacgttgcgatttttaaaggtaatgggatagagggttagacgttagtagggttgggtgttcgg

SEQ ID NO: 19470 - DNA, 648 bp, Artificial Sequence
  chemically treated genomic DNA (Homo sapiens) CpG-island No: 19470
ccgaacacccaaccctactaacgtctaaccctctatcccattacctttaaaaatcgcaacgtaatcgaaaatacctaaaactccctcccaaaacgaatcgccccaacgatcacaacaacttcaaatacgctaccaaacgattaatccaaacaacgccaaacgccgaccaactcacccgcaccgcgcccgcgccgacgcgtcactcccaaaaacgtcacaaccgatcgaaacccaacgaacaaccgaaattaaactaaacgctaaaaaaaaaacgaaaccctaacgcgcgaaacgaaaaaaaaaaaaacttcgataaaacgaaaccctaacaaaccgaactcgcgaacgactacctaccaaacaaacgctacaactaaactacgcgataactataacaaataaaaacctccgaaaaaaaaacgacctctaaccccgaccctactccgcgatcgcccactcgaacgcccgaccgaacctaacaaaaaaaaaccgccgccgccgccgcgcgtttacgaaacctaacgaaaccgcgaaacccaaaaataacgtaaaaaacccccccaaactccgaaacgacccgaacgaatcgccgactataaaacgacgacgtacccttcctttcctccctcccaaattcgcgcccgaact

SEQ ID NO: 19471 - DNA, 648 bp, Artificial Sequence
  chemically treated genomic DNA (Homo sapiens) CpG-island No: 19471
tcgggtatttagttttgttaacgtttaattttttgttttattgtttttagaggtcgtagcgtaatcgggaatgtttggggtttttttttagagcgggtcgttttagcgattataatagttttagatgcgttgttaagcgattggtttaggtagcgttaagcgtcgattagtttattcgtatcgcgttcgcgtcggcgcgttatttttagagacgttataatcggtcggagtttagcgagtagtcggagttgagttggacgttgaggggggggcggggttttgacgcgcggggcggggaagggaggggtttcggtggggcggggttttgataggtcgagttcgcgggcgattgtttgttaggtagacgttgtagttaagttgcgcggtggttgtggtaggtgagagttttcggaagggaggcggtttttggtttcgattttgtttcgcgatcgtttattcgggcgttcggtcgggtttggtagggaagggtcgtcgtcgtcgtcgcgcgtttgcgaggtttggcggggtcgcggggtttaggaatggcgtaaggggtttttttagatttcgagacggttcgagcgggtcgtcggttgtgggacggcggcgtgttttttttttttttttttttaggttcgcgttcgagtt

SEQ ID NO: 19472 - DNA, 648 bp, Artificial Sequence
  chemically treated genomic DNA (Homo sapiens) CpG-island No: 19472
aactcgaacgcgaacctaaaaaaaaaaaaaaaaaaaacacgccgccgtcccacaaccgacgacccgctcgaaccgtctcgaaatctaaaaaaaccccttacgccattcctaaaccccgcgaccccgccaaacctcgcaaacgcgcgacgacgacgacgacccttccctaccaaacccgaccgaacgcccgaataaacgatcgcgaaacaaaatcgaaaccaaaaaccgcctcccttccgaaaactctcacctaccacaaccaccgcgcaacttaactacaacgtctacctaacaaacaatcgcccgcgaactcgacctatcaaaaccccgccccaccgaaacccctcccttccccgccccgcgcgtcaaaaccccgcccccccctcaacgtccaactcaactccgactactcgctaaactccgaccgattataacgtctctaaaaataacgcgccgacgcgaacgcgatacgaataaactaatcgacgcttaacgctacctaaaccaatcgcttaacaacgcatctaaaactattataatcgctaaaacgacccgctctaaaaaaaaaccccaaacattcccgattacgctacgacctctaaaaacaataaaacaaaaaattaaacgttaacaaaactaaatacccga

SEQ ID NO: 19473 - DNA, 1185 bp, Artificial Sequence
  chemically treated genomic DNA (Homo sapiens) CpG-island No: 19473
cgtcgcgcggcgtagcgcgggatagtacgttttttcgtttgcgcggcgttcgttcggtcggttatttgcgtttcgtcgtcgtcgtttttcgcgttcgtagtttcgaagtgtacgatcgttttcgggggttgagtttcgtcggtttatttaatcggcgggggcgggggcgggcgtttgggttgagcggattcgttttaggcgaggcgtgcggggcggggtttcggttattatttttcgtgcgggcggggcggggcgagggtaggtgcgcgcgtattttaggttagtttttgtttttcgggtatttgcgttggaggtcggttcgtcggttgtttgttatattcgttgtcgttgttttgtatttttaatttcggcgggtacgggtgtagtttcgcgtagtgttttcgtatttttatcgtcggttcggtttcgtttttattgttcggttttttcgtttgtttcggcggtttcgcgcgttcgcggagggttttattttcgtcggtagcgtggttacgttttttttgggttgtttttcggtttttgggcggggttttttgtcgcgttattttttcgggaattttcgtttgttcgcgggttaagtcggttttattgggtagtttttttttgatttttttttcggagagggcggggcggtcgagcgtttcgaggttagacgtcgtcgttcgagagacgagggggcgtgtaggcggtgacgttttgtaaagtggtcggcgtgtttattattatcgagttttcgcgggtttgtagagtttggcggatttagattttttttcggagcgggatgcggttttatcgcggttttatatttttcgtcggtttttcgagttttcgggggcggggtttgtgtttttattttcggattttatagttatgatatcggaagtcggaagcgtggtagggaagggcgatcgcgaaattgggattttttcggagcgtcggggttttattagcgtttatagttcgtcgtttttattttttttacgtttgacggattttgttgataggtgtggtttttttttttaaagatagggttttattcgtgggcgtttcgtcgttttcgaaatttttttcggacgtttaggttttttttttttttttgggttttagttcgtttttgtttcgcgtttttggagtattggttaaggcgggtcgatttaggatttaggt

SEQ ID NO: 19474 - DNA, 1185 bp, Artificial Sequence
  chemically treated genomic DNA (Homo sapiens) CpG-island No: 19474
acctaaatcctaaatcgacccgccttaaccaatactccaaaaacgcgaaacaaaaacgaactaaaacccaaaaaaaaaaaaaaaacctaaacgtccgaaaaaaatttcgaaaacgacgaaacgcccacgaataaaaccctatctttaaaaaaaaaaaccacacctatcaacaaaatccgtcaaacgtaaaaaaaataaaaacgacgaactataaacgctaataaaaccccgacgctccgaaaaaatcccaatttcgcgatcgcccttccctaccacgcttccgacttccgatatcataactataaaatccgaaaataaaaacacaaaccccgcccccgaaaactcgaaaaaccgacgaaaaatataaaaccgcgataaaaccgcatcccgctccgaaaaaaaatctaaatccgccaaactctacaaacccgcgaaaactcgataataataaacacgccgaccactttacaaaacgtcaccgcctacacgccccctcgtctctcgaacgacgacgtctaacctcgaaacgctcgaccgccccgccctctccgaaaaaaaaatcaaaaaaaaactacccaataaaaccgacttaacccgcgaacaaacgaaaattcccgaaaaaataacgcgacaaaaaaccccgcccaaaaaccgaaaaacaacccaaaaaaaacgtaaccacgctaccgacgaaaataaaaccctccgcgaacgcgcgaaaccgccgaaacaaacgaaaaaaccgaacaataaaaacgaaaccgaaccgacgataaaaatacgaaaacactacgcgaaactacacccgtacccgccgaaattaaaaatacaaaacaacgacaacgaatataacaaacaaccgacgaaccgacctccaacgcaaatacccgaaaaacaaaaactaacctaaaatacgcgcgcacctaccctcgccccgccccgcccgcacgaaaaataataaccgaaaccccgccccgcacgcctcgcctaaaacgaatccgctcaacccaaacgcccgcccccgcccccgccgattaaataaaccgacgaaactcaacccccgaaaacgatcgtacacttcgaaactacgaacgcgaaaaacgacgacgacgaaacgcaaataaccgaccgaacgaacgccgcgcaaacgaaaaaacgtactatcccgcgctacgccgcgcgacg

SEQ ID NO: 19475 - DNA, 1185 bp, Artificial Sequence
  chemically treated genomic DNA (Homo sapiens) CpG-island No: 19475
atttgggttttgaatcggttcgttttggttagtgttttagaagcgcggagtaggaacgggttggggtttaaaaaagaggggggagtttgaacgttcgggggaagtttcggaggcggcggaacgtttacggatggaattttgtttttggggaaaaggattatatttgttagtagagttcgttagacgtgagaagggtgggagcggcggattgtgaacgttggtagggtttcggcgtttcgagaaagttttagtttcgcggtcgtttttttttattacgttttcggttttcggtgttatagttgtgggattcggaagtaaaaatataagtttcgttttcgagaattcgggaagtcggcgagaagtgtgaggtcgcggtagggtcgtatttcgtttcggagagaagtttgagttcgttaggttttgtaggttcgcggaagttcggtaatgataagtacgtcggttattttgtagggcgttatcgtttatacgttttttcgtttttcggacggcggcgtttagtttcggggcgttcggtcgtttcgtttttttcgggggaggaattaagaagagattgtttaatagggtcggtttgattcgcgaataggcgagggttttcgggggagtggcgcggtagaaggtttcgtttaggagtcgagggatagtttagaggaggcgtggttacgttgtcggcggaagtggagtttttcgcgagcgcgcgaggtcgtcggggtaggcggggaaatcggatagtaggggcggggtcgggtcggcgatggggatgcgggagtattacgcggagttgtattcgtgttcgtcggaattggggatgtagagtagcggtagcgggtatggtaggtagtcggcgggtcggtttttagcgtaggtgttcgagaggtaggggttggtttgggatgcgcgcgtatttgttttcgtttcgtttcgttcgtacgaggggtggtggtcgaggtttcgtttcgtacgtttcgtttgaggcgggttcgtttagtttaggcgttcgttttcgttttcgtcgattaaatgggtcggcggggtttagttttcggaaacggtcgtatatttcggggttgcgagcgcggagggcgacgacgacgaagcgtaggtaatcggtcgggcgggcgtcgcgtaggcggaggagcgtattgtttcgcgttgcgtcgcgcggcg

SEQ ID NO: 19476 - DNA, 1185 bp, Artificial Sequence
  chemically treated genomic DNA (Homo sapiens) CpG-island No: 19476
cgccgcgcgacgcaacgcgaaacaatacgctcctccgcctacgcgacgcccgcccgaccgattacctacgcttcgtcgtcgtcgccctccgcgctcgcaaccccgaaatatacgaccgtttccgaaaactaaaccccgccgacccatttaatcgacgaaaacgaaaacgaacgcctaaactaaacgaacccgcctcaaacgaaacgtacgaaacgaaacctcgaccaccacccctcgtacgaacgaaacgaaacgaaaacaaatacgcgcgcatcccaaaccaacccctacctctcgaacacctacgctaaaaaccgacccgccgactacctaccatacccgctaccgctactctacatccccaattccgacgaacacgaatacaactccgcgtaatactcccgcatccccatcgccgacccgaccccgcccctactatccgatttccccgcctaccccgacgacctcgcgcgctcgcgaaaaactccacttccgccgacaacgtaaccacgcctcctctaaactatccctcgactcctaaacgaaaccttctaccgcgccactcccccgaaaaccctcgcctattcgcgaatcaaaccgaccctattaaacaatctcttcttaattcctcccccgaaaaaaacgaaacgaccgaacgccccgaaactaaacgccgccgtccgaaaaacgaaaaaacgtataaacgataacgccctacaaaataaccgacgtacttatcattaccgaacttccgcgaacctacaaaacctaacgaactcaaacttctctccgaaacgaaatacgaccctaccgcgacctcacacttctcgccgacttcccgaattctcgaaaacgaaacttatatttttacttccgaatcccacaactataacaccgaaaaccgaaaacgtaataaaaaaaaacgaccgcgaaactaaaactttctcgaaacgccgaaaccctaccaacgttcacaatccgccgctcccacccttctcacgtctaacgaactctactaacaaatataatccttttccccaaaaacaaaattccatccgtaaacgttccgccgcctccgaaacttcccccgaacgttcaaactcccccctcttttttaaaccccaacccgttcctactccgcgcttctaaaacactaaccaaaacgaaccgattcaaaacccaaat

SEQ ID NO: 19477 - DNA, 721 bp, Artificial Sequence
  chemically treated genomic DNA (Homo sapiens) CpG-island No: 19477
ggtttcgcggtcgttatgtttatcgtttttatgttatgtttatcgtcgttatgtttatcgtcgttaaagtttattatcgttatgtttattcgttgttaatgtttatcgtcgttaatatttattgtcgtcgttttttttttattttttagttattttttacggatttttttcgcgtcgcgattattaatataatttttattattgttatatcgatttatttttttggtttattgttatagttttttcgtttcggttattgcgacgaattttttttttagtcgttttacgtattttgttttattacgtagtggttattattatatatttatttgcgtttaatattttttaaatatcgattattttacgtattttcgtttcgttataattattttaatatatttattttcgtttaaaatttttatgtattggtttttttacgtattttcgttatacggaattgtaattattttgatgtatttatttttatttatgttttttgtttattgcggttatttcgtatgtttttagttattatcgttttttttatcgtagatattcgtaataggatttgtcgcgatattatagttgggggcggatgggggacgcgttttaatgcgagcggataggatattatcggggtagaacggtataatagtaagtttttgaatatttcggatttggttttttagaataaaggattttagggtttaaatttcgttta

SEQ ID NO: 19478 - DNA, 721 bp, Artificial Sequence
  chemically treated genomic DNA (Homo sapiens) CpG-island No: 19478
taaacgaaatttaaaccctaaaatcctttattctaaaaaaccaaatccgaaatattcaaaaacttactattataccgttctaccccgataatatcctatccgctcgcattaaaacgcgtcccccatccgcccccaactataatatcgcgacaaatcctattacgaatatctacgataaaaaaaacgataataactaaaaacatacgaaataaccgcaataaacaaaaaacataaataaaaataaatacatcaaaataattacaattccgtataacgaaaatacgtaaaaaaaccaatacataaaaattttaaacgaaaataaatatattaaaataattataacgaaacgaaaatacgtaaaataatcgatatttaaaaaatattaaacgcaaataaatatataataataaccactacgtaataaaacaaaatacgtaaaacgactaaaaaaaaaattcgtcgcaataaccgaaacgaaaaaactataacaataaaccaaaaaaataaatcgatataacaataataaaaattatattaataatcgcgacgcgaaaaaaatccgtaaaaaataactaaaaaataaaaaaaaaacgacgacaataaatattaacgacgataaacattaacaacgaataaacataacgataataaactttaacgacgataaacataacgacgataaacataacataaaaacgataaacataacgaccgcgaaacc

SEQ ID NO: 19479 - DNA, 721 bp, Artificial Sequence
  chemically treated genomic DNA (Homo sapiens) CpG-island No: 19479
taaacggaatttgggttttaaagttttttgttttggagaattagattcggaatgtttagaggtttgttgttgtgtcgttttgtttcgatggtattttgttcgttcgtattggggcgcgttttttattcgtttttaattgtggtgtcgcgataggttttattgcgggtgtttgcggtgggaagggcggtggtgattgggagtatgcggggtaatcgtagtgggtaagggatatgggtggaggtgggtatattagggtgattgtagtttcgtgtggcgagggtacgtggggggattagtgtatagggattttaggcggaggtaggtatattggagtgattgtggcggggcgaaggtacgtgaagtgatcggtatttagggggtgttgagcgtaggtaggtgtataatagtgattattgcgtggtggagtagggtacgtggggcgattggggggggaattcgtcgtagtgatcgaggcgaggaggttatggtagtggattagggggatgagtcggtgtgatagtggtgggggttgtgttggtggtcgcggcgcggggagagttcgtaggaagtggttgggaggtagggggaaggcggcgatagtgggtattggcggcggtgggtattggtagcgggtaggtatggcggtggtggattttggcggcggtaggtatggcggcggtgggtatggtatggaggcggtgggtatggcggtcgcggggtt

SEQ ID NO: 19480 - DNA, 721 bp, Artificial Sequence
  chemically treated genomic DNA (Homo sapiens) CpG-island No: 19480
aaccccgcgaccgccatacccaccgcctccataccatacccaccgccgccatacctaccgccgccaaaatccaccaccgccatacctacccgctaccaatacccaccgccgccaatacccactatcgccgccttccccctacctcccaaccacttcctacgaactctccccgcgccgcgaccaccaacacaacccccaccactatcacaccgactcatccccctaatccactaccataacctcctcgcctcgatcactacgacgaattccccccccaatcgccccacgtaccctactccaccacgcaataatcactattatacacctacctacgctcaacaccccctaaataccgatcacttcacgtaccttcgccccgccacaatcactccaatatacctacctccgcctaaaatccctatacactaatccccccacgtaccctcgccacacgaaactacaatcaccctaatatacccacctccacccatatcccttacccactacgattaccccgcatactcccaatcaccaccgcccttcccaccgcaaacacccgcaataaaacctatcgcgacaccacaattaaaaacgaataaaaaacgcgccccaatacgaacgaacaaaataccatcgaaacaaaacgacacaacaacaaacctctaaacattccgaatctaattctccaaaacaaaaaactttaaaacccaaattccgttta

SEQ ID NO: 19481 - DNA, 708 bp, Artificial Sequence
  chemically treated genomic DNA (Homo sapiens) CpG-island No: 19481
cgagggtttttttgagcgtcggagtttataggtttcgttttgtttcgaaagtttcgtaatcgaggcggaggcgatcgagttttcgatttttttagaacgttgttataagaagggggaacgtcggaatagtgtattatcgggcggcggtcggggcggcggtaggagggcgggcggggggtagggtttcgggggattgggcgggttatggcggaggacggcgaggaggcggagttttatttcgcggcgttttatataagtgggtagtggtcgcgattgcgcgtagatattgatttttagcgtttcggttttagcgttatggcgttttttaggaagtttttcgttgggggaaattggaagatgaacgggcggaagtagagtttgggggagtttatcggtattttgaacgcggttaaggtgtcggtcgatatcggtaagttttcgtcgaggaggggtttggtcgggtcggggtcggggtcggggtaggagtggtagcgttttttttcgaggtttcgaggtttcgaggtcggtattcgcgcggatttgatgtagggttgtgggacgagggtcgttggggttcgggtaggggtttcgtagtcgtagtttcgtcggtgcgtcgagggggtagggcggagtatatgatgttttttggattatggggtaggtaaggacgttttgggttttttggaggaaggtggtttcggggcgcgt

SEQ ID NO: 19482 - DNA, 708 bp, Artificial Sequence
  chemically treated genomic DNA (Homo sapiens) CpG-island No: 19482
acgcgccccgaaaccaccttcctccaaaaaacccaaaacgtccttacctaccccataatccaaaaaacatcatatactccgccctaccccctcgacgcaccgacgaaactacgactacgaaacccctacccgaaccccaacgaccctcgtcccacaaccctacatcaaatccgcgcgaataccgacctcgaaacctcgaaacctcgaaaaaaaacgctaccactcctaccccgaccccgaccccgacccgaccaaacccctcctcgacgaaaacttaccgatatcgaccgacaccttaaccgcgttcaaaataccgataaactcccccaaactctacttccgcccgttcatcttccaatttcccccaacgaaaaacttcctaaaaaacgccataacgctaaaaccgaaacgctaaaaatcaatatctacgcgcaatcgcgaccactacccacttatataaaacgccgcgaaataaaactccgcctcctcgccgtcctccgccataacccgcccaatcccccgaaaccctaccccccgcccgccctcctaccgccgccccgaccgccgcccgataatacactattccgacgttcccccttcttataacaacgttctaaaaaaatcgaaaactcgatcgcctccgcctcgattacgaaactttcgaaacaaaacgaaacctataaactccgacgctcaaaaaaaccctcg

SEQ ID NO: 19483 - DNA, 708 bp, Artificial Sequence
  chemically treated genomic DNA (Homo sapiens) CpG-island No: 19483
gcgcgtttcggggttatttttttttaggagatttaaaacgtttttatttgttttatagtttaaggggtattatgtgtttcgttttgttttttcgacgtatcgacggggttgcggttgcgaggtttttgttcggattttagcggttttcgttttatagttttgtattaggttcgcgcggatatcggtttcggggtttcggggtttcgggagagggcgttgttatttttgtttcggtttcggtttcggttcggttagattttttttcggcgagggtttatcggtgtcggtcggtattttggtcgcgtttagagtgtcgatgagtttttttagattttgttttcgttcgtttattttttagttttttttaacgaagaattttttggagggcgttatggcgttggagtcgaggcgttgaaggttagtgtttgcgcgtagtcgcggttattgtttatttatatagagcgtcgcgaagtggaatttcgttttttcgtcgtttttcgttatggttcgtttagtttttcggagttttgtttttcgttcgtttttttgtcgtcgtttcggtcgtcgttcgatgatgtattgtttcgacgttttttttttttgtggtaacgttttaggagagtcgggggttcggtcgttttcgtttcgattgcggggttttcgggataaggcgagatttgtgagtttcggcgtttaggggaattttcg

SEQ ID NO: 19484 - DNA, 708 bp, Artificial Sequence
  chemically treated genomic DNA (Homo sapiens) CpG-island No: 19484
cgaaaattcccctaaacgccgaaactcacaaatctcgccttatcccgaaaaccccgcaatcgaaacgaaaacgaccgaacccccgactctcctaaaacgttaccacaaaaaaaaaaaacgtcgaaacaatacatcatcgaacgacgaccgaaacgacgacaaaaaaacgaacgaaaaacaaaactccgaaaaactaaacgaaccataacgaaaaacgacgaaaaaacgaaattccacttcgcgacgctctatataaataaacaataaccgcgactacgcgcaaacactaaccttcaacgcctcgactccaacgccataacgccctccaaaaaattcttcgttaaaaaaaactaaaaaataaacgaacgaaaacaaaatctaaaaaaactcatcgacactctaaacgcgaccaaaataccgaccgacaccgataaaccctcgccgaaaaaaaatctaaccgaaccgaaaccgaaaccgaaacaaaaataacaacgccctctcccgaaaccccgaaaccccgaaaccgatatccgcgcgaacctaatacaaaactataaaacgaaaaccgctaaaatccgaacaaaaacctcgcaaccgcaaccccgtcgatacgtcgaaaaaacaaaacgaaacacataataccccttaaactataaaacaaataaaaacgttttaaatctcctaaaaaaaaataaccccgaaacgcgc

SEQ ID NO: 19485 - DNA, 551 bp, Artificial Sequence
  chemically treated genomic DNA (Homo sapiens) CpG-island No: 19485
cgcgttcgtacgtgcgttttcgtcggtagtttttgatttatcgggggtttcgggttatatgcgttcgcgcggttttataggcgtttttttcgttcgtcgttcgggagtcgtagtcgtcgtcgttattgttattttcgtttttttagcgtcgtcgtcgttatcgttatcgttatcgttattattatcgtttgagtttgtagtttcgaggtgaagttttcgttaggtttagagtttttgtggtttttttttttcgtcgcggcgtttttgttttttttattcggtgtcgttgcgtattttttcgtatttttggttcggtgtagttgcgtatttgtttcgtcgttcgcgtttagggcgttttttttttttggtttttttcgttcgttgttttcgttttttggttttttgcgcgtttatttttaattgcgtttttttatttttgtttgtttttttttcggtgttcgtttttatttacggttttatttgtttttaagttgggagttttttcgggcggtgtatttttattttagagcgttttttttggtttgtatttg

SEQ ID NO: 19486 - DNA, 551 bp, Artificial Sequence
  chemically treated genomic DNA (Homo sapiens) CpG-island No: 19486
caaatacaaaccaaaaaaaacgctctaaaataaaaatacaccgcccgaaaaaactcccaacttaaaaacaaataaaaccgtaaataaaaacgaacaccgaaaaaaaaacaaacaaaaataaaaaaacgcaattaaaaataaacgcgcaaaaaaccaaaaaacgaaaacaacgaacgaaaaaaaccaaaaaaaaaaaacgccctaaacgcgaacgacgaaacaaatacgcaactacaccgaaccaaaaatacgaaaaaatacgcaacgacaccgaataaaaaaaacaaaaacgccgcgacgaaaaaaaaaaaccacaaaaactctaaacctaacgaaaacttcacctcgaaactacaaactcaaacgataataataacgataacgataacgataacgacgacgacgctaaaaaaacgaaaataacaataacgacgacgactacgactcccgaacgacgaacgaaaaaaacgcctataaaaccgcgcgaacgcatataacccgaaacccccgataaatcaaaaactaccgacgaaaacgcacgtacgaacgcg

SEQ ID NO: 19487 - DNA, 551 bp, Artificial Sequence
  chemically treated genomic DNA (Homo sapiens) CpG-island No: 19487
taaatgtaaattaaaagggacgttttaggataaaaatgtatcgttcggagaggtttttaatttagaaataaatagaatcgtagatgagggcgagtatcgggagagaggtaggtaagggtggagaggcgtagttagagataggcgcgtagagggttagaaagcgaaggtagcgggcggggaaggttagggagggaaggcgttttgggcgcgggcggcggagtaggtgcgtagttgtatcgggttagagatgcggagaggtgcgtagcggtatcgggtaaaggaggtaggggcgtcgcggcgaagggagggggttataggggttttgggtttggcgggggttttatttcgggattgtagatttagacggtggtagtggcggtggcggtggcggtggcgacggcggcgttgagagagcgggagtggtagtggcggcggcggttgcggttttcgggcggcgggcggaggaggcgtttatagggtcgcgcgggcgtatgtgattcggagttttcgatgagttaggagttgtcggcggaggcgtacgtacgagcgcg

SEQ ID NO: 19488 - DNA, 551 bp, Artificial Sequence
  chemically treated genomic DNA (Homo sapiens) CpG-island No: 19488
cgcgctcgtacgtacgcctccgccgacaactcctaactcatcgaaaactccgaatcacatacgcccgcgcgaccctataaacgcctcctccgcccgccgcccgaaaaccgcaaccgccgccgccactaccactcccgctctctcaacgccgccgtcgccaccgccaccgccaccgccactaccaccgtctaaatctacaatcccgaaataaaacccccgccaaacccaaaacccctataaccccctcccttcgccgcgacgcccctacctcctttacccgataccgctacgcacctctccgcatctctaacccgatacaactacgcacctactccgccgcccgcgcccaaaacgccttccctccctaaccttccccgcccgctaccttcgctttctaaccctctacgcgcctatctctaactacgcctctccacccttacctacctctctcccgatactcgccctcatctacgattctatttatttctaaattaaaaacctctccgaacgatacatttttatcctaaaacgtcccttttaatttacattta

SEQ ID NO: 19489 - DNA, 1014 bp, Artificial Sequence
  chemically treated genomic DNA (Homo sapiens) CpG-island No: 19489
tttcgcgtcgggttcgcgggttttttatatttcgttacggttagtttttttcgcgtttcggttttttcggtttcggtttcggttaattcgcgttgcgttttttttttttcggtttttttttttttttttttcgcggtttgtttcgcgttttttttttcgcgttttttttttggtttttttttttttcgttttttcgcgttttttttttttttttttttttttttttttttattttttttttttaggtttttttttttcgtcgttcgtttttttgtgcgagtcgtcggacgtatcgtttagttcgttcgtagtttcgcgtcgggtcggggtttcgggtcgggttatttcggagggatcgcggtttcggggaggggttaggaggggggagagggagtcgattgtcggggaaggggcgggggtcgcgggcgaggcggtcgaggggttcgggatcgcgcgggtgcgggttgcgttaggcgggcgcgggcggcggcgggtcggaatcgcgtcgagggtcgggcgggtcgcggggtcgggcggcgcggcgggggcgggcggcgcggttcggggtatttcgggcggttagggggaggcggcgagttcggggaggtggggagtagagcggggatcggggtttgtttcgggggtcggcgggcgattggggttaggcggggaaaaggggggatgggggtcgtttttcgggggggtcggggtcgtcgtcgtcgtcgtcgcggcggcgattgaggtcgagaagaggagaggggggcgggggagttgtcgtcgtcgttttttagaggcgtcggagttcggaatttcgttcggagttagttagtcgtttcgagttattagtaggtaaggtttgcggtcgtttgggtttcgggttcgcggggttttgtttcgttcgggtttcggtttgcggttttttatttttattttttttagtttttttttttgtcgtcgtcgtttttatttgttatttttttaatttcgtttttttattgcgggttttgtttggtt

SEQ ID NO: 19490 - DNA, 1014 bp, Artificial Sequence
  chemically treated genomic DNA (Homo sapiens) CpG-island No: 19490
aaccaaacaaaacccgcaataaaaaaacgaaattaaaaaaataacaaataaaaacgacgacgacaaaaaaaaaaactaaaaaaaataaaaataaaaaaccgcaaaccgaaacccgaacgaaacaaaaccccgcgaacccgaaacccaaacgaccgcaaaccttacctactaataactcgaaacgactaactaactccgaacgaaattccgaactccgacgcctctaaaaaacgacgacgacaactcccccgcccccctctcctcttctcgacctcaatcgccgccgcgacgacgacgacgacgaccccgacccccccgaaaaacgacccccatccccccttttccccgcctaaccccaatcgcccgccgacccccgaaacaaaccccgatccccgctctactccccacctccccgaactcgccgcctccccctaaccgcccgaaataccccgaaccgcgccgcccgcccccgccgcgccgcccgaccccgcgacccgcccgaccctcgacgcgattccgacccgccgccgcccgcgcccgcctaacgcaacccgcacccgcgcgatcccgaacccctcgaccgcctcgcccgcgacccccgccccttccccgacaatcgactccctctcccccctcctaacccctccccgaaaccgcgatccctccgaaataacccgacccgaaaccccgacccgacgcgaaactacgaacgaactaaacgatacgtccgacgactcgcacaaaaaaacgaacgacgaaaaaaaaaaacctaaaaaaaaaaaataaaaaaaaaaaaaaaaaaaaaaaaaaaaaaaacgcgaaaaaacgaaaaaaaaaaaaaccaaaaaaaaaacgcgaaaaaaaaaacgcgaaacaaaccgcgaaaaaaaaaaaaaaaaaaaccgaaaaaaaaaaaacgcaacgcgaattaaccgaaaccgaaaccgaaaaaaccgaaacgcgaaaaaaactaaccgtaacgaaatataaaaaacccgcgaacccgacgcgaaa

SEQ ID NO: 19491 - DNA, 1014 bp, Artificial Sequence
  chemically treated genomic DNA (Homo sapiens) CpG-island No: 19491
ggttaggtagagttcgtagtggggggacgggattgggaaaataataaatggaggcggcggcggtaggagggggaattgggaggggtgggggtggggagtcgtaggtcggagttcgggcgggatagaatttcgcgggttcggggtttaggcggtcgtagattttatttgttggtagttcgggacggttggttggtttcgagcgggatttcgggtttcggcgtttttggggggcggcggcggtagttttttcgtttttttttttttttttcggttttagtcgtcgtcgcgacgacggcggcggcggtttcgattttttcggagggcggtttttattttttttttttttcgtttggttttaatcgttcgtcggttttcggagtaaatttcgattttcgttttgttttttattttttcgggttcgtcgtttttttttggtcgttcggaatgtttcgggtcgcgtcgttcgttttcgtcgcgtcgttcggtttcgcggttcgttcggttttcggcgcggtttcgattcgtcgtcgttcgcgttcgtttagcgtagttcgtattcgcgcgatttcgggtttttcggtcgtttcgttcgcggttttcgtttttttttcggtagtcggttttttttttttttttttagttttttttcgaagtcgcggttttttcgaaatggttcggttcgaggtttcgattcggcgcggggttgcggacgggttgggcggtgcgttcggcgattcgtataggaaagcggacggcgaagggagggagtttgggagagggggatgggagaagggaggaagagggagaaggagggagcgcggaggaacggaggagagaggggttaggagggagacgcgagggagggagcgcgaggtaagtcgcgaggggggagagagggggagtcggagagggggaggcgtagcgcgagttggtcgaggtcgaggtcgagggggtcggggcgcggggagggttagtcgtggcggaatgtggggagttcgcgggttcggcgcggga

SEQ ID NO: 19492 - DNA, 1014 bp, Artificial Sequence
  chemically treated genomic DNA (Homo sapiens) CpG-island No: 19492
tcccgcgccgaacccgcgaactccccacattccgccacgactaaccctccccgcgccccgaccccctcgacctcgacctcgaccaactcgcgctacgcctccccctctccgactccccctctctcccccctcgcgacttacctcgcgctccctccctcgcgtctccctcctaacccctctctcctccgttcctccgcgctccctccttctccctcttcctcccttctcccatccccctctcccaaactccctcccttcgccgtccgctttcctatacgaatcgccgaacgcaccgcccaacccgtccgcaaccccgcgccgaatcgaaacctcgaaccgaaccatttcgaaaaaaccgcgacttcgaaaaaaaactaaaaaaaaaaaaaaaaaaccgactaccgaaaaaaaaacgaaaaccgcgaacgaaacgaccgaaaaacccgaaatcgcgcgaatacgaactacgctaaacgaacgcgaacgacgacgaatcgaaaccgcgccgaaaaccgaacgaaccgcgaaaccgaacgacgcgacgaaaacgaacgacgcgacccgaaacattccgaacgaccaaaaaaaaacgacgaacccgaaaaaataaaaaacaaaacgaaaatcgaaatttactccgaaaaccgacgaacgattaaaaccaaacgaaaaaaaaaaaaaataaaaaccgccctccgaaaaaatcgaaaccgccgccgccgtcgtcgcgacgacgactaaaaccgaaaaaaaaaaaaaaaaacgaaaaaactaccgccgccgccccccaaaaacgccgaaacccgaaatcccgctcgaaaccaaccaaccgtcccgaactaccaacaaataaaatctacgaccgcctaaaccccgaacccgcgaaattctatcccgcccgaactccgacctacgactccccacccccacccctcccaattccccctcctaccgccgccgcctccatttattattttcccaatcccgtccccccactacgaactctacctaacc

SEQ ID NO: 19493 - DNA, 645 bp, Artificial Sequence
  chemically treated genomic DNA (Homo sapiens) CpG-island No: 19493
cgcgtaaggttcgtcgcgcgcgttttaattttttggtgttttttttggacgcggcgttgatcggggagttggaggtggtgtagtaggcggtgaaggaggtgagcgttgttgagcgggaggtgggtacggcgggggtatcgtagatgttagtcgcgggattgagttttttttttttttcggtgtatttagatgaacgattcgagttagtttaacgaggagggtattattgttttgtataacgttatttgcggcgttaattattttatcgtggatttttttattatcgcgggtgttaatgttaattttttcgatagttacggttggtgagtttcgattcgcgcggtgggttgggtttttcgtgggcggacgcgtagttttttacgtatcgtttttcgtaattttttatttttacgtttaggatatttttgtattgcgcggcgtcgtgtaacgatatagttatttgtatggcgttggtgtagtacggcgttgtaattttcgttattacgtttagcgacggcgttatcgttttcgagaagtgcgatttttatcgcgagggttatgttgattgcgttatttatttggtaggtgcgaggtagggttgttggcgtttgggtatttggcgggtgcgtaggagcggggagggga

SEQ ID NO: 19494 - DNA, 645 bp, Artificial Sequence
  chemically treated genomic DNA (Homo sapiens) CpG-island No: 19494
tcccctccccgctcctacgcacccgccaaatacccaaacgccaacaaccctacctcgcacctaccaaataaataacgcaatcaacataaccctcgcgataaaaatcgcacttctcgaaaacgataacgccgtcgctaaacgtaataacgaaaattacaacgccgtactacaccaacgccatacaaataactatatcgttacacgacgccgcgcaatacaaaaatatcctaaacgtaaaaataaaaaattacgaaaaacgatacgtaaaaaactacgcgtccgcccacgaaaaacccaacccaccgcgcgaatcgaaactcaccaaccgtaactatcgaaaaaattaacattaacacccgcgataataaaaaaatccacgataaaataattaacgccgcaaataacgttatacaaaacaataataccctcctcgttaaactaactcgaatcgttcatctaaatacaccgaaaaaaaaaaaaaactcaatcccgcgactaacatctacgatacccccgccgtacccacctcccgctcaacaacgctcacctccttcaccgcctactacaccacctccaactccccgatcaacgccgcgtccaaaaaaaacaccaaaaaattaaaacgcgcgcgacgaaccttacgcg

SEQ ID NO: 19495 - DNA, 645 bp, Artificial Sequence
  chemically treated genomic DNA (Homo sapiens) CpG-island No: 19495
tttttttttcgtttttgcgtattcgttaggtatttaggcgttagtagttttgtttcgtatttgttaggtaggtggcgtagttagtataattttcgcggtaagggtcgtatttttcgaaggcggtggcgtcgtcgttgagcgtggtggcgaagattgtagcgtcgtgttgtattagcgttatgtagatgattgtgtcgttgtacgacgtcgcgtagtgtaagggtgttttaggcgtgggggtggggggttgcggggaacgatgcgtgagaggttgcgcgttcgtttacgggggatttagtttatcgcgcgggtcggggtttattagtcgtggttgtcgggggagttgatattggtattcgcggtgatgaggaaatttacgatagagtagttggcgtcgtagatggcgttgtgtaaggtagtgatgtttttttcgttgggttggttcgggtcgtttatttgagtgtatcgggggagggggaagatttagtttcgcggttggtatttgcgatgttttcgtcgtgtttatttttcgtttagtagcgtttattttttttatcgtttgttgtattatttttagtttttcggttagcgtcgcgtttaggaggagtattagagggttgaggcgcgcgcggcgggttttgcgcg

SEQ ID NO: 19496 - DNA, 645 bp, Artificial Sequence
  chemically treated genomic DNA (Homo sapiens) CpG-island No: 19496
cgcgcaaaacccgccgcgcgcgcctcaaccctctaatactcctcctaaacgcgacgctaaccgaaaaactaaaaataatacaacaaacgataaaaaaaataaacgctactaaacgaaaaataaacacgacgaaaacatcgcaaataccaaccgcgaaactaaatcttccccctcccccgatacactcaaataaacgacccgaaccaacccaacgaaaaaaacatcactaccttacacaacgccatctacgacgccaactactctatcgtaaatttcctcatcaccgcgaataccaatatcaactcccccgacaaccacgactaataaaccccgacccgcgcgataaactaaatcccccgtaaacgaacgcgcaacctctcacgcatcgttccccgcaaccccccacccccacgcctaaaacacccttacactacgcgacgtcgtacaacgacacaatcatctacataacgctaatacaacacgacgctacaatcttcgccaccacgctcaacgacgacgccaccgccttcgaaaaatacgacccttaccgcgaaaattatactaactacgccacctacctaacaaatacgaaacaaaactactaacgcctaaatacctaacgaatacgcaaaaacgaaaaaaaaa

SEQ ID NO: 19497 - DNA, 737 bp, Artificial Sequence
  chemically treated genomic DNA (Homo sapiens) CpG-island No: 19497
ttatttcggtcgtttttttaggtggggttttatcgtttttcgtttcgttttcgagattagtttttagaggcgtcgttcggttttttttcgtttttgttttttatacgtaggtaggttgcgggtttcgagatttttcggttttcgggttttttcgcgtcgttcgtttttttttttcgtcgatgggtcggggagttttcgcggtttcggagtttagttcggcgcgcggagttcgtttatcgagttttttatagttaacgtgtaggtttcgtcgtagtaatagaatttttttatagtagtttcggtttcgttttttatatcgcggtcggaaatcggaagcgttcgtcgggtatcgtttattagttttcgcgaggtttcggaggtttcgtttattttcgttttttatttcgtttcggagcggagggtcggcgtttcgagcgggagaggaagaggcgtttcgggtttcgggcgagtagggcggggtggagcgagtacgcgggcggggcggggcggggttttgtcgggtcggcgagggtcgtttttttagttcgcgcggtcgttttacgtttttgtggtgcgggaggggtttcgtcgaggggcgagaacgggaggtgggggtgtgggcgggtttcgtcgaggggcgagaatagggtggggttttcgcgttcggatttcgtttttcgtttttttttcgttttttttttttttttcgattcgtttttggggaagagtgggtgggg

SEQ ID NO: 19498 - DNA, 737 bp, Artificial Sequence
  chemically treated genomic DNA (Homo sapiens) CpG-island No: 19498
ccccacccactcttccccaaaaacgaatcgaaaaaaaaaaaaaaaacgaaaaaaaaacgaaaaacgaaatccgaacgcgaaaaccccaccctattctcgcccctcgacgaaacccgcccacacccccacctcccgttctcgcccctcgacgaaacccctcccgcaccacaaaaacgtaaaacgaccgcgcgaactaaaaaaacgaccctcgccgacccgacaaaaccccgccccgccccgcccgcgtactcgctccaccccgccctactcgcccgaaacccgaaacgcctcttcctctcccgctcgaaacgccgaccctccgctccgaaacgaaataaaaaacgaaaataaacgaaacctccgaaacctcgcgaaaactaataaacgatacccgacgaacgcttccgatttccgaccgcgatataaaaaacgaaaccgaaactactataaaaaaattctattactacgacgaaacctacacgttaactataaaaaactcgataaacgaactccgcgcgccgaactaaactccgaaaccgcgaaaactccccgacccatcgacgaaaaaaaaaaacgaacgacgcgaaaaaacccgaaaaccgaaaaatctcgaaacccgcaacctacctacgtataaaaaacaaaaacgaaaaaaaaccgaacgacgcctctaaaaactaatctcgaaaacgaaacgaaaaacgataaaaccccacctaaaaaaacgaccgaaataa

SEQ ID NO: 19499 - DNA, 737 bp, Artificial Sequence
  chemically treated genomic DNA (Homo sapiens) CpG-island No: 19499
ttttatttatttttttttaggggcgagtcgggggaaggggaggaggcggaggaggggcgaggggcggagttcgggcgcgggagttttattttgttttcgtttttcggcggggttcgtttatatttttatttttcgttttcgtttttcggcggggtttttttcgtattatagagacgtgggacggtcgcgcggattagagaagcggttttcgtcggttcgataaagtttcgtttcgtttcgttcgcgtgttcgttttatttcgttttgttcgttcggagttcgaggcgtttttttttttttcgttcggagcgtcggtttttcgtttcggggcggggtgggaagcggaggtgggcggagttttcggggtttcgcgagggttggtgggcggtgttcggcgggcgttttcggttttcggtcgcggtatgaggggcggggtcggggttgttgtgggagagttttgttgttgcggcggggtttgtacgttgattgtgggaaattcggtgagcgggtttcgcgcgtcgggttgggtttcgggatcgcggaggtttttcggtttatcgacgagggagagaggcgagcggcgcggggaggttcgggggtcggggaatttcggggttcgtagtttatttgcgtgtgagaggtaggggcgaggggaaatcgggcggcgtttttagaagttggtttcgggggcggggcggggggcggtgaagttttatttggaggagcggtcgggatgg

SEQ ID NO: 19500 - DNA, 737 bp, Artificial Sequence
  chemically treated genomic DNA (Homo sapiens) CpG-island No: 19500
ccatcccgaccgctcctccaaataaaacttcaccgccccccgccccgcccccgaaaccaacttctaaaaacgccgcccgatttcccctcgcccctacctctcacacgcaaataaactacgaaccccgaaattccccgacccccgaacctccccgcgccgctcgcctctctccctcgtcgataaaccgaaaaacctccgcgatcccgaaacccaacccgacgcgcgaaacccgctcaccgaatttcccacaatcaacgtacaaaccccgccgcaacaacaaaactctcccacaacaaccccgaccccgcccctcataccgcgaccgaaaaccgaaaacgcccgccgaacaccgcccaccaaccctcgcgaaaccccgaaaactccgcccacctccgcttcccaccccgccccgaaacgaaaaaccgacgctccgaacgaaaaaaaaaaaaacgcctcgaactccgaacgaacaaaacgaaataaaacgaacacgcgaacgaaacgaaacgaaactttatcgaaccgacgaaaaccgcttctctaatccgcgcgaccgtcccacgtctctataatacgaaaaaaaccccgccgaaaaacgaaaacgaaaaataaaaatataaacgaaccccgccgaaaaacgaaaacaaaataaaactcccgcgcccgaactccgcccctcgcccctcctccgcctcctccccttcccccgactcgcccctaaaaaaaaataaataaaa

SEQ ID NO: 19501 - DNA, 588 bp, Artificial Sequence
  chemically treated genomic DNA (Homo sapiens) CpG-island No: 19501
agacggggtataggaacgtatttacgtagttacgttacgtataggtaagaagtttcgtttcgggtcgcggggttgggttttaggttcgagtttcgggtttcgcgttttttttttttttcgcggggttttgttggtttacgtttcgtaaagttcggttaggtattgttattcgtagagagtttaattcgttgatttcggcggcgtttatttattcgagacgtttaaggttcgggagtttatcgttcgggtagggttaggcgggagtgggtgtcggggtgggtatttagttttcggacggatttggatcgcgttcggggacgtttacgtatttttacgttttaggttcgtcgggatttagattcggcgtttttcgtacggcgggagtttggttttttttttcgttttgggttttgcggggagagcgtgtgcggggaattgcgttcgttgttatgtaatttttatttcgcgttcgtcgtatcgcgtttttcgggacggaagcgcgttttattcgggttaattttaattttttattttattcgtggttggtttttacggagcgttaatatttaatagttttaggatgggagg

SEQ ID NO: 19502 - DNA, 588 bp, Artificial Sequence
  chemically treated genomic DNA (Homo sapiens) CpG-island No: 19502
cctcccatcctaaaactattaaatattaacgctccgtaaaaaccaaccacgaataaaataaaaaattaaaattaacccgaataaaacgcgcttccgtcccgaaaaacgcgatacgacgaacgcgaaataaaaattacataacaacgaacgcaattccccgcacacgctctccccgcaaaacccaaaacgaaaaaaaaaaccaaactcccgccgtacgaaaaacgccgaatctaaatcccgacgaacctaaaacgtaaaaatacgtaaacgtccccgaacgcgatccaaatccgtccgaaaactaaatacccaccccgacacccactcccgcctaaccctacccgaacgataaactcccgaaccttaaacgtctcgaataaataaacgccgccgaaatcaacgaattaaactctctacgaataacaatacctaaccgaactttacgaaacgtaaaccaacaaaaccccgcgaaaaaaaaaaaaaacgcgaaacccgaaactcgaacctaaaacccaaccccgcgacccgaaacgaaacttcttacctatacgtaacgtaactacgtaaatacgttcctataccccgtct

SEQ ID NO: 19503 - DNA, 588 bp, Artificial Sequence
  chemically treated genomic DNA (Homo sapiens) CpG-island No: 19503
ttttttattttggggttgttgggtgttggcgtttcgtgggaattagttacgggtggggtgggaagttggggttggttcgggtggggcgcgttttcgtttcgggaggcgcggtgcggcgggcgcgggatggaggttgtatagtaacgagcgtagtttttcgtatacgtttttttcgtaggatttagggcgggggagggagttaggttttcgtcgtgcggggggcgtcgaatttagatttcggcgggtttggagcgtgggagtgcgtgggcgttttcgggcgcggtttaagttcgttcgggggttgggtgtttatttcgatatttattttcgtttggttttgttcgaacgatgggttttcgggttttaggcgtttcgggtgagtgggcgtcgtcgggattagcgggttgggttttttgcgggtggtagtgtttggtcgggttttgcggggcgtggattagtagggtttcgcggggagggaaggagacgcggggttcggagttcggatttggagtttagtttcgcggttcggaacggggttttttgtttgtgcgtggcgtgattacgtgagtgcgtttttgtgtttcgttt

SEQ ID NO: 19504 - DNA, 588 bp, Artificial Sequence
  chemically treated genomic DNA (Homo sapiens) CpG-island No: 19504
aaacgaaacacaaaaacgcactcacgtaatcacgccacgcacaaacaaaaaaccccgttccgaaccgcgaaactaaactccaaatccgaactccgaaccccgcgtctccttccctccccgcgaaaccctactaatccacgccccgcaaaacccgaccaaacactaccacccgcaaaaaacccaacccgctaatcccgacgacgcccactcacccgaaacgcctaaaacccgaaaacccatcgttcgaacaaaaccaaacgaaaataaatatcgaaataaacacccaacccccgaacgaacttaaaccgcgcccgaaaacgcccacgcactcccacgctccaaacccgccgaaatctaaattcgacgccccccgcacgacgaaaacctaactccctcccccgccctaaatcctacgaaaaaaacgtatacgaaaaactacgctcgttactatacaacctccatcccgcgcccgccgcaccgcgcctcccgaaacgaaaacgcgccccacccgaaccaaccccaacttcccaccccacccgtaactaattcccacgaaacgccaacacccaacaaccccaaaataaaaaa

SEQ ID NO: 19505 - DNA, 1046 bp, Artificial Sequence
  chemically treated genomic DNA (Homo sapiens) CpG-island No: 19505
gtttttttacgttcgtcgtttcgggtttttttattggttcgttttttttcgcggagggtcgcgttttcgtcgtagcgtcggcggttttatttgtagtattattttgtattgttttttcggtttttggattacgtatatattatattttatgttgttggtcggcgagaggaggcggagggcgggaacgggaagacgttttttattgattcgggcgcgggatttcgggtttcgggtcggggttaggggttatattttggcgcggggggcgggtcgtttagcgggggaggggggtacgttttcgaggtgggggtagcggttcgttttttaggttaatttttcgttggtcgaggttaggcgcgggtatgttttttcgtattcggttaggagaaaaagggtagcgggggatgggcgggcgcgtcgggcgttgttaggttacggttttttagggagcgcgggggcgcgtcgggtcgttaggggtcgttaggggtcgtgggtcgcgcgttttttcgttcgcggggttcgtcgttgtcgttgtcgttttcggtttttgtttatggtcgttagtttcgggagttcggttttcgcgttcggcgtcgcggttcggttcgcgataggggggtagcggcgcggcggcggttttcgttcgcggttaggttagcgttcgcgttttcgtttcgttcggtcgcgttttcggagttttcggcgttcgtttttcgtttagtagtcgttggtcgtttttagttttcgttcgggacgacgggtacgcgagcgcgtttacggcggcgggggaggggcgcgggtacggggcgtacgcgcgtcgggaggggcggggaggggagcggggtcggttgcgggagggagcggcgggggcgttggagtcggcgcgggaagtcgggggcgggcgttcgacggaagcgggcgggggttttaggtattttacgatattcggcgttcggttttgaggggcgggtattaggcgcgttgtttgcgcgatgtcgttttgggagagaggggttttgttaggaggagtagttttttgggttttt

SEQ ID NO: 19506 - DNA, 1046 bp, Artificial Sequence
  chemically treated genomic DNA (Homo sapiens) CpG-island No: 19506
aaaaacccaaaaaactactcctcctaacaaaacccctctctcccaaaacgacatcgcgcaaacaacgcgcctaatacccgcccctcaaaaccgaacgccgaatatcgtaaaatacctaaaacccccgcccgcttccgtcgaacgcccgcccccgacttcccgcgccgactccaacgcccccgccgctccctcccgcaaccgaccccgctcccctccccgcccctcccgacgcgcgtacgccccgtacccgcgcccctcccccgccgccgtaaacgcgctcgcgtacccgtcgtcccgaacgaaaactaaaaacgaccaacgactactaaacgaaaaacgaacgccgaaaactccgaaaacgcgaccgaacgaaacgaaaacgcgaacgctaacctaaccgcgaacgaaaaccgccgccgcgccgctacccccctatcgcgaaccgaaccgcgacgccgaacgcgaaaaccgaactcccgaaactaacgaccataaacaaaaaccgaaaacgacaacgacaacgacgaaccccgcgaacgaaaaaacgcgcgacccacgacccctaacgacccctaacgacccgacgcgcccccgcgctccctaaaaaaccgtaacctaacaacgcccgacgcgcccgcccatcccccgctaccctttttctcctaaccgaatacgaaaaaacatacccgcgcctaacctcgaccaacgaaaaattaacctaaaaaacgaaccgctacccccacctcgaaaacgtacccccctcccccgctaaacgacccgccccccgcgccaaaatataacccctaaccccgacccgaaacccgaaatcccgcgcccgaatcaataaaaaacgtcttcccgttcccgccctccgcctcctctcgccgaccaacaacataaaatataatatatacgtaatccaaaaaccgaaaaaacaatacaaaataatactacaaataaaaccgccgacgctacgacgaaaacgcgaccctccgcgaaaaaaaacgaaccaataaaaaaacccgaaacgacgaacgtaaaaaaac

SEQ ID NO: 19507 - DNA, 1046 bp, Artificial Sequence
  chemically treated genomic DNA (Homo sapiens) CpG-island No: 19507
ggggatttaggagattgttttttttggtaggattttttttttttagagcggtatcgcgtagataacgcgtttggtgttcgttttttaggatcggacgtcgggtgtcgtggggtgtttaggattttcgttcgttttcgtcgagcgttcgttttcggtttttcgcgtcggttttagcgttttcgtcgttttttttcgtagtcggtttcgttttttttttcgtttttttcggcgcgcgtgcgtttcgtgttcgcgtttttttttcgtcgtcgtgggcgcgttcgcgtgttcgtcgtttcgggcgggagttggagacggttagcggttgttggacgaagagcgggcgtcgggagtttcgagagcgcggtcgggcgaggcgggagcgcgggcgttggtttggtcgcgggcgggggtcgtcgtcgcgtcgttgtttttttgtcgcgggtcgggtcgcggcgtcgagcgcgagggtcgggttttcggggttggcggttatgggtaggagtcggaggcggtagcggtagcggcgggtttcgcgggcggggaggcgcgcggtttacggtttttgacggtttttggcggttcggcgcgttttcgcgttttttggggggtcgtagtttggtaacgttcggcgcgttcgtttatttttcgttgtttttttttttttggtcgggtgcgagggagtatgttcgcgtttggtttcggttagcgaagagttaatttgaggggcgagtcgttgtttttatttcgggggcgtgtttttttttttcgttaggcggttcgtttttcgcgttagggtatggtttttggtttcggttcgggattcgaggtttcgcgttcgggttagtgaaaggcgttttttcgttttcgtttttcgttttttttcgtcggttagtaatatgggatgtaatatgtgcgtggtttagaaatcggaggagtagtataaagtgatgttgtaggtagggtcgtcggcgttgcggcgggggcgcggtttttcgcggggaggagcgggttagtggggaggttcggagcggcgggcgtgggagagt

SEQ ID NO: 19508 - DNA, 1046 bp, Artificial Sequence
  chemically treated genomic DNA (Homo sapiens) CpG-island No: 19508
actctcccacgcccgccgctccgaacctccccactaacccgctcctccccgcgaaaaaccgcgcccccgccgcaacgccgacgaccctacctacaacatcactttatactactcctccgatttctaaaccacgcacatattacatcccatattactaaccgacgaaaaaaaacgaaaaacgaaaacgaaaaaacgcctttcactaacccgaacgcgaaacctcgaatcccgaaccgaaaccaaaaaccataccctaacgcgaaaaacgaaccgcctaacgaaaaaaaaaaacacgcccccgaaataaaaacaacgactcgcccctcaaattaactcttcgctaaccgaaaccaaacgcgaacatactccctcgcacccgaccaaaaaaaaaaaaacaacgaaaaataaacgaacgcgccgaacgttaccaaactacgaccccccaaaaaacgcgaaaacgcgccgaaccgccaaaaaccgtcaaaaaccgtaaaccgcgcgcctccccgcccgcgaaacccgccgctaccgctaccgcctccgactcctacccataaccgccaaccccgaaaacccgaccctcgcgctcgacgccgcgacccgacccgcgacaaaaaaacaacgacgcgacgacgacccccgcccgcgaccaaaccaacgcccgcgctcccgcctcgcccgaccgcgctctcgaaactcccgacgcccgctcttcgtccaacaaccgctaaccgtctccaactcccgcccgaaacgacgaacacgcgaacgcgcccacgacgacgaaaaaaaaacgcgaacacgaaacgcacgcgcgccgaaaaaaacgaaaaaaaaaacgaaaccgactacgaaaaaaaacgacgaaaacgctaaaaccgacgcgaaaaaccgaaaacgaacgctcgacgaaaacgaacgaaaatcctaaacaccccacgacacccgacgtccgatcctaaaaaacgaacaccaaacgcgttatctacgcgataccgctctaaaaaaaaaaaatcctaccaaaaaaaacaatctcctaaatcccc

SEQ ID NO: 19509 - DNA, 574 bp, Artificial Sequence
  chemically treated genomic DNA (Homo sapiens) CpG-island No: 19509
ttcggttttttttcggttgagttcggttaacgtttgtttttttaggttcggtttttttcggttttttgagagcgcgtttgtcgtggtttcggttttttttcggttgcgttcggtttacgattattttagttttagtttttttcggttacgttcggttggttgtcgttttttcggattcggtttttttcggttgagttcggtttattttttattaggagtcggtttttttcggttgcgttcggttgcgattcggaagagtttttatggagttagggtagtcggttcgacggattgttatggcgtcgttgttggagtacgagcgatagttggtgttggaattgttcgatattgacgggttagtagtgtgcgttcgcgggttcggcgcggatcggtttttttattattttttttagttgtattgttatttagtttgtttggtgttggtgtttaatacgtagtcggtcgaggaggtgcggtcgcgttggcgcgggagtgaggggatttcgagagtgttgagggttttttgagcggatgcgaggtttttgatagggatggaggggttttgagggggatt

SEQ ID NO: 19510 - DNA, 574 bp, Artificial Sequence
  chemically treated genomic DNA (Homo sapiens) CpG-island No: 19510
aatccccctcaaaacccctccatccctatcaaaaacctcgcatccgctcaaaaaaccctcaacactctcgaaatcccctcactcccgcgccaacgcgaccgcacctcctcgaccgactacgtattaaacaccaacaccaaacaaactaaataacaatacaactaaaaaaaataataaaaaaaccgatccgcgccgaacccgcgaacgcacactactaacccgtcaatatcgaacaattccaacaccaactatcgctcgtactccaacaacgacgccataacaatccgtcgaaccgactaccctaactccataaaaactcttccgaatcgcaaccgaacgcaaccgaaaaaaaccgactcctaataaaaaataaaccgaactcaaccgaaaaaaaccgaatccgaaaaaacgacaaccaaccgaacgtaaccgaaaaaaactaaaactaaaataatcgtaaaccgaacgcaaccgaaaaaaaaccgaaaccacgacaaacgcgctctcaaaaaaccgaaaaaaaccgaacctaaaaaaacaaacgttaaccgaactcaaccgaaaaaaaaccgaa

SEQ ID NO: 19511 - DNA, 574 bp, Artificial Sequence
  chemically treated genomic DNA (Homo sapiens) CpG-island No: 19511
aattttttttagagtttttttatttttgttagaggtttcgtattcgtttaggaggtttttaatattttcggagtttttttattttcgcgttagcgcggtcgtattttttcggtcggttgcgtgttgagtattagtattaggtaggttgggtggtagtgtagttggagaaagtggtagaggagtcggttcgcgtcgagttcgcgggcgtatattattagttcgttagtgtcgagtagttttagtattagttgtcgttcgtattttagtagcggcgttatggtaattcgtcgagtcggttgttttgattttatggaagttttttcgggtcgtagtcgaacgtagtcgaaggaagtcgatttttagtggagagtaggtcgaatttaatcgaagagagtcgagttcgagaggacggtagttagtcgaacgtagtcgaggagagttgagattgagatgatcgtgggtcgaacgtagtcgaagaggagtcgaggttacgataggcgcgtttttagaaagtcgaagagagtcgagtttgagaaggtaagcgttggtcgaatttagtcgaagaagagtcgag

SEQ ID NO: 19512 - DNA, 574 bp, Artificial Sequence
  chemically treated genomic DNA (Homo sapiens) CpG-island No: 19512
ctcgactcttcttcgactaaattcgaccaacgcttaccttctcaaactcgactctcttcgactttctaaaaacgcgcctatcgtaacctcgactcctcttcgactacgttcgacccacgatcatctcaatctcaactctcctcgactacgttcgactaactaccgtcctctcgaactcgactctcttcgattaaattcgacctactctccactaaaaatcgacttccttcgactacgttcgactacgacccgaaaaaacttccataaaatcaaaacaaccgactcgacgaattaccataacgccgctactaaaatacgaacgacaactaatactaaaactactcgacactaacgaactaataatatacgcccgcgaactcgacgcgaaccgactcctctaccactttctccaactacactaccacccaacctacctaatactaatactcaacacgcaaccgaccgaaaaaatacgaccgcgctaacgcgaaaataaaaaaactccgaaaatattaaaaacctcctaaacgaatacgaaacctctaacaaaaataaaaaaactctaaaaaaaatt

SEQ ID NO: 19513 - DNA, 505 bp, Artificial Sequence
  chemically treated genomic DNA (Homo sapiens) CpG-island No: 19513
ttttcgtttcgtttcgtttttatttcgtttttagaggtgattcgagcgtcgtcgtcgttagttttatacgttagtttaggagcgttttttagagtcggtattggagagcgcgcggcgtagggaggtaggcggagacgcggcggtagcggtcgcggttgcgcgggggcggacgtaaaaggtatacgcgtttttcggcgtcggttttcggttcggcgaggtttgagcgcgttcgcgggttgggaggtcgttggattcgggcgtatggtttttttcgggtagttatttttttgtcgcgattttgaggttttcggtaagaattggcgtttttttttttaacgtcggttttcggttttcgtttttgacgtttaggttcggggaggtcgttatttagaaattgttttattcgagttcgtcgtttcggagatgtcgagagtttggttttgttttttgttttcggtttttttttagatttattattttaggttattaaaggcgttttttatta

SEQ ID NO: 19514 - DNA, 505 bp, Artificial Sequence
  chemically treated genomic DNA (Homo sapiens) CpG-island No: 19514
taataaaaaacgcctttaataacctaaaataataaatctaaaaaaaaaccgaaaacaaaaaacaaaaccaaactctcgacatctccgaaacgacgaactcgaataaaacaatttctaaataacgacctccccgaacctaaacgtcaaaaacgaaaaccgaaaaccgacgttaaaaaaaaaaacgccaattcttaccgaaaacctcaaaatcgcgacaaaaaaataactacccgaaaaaaaccatacgcccgaatccaacgacctcccaacccgcgaacgcgctcaaacctcgccgaaccgaaaaccgacgccgaaaaacgcgtataccttttacgtccgcccccgcgcaaccgcgaccgctaccgccgcgtctccgcctacctccctacgccgcgcgctctccaataccgactctaaaaaacgctcctaaactaacgtataaaactaacgacgacgacgctcgaatcacctctaaaaacgaaataaaaacgaaacgaaacgaaaa

SEQ ID NO: 19515 - DNA, 505 bp, Artificial Sequence
  chemically treated genomic DNA (Homo sapiens) CpG-island No: 19515
tggtgggaggcgtttttagtgatttgaagtagtgagtttaggaaggggtcgggggtagagggtaggattaggttttcggtattttcgaggcggcggattcggatggagtagtttttgagtgacggttttttcgggtttgggcgttaagggcgaaggtcgaaagtcggcgttagaaagaggaacgttagtttttatcgaagattttaaggtcgcggtaaggagataattgttcgggggaggttatgcgttcgggtttagcggttttttagttcgcggacgcgtttaaatttcgtcgggtcggaagtcggcgtcgggaagcgcgtgtgttttttacgttcgttttcgcgtagtcgcggtcgttgtcgtcgcgttttcgtttgtttttttgcgtcgcgcgttttttagtgtcggttttagagggcgtttttgggttagcgtgtagggttggcggcggcggcgttcgggttatttttgggagcggagtgggggcggagcgagacggaag

SEQ ID NO: 19516 - DNA, 505 bp, Artificial Sequence
  chemically treated genomic DNA (Homo sapiens) CpG-island No: 19516
cttccgtctcgctccgcccccactccgctcccaaaaataacccgaacgccgccgccgccaaccctacacgctaacccaaaaacgccctctaaaaccgacactaaaaaacgcgcgacgcaaaaaaacaaacgaaaacgcgacgacaacgaccgcgactacgcgaaaacgaacgtaaaaaacacacgcgcttcccgacgccgacttccgacccgacgaaatttaaacgcgtccgcgaactaaaaaaccgctaaacccgaacgcataacctcccccgaacaattatctccttaccgcgaccttaaaatcttcgataaaaactaacgttcctctttctaacgccgactttcgaccttcgcccttaacgcccaaacccgaaaaaaccgtcactcaaaaactactccatccgaatccgccgcctcgaaaataccgaaaacctaatcctaccctctacccccgaccccttcctaaactcactacttcaaatcactaaaaacgcctcccacca

SEQ ID NO: 19517 - DNA, 742 bp, Artificial Sequence
  chemically treated genomic DNA (Homo sapiens) CpG-island No: 19517
gcgcgaggtttcgtttcgttcggcgtttcgtttttttcgttggatttcgtagtcgcggtttttttcgacgcgtttcgatttttttagttgtgtattttttatttagttgtgcgttttcgtcgggagttttagttatgttcgacgagagagaggtagtcgaggtagcgatcggggaagacgttttttcgtcgttttcgaaaatcgaggtagcgagcgatttttagtatttcgcggttttcgaaggggtcgtcgtcgtcgtcgtttcgtcgttattgttgcgttgtttagtgtttatcggttttggaggttacgataaggtgaagttgtagagtcggtcggtagcggtttcggtttttgggttcggttagttgacgttgcgtttgcgggtttgcgggtttaatttcgtagattttatggttaggtaggggttgtacgatcgtttttcgtttttgtttgttatttcgggtatggagggcgcgggtgttgtgatcgtagtgggcgagggagttagcgatcgtaaggtgagcgggttgcgtagggtagggtagggttgcgtaggttattgggtagtggggtacgagtgggcgagcgtcgggggtgtggtagggcgggagaaattggcgcggatttgggtgtacgagcgtggaaagcgtagttaaggaatttgtgtttgggggtttttggagagcggtatttatgtggggaggggagacgaaattatcgttttttttttaattatttt

SEQ ID NO: 19518 - DNA, 742 bp, Artificial Sequence
  chemically treated genomic DNA (Homo sapiens) CpG-island No: 19518
aaaataattaaaaaaaaaacgataatttcgtctcccctccccacataaataccgctctccaaaaacccccaaacacaaattccttaactacgctttccacgctcgtacacccaaatccgcgccaatttctcccgccctaccacacccccgacgctcgcccactcgtaccccactacccaataacctacgcaaccctaccctaccctacgcaacccgctcaccttacgatcgctaactccctcgcccactacgatcacaacacccgcgccctccatacccgaaataacaaacaaaaacgaaaaacgatcgtacaacccctacctaaccataaaatctacgaaattaaacccgcaaacccgcaaacgcaacgtcaactaaccgaacccaaaaaccgaaaccgctaccgaccgactctacaacttcaccttatcgtaacctccaaaaccgataaacactaaacaacgcaacaataacgacgaaacgacgacgacgacgaccccttcgaaaaccgcgaaatactaaaaatcgctcgctacctcgattttcgaaaacgacgaaaaaacgtcttccccgatcgctacctcgactacctctctctcgtcgaacataactaaaactcccgacgaaaacgcacaactaaataaaaaatacacaactaaaaaaatcgaaacgcgtcgaaaaaaaccgcgactacgaaatccaacgaaaaaaacgaaacgccgaacgaaacgaaacctcgcgc

SEQ ID NO: 19519 - DNA, 742 bp, Artificial Sequence
  chemically treated genomic DNA (Homo sapiens) CpG-island No: 19519
aaaatggttggggaaggggcgataatttcgttttttttttttatataaatgtcgttttttaggagtttttaaatataagttttttggttacgttttttacgttcgtgtatttaggttcgcgttagtttttttcgttttgttatattttcggcgttcgtttattcgtgttttattgtttagtggtttgcgtagttttgttttgttttacgtaattcgtttattttgcggtcgttgattttttcgtttattgcgattataatattcgcgttttttatgttcggagtgataggtagaggcgggagacggtcgtatagtttttgtttagttatgaggtttgcgaagttgagttcgtaggttcgtagacgtagcgttagttggtcgggtttaggggtcggggtcgttgtcggtcggttttgtagttttattttgtcgtagtttttaaagtcggtgagtattaggtagcgtagtagtggcggcgaggcggcggcggcggcggttttttcggaggtcgcgggatgttgggggtcgttcgttgtttcggttttcggaggcggcgaagaggcgtttttttcggtcgttgtttcggttatttttttttcgtcggatatggttgggattttcgacgagagcgtatagttggatggagagtgtatagttggggaagtcggaacgcgtcgggaagagtcgcggttgcgggatttagcgggaggggcggggcgtcgggcgaggcggggtttcgcgt

SEQ ID NO: 19520 - DNA, 742 bp, Artificial Sequence
  chemically treated genomic DNA (Homo sapiens) CpG-island No: 19520
acgcgaaaccccgcctcgcccgacgccccgcccctcccgctaaatcccgcaaccgcgactcttcccgacgcgttccgacttccccaactatacactctccatccaactatacgctctcgtcgaaaatcccaaccatatccgacgaaaaaaaaataaccgaaacaacgaccgaaaaaaacgcctcttcgccgcctccgaaaaccgaaacaacgaacgacccccaacatcccgcgacctccgaaaaaaccgccgccgccgccgcctcgccgccactactacgctacctaatactcaccgactttaaaaactacgacaaaataaaactacaaaaccgaccgacaacgaccccgacccctaaacccgaccaactaacgctacgtctacgaacctacgaactcaacttcgcaaacctcataactaaacaaaaactatacgaccgtctcccgcctctacctatcactccgaacataaaaaacgcgaatattataatcgcaataaacgaaaaaatcaacgaccgcaaaataaacgaattacgtaaaacaaaacaaaactacgcaaaccactaaacaataaaacacgaataaacgaacgccgaaaatataacaaaacgaaaaaaactaacgcgaacctaaatacacgaacgtaaaaaacgtaaccaaaaaacttatatttaaaaactcctaaaaaacgacatttatataaaaaaaaaaaacgaaattatcgccccttccccaaccatttt

SEQ ID NO: 19521 - DNA, 593 bp, Artificial Sequence
  chemically treated genomic DNA (Homo sapiens) CpG-island No: 19521
agaaggcgcggatttgttcgtatggggacggaggtttagcggtcgataggtatcgggttcgtcggggacggacggtagagggcgggtcgggttttatgggtttggtcggggcggaaggagggcgtcgtgggcgtcgtgggagtttgggatattttttttttatcggtgtcggggcgcggtcgacgtagtgcgtaagttcgtttttttttcgtattttgcgcgcgagtttagtgtcgtcggattaattagagtttgggaacgaatttcgtcgcgggtttgcgaatcggaagatattgtcgttaggcgcggggcgggataggatttcgttttcggtttatataaagggaagtttacgttttaagttaattaatatagtttcgttcgagtcgggaagcggagagttgtgggcgtgcgtagacgcgttttttcggtttcggtttcgttttgtcgcgttttgggtttcgtttttatagttgtcggttgtttgttggttacgtgcgaggcgttagttaaagagaatcgagttttaggtttgtgtggcgagtttttaattcggcggaggagtagtgtgttatttgtagtagtaggatata

SEQ ID NO: 19522 - DNA, 593 bp, Artificial Sequence
  chemically treated genomic DNA (Homo sapiens) CpG-island No: 19522
tatatcctactactacaaataacacactactcctccgccgaattaaaaactcgccacacaaacctaaaactcgattctctttaactaacgcctcgcacgtaaccaacaaacaaccgacaactataaaaacgaaacccaaaacgcgacaaaacgaaaccgaaaccgaaaaaacgcgtctacgcacgcccacaactctccgcttcccgactcgaacgaaactatattaattaacttaaaacgtaaacttccctttatataaaccgaaaacgaaatcctatcccgccccgcgcctaacgacaatatcttccgattcgcaaacccgcgacgaaattcgttcccaaactctaattaatccgacgacactaaactcgcgcgcaaaatacgaaaaaaaaacgaacttacgcactacgtcgaccgcgccccgacaccgataaaaaaaaaatatcccaaactcccacgacgcccacgacgccctccttccgccccgaccaaacccataaaacccgacccgccctctaccgtccgtccccgacgaacccgatacctatcgaccgctaaacctccgtccccatacgaacaaatccgcgccttct

SEQ ID NO: 19523 - DNA, 593 bp, Artificial Sequence
  chemically treated genomic DNA (Homo sapiens) CpG-island No: 19523
tgtgttttgttattgtaggtggtatattgttttttcgtcgggttgaaaattcgttatataggtttggagttcggttttttttggttggcgtttcgtacgtgattagtaggtagtcggtagttgtggaagcggagtttagagcgcggtagggcggggtcggggtcggaaaggcgcgtttgcgtacgtttatagtttttcgtttttcggttcgggcgaggttgtgttgattggtttaagacgtgggtttttttttgtatgggtcggaggcggagttttgtttcgtttcgcgtttggcggtagtgtttttcggttcgtaagttcgcggcgaggttcgtttttaggttttgattggttcggcggtattgggttcgcgcgtagggtgcgggggaagggcgggtttgcgtattgcgtcggtcgcgtttcggtatcggtggaagggaggtgttttaggtttttacggcgtttacggcgtttttttttcgtttcggttaggtttatgggattcggttcgttttttgtcgttcgttttcggcgggttcgatgtttgtcggtcgttgagttttcgtttttatgcgggtaggttcgcgtttttt

SEQ ID NO: 19524 - DNA, 593 bp, Artificial Sequence
  chemically treated genomic DNA (Homo sapiens) CpG-island No: 19524
aaaaaacgcgaacctacccgcataaaaacgaaaactcaacgaccgacaaacatcgaacccgccgaaaacgaacgacaaaaaacgaaccgaatcccataaacctaaccgaaacgaaaaaaaaacgccgtaaacgccgtaaaaacctaaaacacctcccttccaccgataccgaaacgcgaccgacgcaatacgcaaacccgcccttcccccgcaccctacgcgcgaacccaataccgccgaaccaatcaaaacctaaaaacgaacctcgccgcgaacttacgaaccgaaaaacactaccgccaaacgcgaaacgaaacaaaactccgcctccgacccatacaaaaaaaaacccacgtcttaaaccaatcaacacaacctcgcccgaaccgaaaaacgaaaaactataaacgtacgcaaacgcgcctttccgaccccgaccccgccctaccgcgctctaaactccgcttccacaactaccgactacctactaatcacgtacgaaacgccaaccaaaaaaaaccgaactccaaacctatataacgaattttcaacccgacgaaaaaacaatataccacctacaataacaaaacaca

SEQ ID NO: 19525 - DNA, 942 bp, Artificial Sequence
  chemically treated genomic DNA (Homo sapiens) CpG-island No: 19525
ttttcgtcggtttgttcggtttcgttttttcggggttgggtaggtattgtgacgatttgattttgtataacgttcggagtataggaataggagtgggcgtttcggaggttttcggagtttatttaacggaggttcgatattacgtaaataggagggaatcgtagtttcggtttcgcgtttcggttttttcggcgggttgggttagttttataggtttagcggtcgtaggtatatttagggttatcgggtcgggttcggtcggggttttcgggagtatgcgcggtagttattcggttcggcgtttacgcggcgcggatagtttttcgtttcgggcgtttattttcgtattgcggatgtttataacggcggcggggttcgcgggttttagcggatcgtgaaggcgtagttagttgtcgtcgcgtttcgaagcgacgtcgggacggtcggggttgggatcggagttgggttcgttgggcgacggcggaaggggcggtgcgcgtcgggtcggttatcggtcggaagtgtacggtcgtcgggttcgttttttcggtcgtttggttaatgcgcgggataggttagcgtacggggcgggttaatgcgcggagtcggttagcgcggggcgggtttgggggcggggcgggcgttgtttcggagttggagtcggtttttttttcggcgcgatagtttttttttcgcgagtttatagacgcgcgtatagtcgtaggtggagcggatttagtttttatttcgcgtttcggtaggcgggggtgggggcgggggagggggcgggggcggggcggtttagtagggcgtttagtattttttcgtatatggttaggtatcgcggtacgtggaagtagtttgcgggtagaggcgggtaggtagtgagggtcgggggtagtcgagaggcgtaatttttgcggtttcgtttttttttttatt

SEQ ID NO: 19526 - DNA, 942 bp, Artificial Sequence
  chemically treated genomic DNA (Homo sapiens) CpG-island No: 19526
aataaaaaaaaaaacgaaaccgcaaaaattacgcctctcgactacccccgaccctcactacctacccgcctctacccgcaaactacttccacgtaccgcgatacctaaccatatacgaaaaaatactaaacgccctactaaaccgccccgcccccgccccctcccccgcccccacccccgcctaccgaaacgcgaaataaaaactaaatccgctccacctacgactatacgcgcgtctataaactcgcgaaaaaaaaactatcgcgccgaaaaaaaaaccgactccaactccgaaacaacgcccgccccgcccccaaacccgccccgcgctaaccgactccgcgcattaacccgccccgtacgctaacctatcccgcgcattaaccaaacgaccgaaaaaacgaacccgacgaccgtacacttccgaccgataaccgacccgacgcgcaccgccccttccgccgtcgcccaacgaacccaactccgatcccaaccccgaccgtcccgacgtcgcttcgaaacgcgacgacaactaactacgccttcacgatccgctaaaacccgcgaaccccgccgccgttataaacatccgcaatacgaaaataaacgcccgaaacgaaaaactatccgcgccgcgtaaacgccgaaccgaataactaccgcgcatactcccgaaaaccccgaccgaacccgacccgataaccctaaatatacctacgaccgctaaacctataaaactaacccaacccgccgaaaaaaccgaaacgcgaaaccgaaactacgattccctcctatttacgtaatatcgaacctccgttaaataaactccgaaaacctccgaaacgcccactcctattcctatactccgaacgttatacaaaatcaaatcgtcacaatacctacccaaccccgaaaaaacgaaaccgaacaaaccgacgaaaa

SEQ ID NO: 19527 - DNA, 942 bp, Artificial Sequence
  chemically treated genomic DNA (Homo sapiens) CpG-island No: 19527
agtgggggagagggcggggtcgtaggggttgcgtttttcggttgttttcggtttttattatttgttcgtttttattcgtaggttgtttttacgtgtcgcggtgtttagttatgtgcgaggagatgttgggcgttttgttgagtcgtttcgttttcgttttttttttcgtttttattttcgtttgtcgaggcgcggaataaaggttgagttcgttttatttgcggttgtgcgcgcgtttgtgggttcgcgggaggggggttgtcgcgtcgagggaggggtcggttttagtttcggggtagcgttcgtttcgtttttaggttcgtttcgcgttgatcggtttcgcgtattggttcgtttcgtgcgttggtttgtttcgcgtattggttaagcggtcgggaggacgggttcggcggtcgtgtattttcggtcggtggtcggttcggcgcgtatcgtttttttcgtcgtcgtttagcgagtttagtttcggttttagtttcggtcgtttcggcgtcgtttcggagcgcggcggtagttgattgcgtttttacgattcgttgggattcgcgagtttcgtcgtcgttatgaatattcgtaatgcgagggtgagcgttcggggcgggaggttgttcgcgtcgcgtgggcgtcgggtcgggtggttgtcgcgtatgttttcgagggtttcggtcgagttcggttcggtggttttgagtgtgtttgcggtcgttggatttatggggttggtttagttcgtcgaagaggtcggggcgcggggtcggggttgcgatttttttttgtttgcgtgatgtcgggttttcgttgggtgggtttcggggattttcggggcgtttatttttgtttttgtgtttcgggcgttgtgtaaagttagatcgttatagtgtttgtttagtttcgagggagcggggtcgagtagatcgacgggga

SEQ ID NO: 19528 - DNA, 942 bp, Artificial Sequence
  chemically treated genomic DNA (Homo sapiens) CpG-island No: 19528
tccccgtcgatctactcgaccccgctccctcgaaactaaacaaacactataacgatctaactttacacaacgcccgaaacacaaaaacaaaaataaacgccccgaaaatccccgaaacccacccaacgaaaacccgacatcacgcaaacaaaaaaaaatcgcaaccccgaccccgcgccccgacctcttcgacgaactaaaccaaccccataaatccaacgaccgcaaacacactcaaaaccaccgaaccgaactcgaccgaaaccctcgaaaacatacgcgacaaccacccgacccgacgcccacgcgacgcgaacaacctcccgccccgaacgctcaccctcgcattacgaatattcataacgacgacgaaactcgcgaatcccaacgaatcgtaaaaacgcaatcaactaccgccgcgctccgaaacgacgccgaaacgaccgaaactaaaaccgaaactaaactcgctaaacgacgacgaaaaaaacgatacgcgccgaaccgaccaccgaccgaaaatacacgaccgccgaacccgtcctcccgaccgcttaaccaatacgcgaaacaaaccaacgcacgaaacgaaccaatacgcgaaaccgatcaacgcgaaacgaacctaaaaacgaaacgaacgctaccccgaaactaaaaccgacccctccctcgacgcgacaacccccctcccgcgaacccacaaacgcgcgcacaaccgcaaataaaacgaactcaacctttattccgcgcctcgacaaacgaaaataaaaacgaaaaaaaaaacgaaaacgaaacgactcaacaaaacgcccaacatctcctcgcacataactaaacaccgcgacacgtaaaaacaacctacgaataaaaacgaacaaataataaaaaccgaaaacaaccgaaaaacgcaacccctacgaccccgccctctcccccact

SEQ ID NO: 19529 - DNA, 688 bp, Artificial Sequence
  chemically treated genomic DNA (Homo sapiens) CpG-island No: 19529
tatagcggtagacgattttatggaggtcgttattttaattgttttttttttttttggttttttttttttttttcgtttatttcgttttcgtaagagtcgttcgaaattgtcgagcgtttaggtttaagaagttggaggtcgttgagtttcgtcgtttcgattatttgttcgggcgttttcgtttataagttcgggcgggaggttttgggagtcgttattttgagtcgtttttttttttttttttttttagtcgtagttttttttcgtcggaaatggcggagtttcggttcggtttttatatttttaagtttttagtattggtcggttttcggggcgggtggaaaggagttataagcgtcgcggtcgtcgtagtttcgtcggcgtttagattataattgtgggagtcgttattttgagatcgtttcgttttttcgtttagcgttttagtgtagtcgtcgttttcgaaatagtttcgatatatttaacgaatggaggcgggtcggaggtcggtggaattagttcgagttttcgagggtcgtttgggggttcgcgtcgtacggtttgtgaagtttcgcgtttttttttttagttcgtttttgttgtttaggttgcgtttgtcgtcgtgggagtcgttattttgagattagtttttcgtttttttttatttttttttttttaggttagtttt

SEQ ID NO: 19530 - DNA, 688 bp, Artificial Sequence
  chemically treated genomic DNA (Homo sapiens) CpG-island No: 19530
aaaactaacctaaaaaaaaaaaaataaaaaaaaacgaaaaactaatctcaaaataacgactcccacgacgacaaacgcaacctaaacaacaaaaacgaactaaaaaaaaaaacgcgaaacttcacaaaccgtacgacgcgaacccccaaacgaccctcgaaaactcgaactaattccaccgacctccgacccgcctccattcgttaaatatatcgaaactatttcgaaaacgacgactacactaaaacgctaaacgaaaaaacgaaacgatctcaaaataacgactcccacaattataatctaaacgccgacgaaactacgacgaccgcgacgcttataactcctttccacccgccccgaaaaccgaccaatactaaaaacttaaaaatataaaaaccgaaccgaaactccgccatttccgacgaaaaaaaactacgactaaaaaaaaaaaaaaaaaaaaacgactcaaaataacgactcccaaaacctcccgcccgaacttataaacgaaaacgcccgaacaaataatcgaaacgacgaaactcaacgacctccaacttcttaaacctaaacgctcgacaatttcgaacgactcttacgaaaacgaaataaacgaaaaaaaaaaaaaaaaccaaaaaaaaaaaaaacaattaaaataacgacctccataaaatcgtctaccgctata

SEQ ID NO: 19531 - DNA, 688 bp, Artificial Sequence
  chemically treated genomic DNA (Homo sapiens) CpG-island No: 19531
agaattgatttaggaggaagagaataggggggaacggggagttagttttaagatggcggtttttacggcggtaggcgtagtttgagtagtagaggcggattaaggggagaggcgcgagattttataagtcgtacggcgcgagtttttaaacggttttcgagagttcgagttggttttatcggttttcggttcgtttttattcgttaggtgtgtcgaggttgtttcgggagcggcggttgtattaaggcgttgggcggggaagcgggacggttttaagatggcggtttttataattgtggtttgagcgtcggcggggttgcgacgatcgcggcgtttgtggtttttttttattcgtttcggaagtcggttagtgttggggatttgggggtgtgggaatcgggtcggggtttcgttattttcggcgggggagggttacgattgaggaagggaggagagagaggcggtttaagatggcggtttttagggtttttcgttcgagtttgtaagcgggagcgttcggataagtagtcggggcgacgggatttagcggtttttagttttttgagtttaggcgttcgatagtttcgggcggtttttgcggagacggggtgagcgagaagaaagggaagagttaaagggaaggagggtagttaagatggcggtttttatggagtcgtttatcgttgtg

SEQ ID NO: 19532 - DNA, 688 bp, Artificial Sequence
  chemically treated genomic DNA (Homo sapiens) CpG-island No: 19532
cacaacgataaacgactccataaaaaccgccatcttaactaccctccttccctttaactcttccctttcttctcgctcaccccgtctccgcaaaaaccgcccgaaactatcgaacgcctaaactcaaaaaactaaaaaccgctaaatcccgtcgccccgactacttatccgaacgctcccgcttacaaactcgaacgaaaaaccctaaaaaccgccatcttaaaccgcctctctctcctcccttcctcaatcgtaaccctcccccgccgaaaataacgaaaccccgacccgattcccacacccccaaatccccaacactaaccgacttccgaaacgaataaaaaaaaaccacaaacgccgcgatcgtcgcaaccccgccgacgctcaaaccacaattataaaaaccgccatcttaaaaccgtcccgcttccccgcccaacgccttaatacaaccgccgctcccgaaacaacctcgacacacctaacgaataaaaacgaaccgaaaaccgataaaaccaactcgaactctcgaaaaccgtttaaaaactcgcgccgtacgacttataaaatctcgcgcctctccccttaatccgcctctactactcaaactacgcctaccgccgtaaaaaccgccatcttaaaactaactccccgttcccccctattctcttcctcctaaatcaattct

SEQ ID NO: 19533 - DNA, 1374 bp, Artificial Sequence
  chemically treated genomic DNA (Homo sapiens) CpG-island No: 19533
taggtttcgaagcggtaattgtacggtagaagaagcggtaacggtagggcgtttatgttttttttttgggagtcgttattttgtgtgaagaagtaataattaaatatggcggtagcggcgtcggcggtcgggcgaggaggcggagtcgggtgacgttatcgtttttttttattcgttttcgtatcgtttcgtttttgggtttaagttttttaaaggatttttgcgttgtttcgcggcgggggtgggggtcggcgttgtcgcgcgttgggttaaagttcgagtcgcgtttagattaggtgtaggcgtaggcgcgtttcgttttacggtttttttatcgggcgagtttttacgttttcgttttgggagtcgttattttgttattttttttcgttcggtcgttcgcgggcgttaatagcgatttttagtataaaataaagatggcggcggcggtatttcggaaatgttcggatgagattgttaattttttcgacgcgttcggtttcgtttttttgggaacggtttttcgggttgataagggacgtacgttcgaagaattgtttttaattagtattggggatagcggtacgtaggtggtcggggttggcgaatagttattgtagtcgcgtttgcggtcgggaagcgagtattttcgcgttttgtatatttagtagtcgtaggaggcggttcgaggcgcgtcgcgggggagtcgggggcggggcgatagtgggaggcgacgtagtcgagcgtcggcgttcgggggtggagttttcgttcgtttttaggtttttaggttgcggggttcgttttcgggcgttatcgttttcgttcgcgtcgtagtaaaatgagtcgggtcgcgcgttttagatcgtcgcgcgttcggtcgtttttattgtcgagaggttcgtagtcgggtcggtggcgtacgagtcgggcgggcgatcgcgggaggcgttcgcgttatttcgcgttatttcgtttcgttcgttttttaggtttcgagtttcgttttgcgcgtaggcgtatcggcgttgttcggatttttttttttcggagatttgaattttttttagcgaggcgagtgaggcgaaatattcgtatggtgatagttggttttttcgcgttaatattgtaagtgtttatcgtagttttgggaggtgggtttcggtttcgtttttacgtttcgttttttttaggaggtcgttcgggcgcggcggcggcggcggcggcggcggtattcgttttgttacgcgtaggtcgtagcgcggggatttaagttgttgttcgggagcggtagtcgttagtagaaatggatagatcggttttgttagagtttgtggtttttgttgtaaacgtttagaagtttagttaaattat

SEQ ID NO: 19534 - DNA, 1374 bp, Artificial Sequence
  chemically treated genomic DNA (Homo sapiens) CpG-island No: 19534
ataatttaactaaacttctaaacgtttacaacaaaaaccacaaactctaacaaaaccgatctatccatttctactaacgactaccgctcccgaacaacaacttaaatccccgcgctacgacctacgcgtaacaaaacgaataccgccgccgccgccgccgccgccgcgcccgaacgacctcctaaaaaaaacgaaacgtaaaaacgaaaccgaaacccacctcccaaaactacgataaacacttacaatattaacgcgaaaaaaccaactatcaccatacgaatatttcgcctcactcgcctcgctaaaaaaaattcaaatctccgaaaaaaaaaaatccgaacaacgccgatacgcctacgcgcaaaacgaaactcgaaacctaaaaaacgaacgaaacgaaataacgcgaaataacgcgaacgcctcccgcgatcgcccgcccgactcgtacgccaccgacccgactacgaacctctcgacaataaaaacgaccgaacgcgcgacgatctaaaacgcgcgacccgactcattttactacgacgcgaacgaaaacgataacgcccgaaaacgaaccccgcaacctaaaaacctaaaaacgaacgaaaactccacccccgaacgccgacgctcgactacgtcgcctcccactatcgccccgcccccgactcccccgcgacgcgcctcgaaccgcctcctacgactactaaatatacaaaacgcgaaaatactcgcttcccgaccgcaaacgcgactacaataactattcgccaaccccgaccacctacgtaccgctatccccaatactaattaaaaacaattcttcgaacgtacgtcccttatcaacccgaaaaaccgttcccaaaaaaacgaaaccgaacgcgtcgaaaaaattaacaatctcatccgaacatttccgaaataccgccgccgccatctttattttatactaaaaatcgctattaacgcccgcgaacgaccgaacgaaaaaaaataacaaaataacgactcccaaaacgaaaacgtaaaaactcgcccgataaaaaaaccgtaaaacgaaacgcgcctacgcctacacctaatctaaacgcgactcgaactttaacccaacgcgcgacaacgccgacccccacccccgccgcgaaacaacgcaaaaatcctttaaaaaacttaaacccaaaaacgaaacgatacgaaaacgaataaaaaaaaacgataacgtcacccgactccgcctcctcgcccgaccgccgacgccgctaccgccatatttaattattacttcttcacacaaaataacgactcccaaaaaaaaaacataaacgccctaccgttaccgcttcttctaccgtacaattaccgcttcgaaaccta

SEQ ID NO: 19535 - DNA, 1374 bp, Artificial Sequence
  chemically treated genomic DNA (Homo sapiens) CpG-island No: 19535
gtaatttaattgaatttttagacgtttataataaaagttataggttttgataggatcggtttgtttatttttattggcgattgtcgttttcgggtagtagtttgggttttcgcgttgcggtttgcgcgtggtagggcggatgtcgtcgtcgtcgtcgtcgtcgtcgcgttcgggcggttttttagaggaggcgaaacgtgggggcgaggtcgggatttattttttagggttgcggtgagtatttatagtattggcgcgaaaaggttagttattattatacgggtatttcgttttattcgtttcgttgggggaaatttaaattttcgaaaagggaggattcgagtagcgtcggtgcgtttgcgcgtagggcgggattcgaagtttgggaagcgggcggggcgaggtgacgcgagatgacgcggacgtttttcgcggtcgttcgttcggttcgtgcgttatcggttcgattgcgggtttttcggtagtgggggcggtcgagcgcgcggcggtttggggcgcgcggttcggtttattttgttgcggcgcgggcggaggcggtggcgttcgagggcgggtttcgtagtttgggagtttgggagcgggcggaggttttattttcgggcgtcggcgttcggttgcgtcgttttttattgtcgtttcgttttcggttttttcgcggcgcgtttcgggtcgttttttgcggttgttgggtgtgtagggcgcgaaaatgttcgtttttcggtcgtaggcgcggttgtagtggttgttcgttaatttcggttatttgcgtgtcgttgtttttagtgttggttaaaggtagtttttcgggcgtgcgttttttattaattcgagagatcgtttttaagggggcggggtcgagcgcgtcggaggggttagtagttttattcgggtattttcgagatgtcgtcgtcgttatttttgttttgtgttgaaagtcgttattgacgttcgcggacggtcgggcgaggggaagtggtaagatggcggtttttagggcggaggcgtggaggttcgttcggtgggggggtcgtggggcggggcgcgtttgcgtttgtatttgatttgagcgcgattcgagttttagtttagcgcgcggtagcgtcgatttttattttcgtcgcgaggtagcgtaggggttttttaagaggtttgggtttaggggcgaagcggtgcgagggcgagtggggggaagcggtgacgttattcggtttcgttttttcgttcgatcgtcggcgtcgttgtcgttatgtttagttgttatttttttatataagatggcggtttttagggaggaggtatgagcgttttgtcgttatcgttttttttgtcgtatagttgtcgtttcggggttta

SEQ ID NO: 19536 - DNA, 1374 bp, Artificial Sequence
  chemically treated genomic DNA (Homo sapiens) CpG-island No: 19536
taaaccccgaaacgacaactatacgacaaaaaaaacgataacgacaaaacgctcatacctcctccctaaaaaccgccatcttatataaaaaaataacaactaaacataacgacaacgacgccgacgatcgaacgaaaaaacgaaaccgaataacgtcaccgcttccccccactcgccctcgcaccgcttcgcccctaaacccaaacctcttaaaaaacccctacgctacctcgcgacgaaaataaaaatcgacgctaccgcgcgctaaactaaaactcgaatcgcgctcaaatcaaatacaaacgcaaacgcgccccgccccacgacccccccaccgaacgaacctccacgcctccgccctaaaaaccgccatcttaccacttcccctcgcccgaccgtccgcgaacgtcaataacgactttcaacacaaaacaaaaataacgacgacgacatctcgaaaatacccgaataaaactactaacccctccgacgcgctcgaccccgcccccttaaaaacgatctctcgaattaataaaaaacgcacgcccgaaaaactacctttaaccaacactaaaaacaacgacacgcaaataaccgaaattaacgaacaaccactacaaccgcgcctacgaccgaaaaacgaacattttcgcgccctacacacccaacaaccgcaaaaaacgacccgaaacgcgccgcgaaaaaaccgaaaacgaaacgacaataaaaaacgacgcaaccgaacgccgacgcccgaaaataaaacctccgcccgctcccaaactcccaaactacgaaacccgccctcgaacgccaccgcctccgcccgcgccgcaacaaaataaaccgaaccgcgcgccccaaaccgccgcgcgctcgaccgcccccactaccgaaaaacccgcaatcgaaccgataacgcacgaaccgaacgaacgaccgcgaaaaacgtccgcgtcatctcgcgtcacctcgccccgcccgcttcccaaacttcgaatcccgccctacgcgcaaacgcaccgacgctactcgaatcctcccttttcgaaaatttaaatttcccccaacgaaacgaataaaacgaaatacccgtataataataactaaccttttcgcgccaatactataaatactcaccgcaaccctaaaaaataaatcccgacctcgcccccacgtttcgcctcctctaaaaaaccgcccgaacgcgacgacgacgacgacgacgacgacatccgccctaccacgcgcaaaccgcaacgcgaaaacccaaactactacccgaaaacgacaatcgccaataaaaataaacaaaccgatcctatcaaaacctataacttttattataaacgtctaaaaattcaattaaattac

SEQ ID NO: 19537 - DNA, 549 bp, Artificial Sequence
  chemically treated genomic DNA (Homo sapiens) CpG-island No: 19537
gaggcggttggagcgcgcgtttataggtgggttcggtcgggcgtcgcggggtcgtagttttcgggtcggcgggcgaggacgtcgggtttagaattttaggaaatgcgcgatttaggtcggcgggcggggcgggggtttcggcgagagggcgggtttcgggaacggcggcgggcggggcgggaggcggggttcggttcgttaagaagagcgtggtcggtcgcggttatcgttggttttagggaaagtcgagcggttatcgagtcggtagagatttatcgagcggcggcggagggagtagcgtcggggcgtacgagggtattatggtttagacgttcgttttcgataagtttaaagtgagcgcgcgcgggggtttcggggacgggggttcggcgtttgggcggttcgaggggtttagcggggtttagttcggggcgtttaaattttgggaacgaacgggggtttttgtaggcgagtttttttttcggtttaggtcgtggtttgtttgcgggttaattagggataatggggtagagaaggtttagaattcgg

SEQ ID NO: 19538 - DNA, 549 bp, Artificial Sequence
  chemically treated genomic DNA (Homo sapiens) CpG-island No: 19538
ccgaattctaaaccttctctaccccattatccctaattaacccgcaaacaaaccacgacctaaaccgaaaaaaaaactcgcctacaaaaacccccgttcgttcccaaaatttaaacgccccgaactaaaccccgctaaacccctcgaaccgcccaaacgccgaacccccgtccccgaaacccccgcgcgcgctcactttaaacttatcgaaaacgaacgtctaaaccataataccctcgtacgccccgacgctactccctccgccgccgctcgataaatctctaccgactcgataaccgctcgactttccctaaaaccaacgataaccgcgaccgaccacgctcttcttaacgaaccgaaccccgcctcccgccccgcccgccgccgttcccgaaacccgccctctcgccgaaacccccgccccgcccgccgacctaaatcgcgcatttcctaaaattctaaacccgacgtcctcgcccgccgacccgaaaactacgaccccgcgacgcccgaccgaacccacctataaacgcgcgctccaaccgcctc

SEQ ID NO: 19539 - DNA, 549 bp, Artificial Sequence
  chemically treated genomic DNA (Homo sapiens) CpG-island No: 19539
tcgggttttggattttttttgttttattgtttttgattagttcgtaagtaagttacggtttaagtcgaaggaagaattcgtttgtaggagttttcgttcgtttttagggtttggacgtttcgggttgggtttcgttaagtttttcgggtcgtttaggcgtcggattttcgttttcggagttttcgcgcgcgtttattttgggtttgtcgaaggcgggcgtttgggttatggtgttttcgtgcgtttcggcgttgtttttttcgtcgtcgttcggtgggtttttgtcggttcggtggtcgttcggttttttttggggttagcggtggtcgcggtcggttacgttttttttaacgggtcgggtttcgtttttcgtttcgttcgtcgtcgttttcggggttcgttttttcgtcggagttttcgtttcgttcgtcggtttggatcgcgtattttttggaattttggattcggcgttttcgttcgtcgattcgaaaattacggtttcgcggcgttcgatcggatttatttgtgggcgcgcgttttagtcgtttt

SEQ ID NO: 19540 - DNA, 549 bp, Artificial Sequence
  chemically treated genomic DNA (Homo sapiens) CpG-island No: 19540
aaaacgactaaaacgcgcgcccacaaataaatccgatcgaacgccgcgaaaccgtaattttcgaatcgacgaacgaaaacgccgaatccaaaattccaaaaaatacgcgatccaaaccgacgaacgaaacgaaaactccgacgaaaaaacgaaccccgaaaacgacgacgaacgaaacgaaaaacgaaacccgacccgttaaaaaaaacgtaaccgaccgcgaccaccgctaaccccaaaaaaaaccgaacgaccaccgaaccgacaaaaacccaccgaacgacgacgaaaaaaacaacgccgaaacgcacgaaaacaccataacccaaacgcccgccttcgacaaacccaaaataaacgcgcgcgaaaactccgaaaacgaaaatccgacgcctaaacgacccgaaaaacttaacgaaacccaacccgaaacgtccaaaccctaaaaacgaacgaaaactcctacaaacgaattcttccttcgacttaaaccgtaacttacttacgaactaatcaaaaacaataaaacaaaaaaaatccaaaacccga

SEQ ID NO: 19541 - DNA, 702 bp, Artificial Sequence
  chemically treated genomic DNA (Homo sapiens) CpG-island No: 19541
cggcgtaggcgcgcgggcggggtcgggggcggggtttgcggggcgtggcggggcgggtagagggcggggtttgtttttttttagttttaggcggttgcgacgagtttttaggcgaatttttcggttttttcgcgcggcgtcgttttttgttgcgttttcgtttttttttttgtttcgttatcggttttttttttttgagtagttagttcgcgcgtcggtcggtttcgttatggcgattcgtagttttggcgtcgtggtgagtagttcggtttgtcggttttggtcggtttaggtttacgcggtaggtggcggtcgggttttgaggcgcgggattcgtagtgcgggttcgggcggtcgggtttagggaatttcgtaggcgggggcggttagtttttcgggttcggttttacgttacgcgagggcggtagggaggacggaatggcggggtttggggtgggttttttttcgggggagttttgggaaaagaggattgcgtgtgggaagagaaggtggaaatggcgttttggttgatatgtgtcgtttgcgagcgtgttgcggggaggggtcgagggtagattcgggaatgatggcgcggggtgggggcgtgggggttttttcgggagaggtttttttttggaagtttggggtgcgatggtgaggttttcggggtatttttggaggggtttcggtacggaaagcgat

SEQ ID NO: 19542 - DNA, 702 bp, Artificial Sequence
  chemically treated genomic DNA (Homo sapiens) CpG-island No: 19542
atcgctttccgtaccgaaacccctccaaaaataccccgaaaacctcaccatcgcaccccaaacttccaaaaaaaaacctctcccgaaaaaacccccacgcccccaccccgcgccatcattcccgaatctaccctcgacccctccccgcaacacgctcgcaaacgacacatatcaaccaaaacgccatttccaccttctcttcccacacgcaatcctcttttcccaaaactcccccgaaaaaaaacccaccccaaaccccgccattccgtcctccctaccgccctcgcgtaacgtaaaaccgaacccgaaaaactaaccgcccccgcctacgaaattccctaaacccgaccgcccgaacccgcactacgaatcccgcgcctcaaaacccgaccgccacctaccgcgtaaacctaaaccgaccaaaaccgacaaaccgaactactcaccacgacgccaaaactacgaatcgccataacgaaaccgaccgacgcgcgaactaactactcaaaaaaaaaaaaccgataacgaaacaaaaaaaaaaacgaaaacgcaacaaaaaacgacgccgcgcgaaaaaaccgaaaaattcgcctaaaaactcgtcgcaaccgcctaaaactaaaaaaaaacaaaccccgccctctacccgccccgccacgccccgcaaaccccgcccccgaccccgcccgcgcgcctacgccg

SEQ ID NO: 19543 - DNA, 702 bp, Artificial Sequence
  chemically treated genomic DNA (Homo sapiens) CpG-island No: 19543
gtcgtttttcgtgtcgaggtttttttagaggtgtttcgagaattttattatcgtattttaaatttttagggaagggtttttttcgagaaagtttttacgtttttatttcgcgttattattttcgaatttgttttcggttttttttcgtagtacgttcgtaggcggtatatgttaattaaaacgttatttttattttttttttttatacgtagttttttttttttagggttttttcgaggagggatttattttaaatttcgttatttcgttttttttgtcgttttcgcgtgacgtaaagtcgaattcgggaaattggtcgttttcgtttgcggggttttttgggttcggtcgttcgagttcgtattgcggatttcgcgttttagggttcggtcgttatttgtcgcgtgggtttgaatcggttagggtcggtaggtcgagttgtttattacgacgttagggttgcgggtcgttataacggagtcggtcggcgcgcgggttgattgtttaggaggaggaagtcggtggcggagtagaggaggaggcggaggcgtagtaagaggcggcgtcgcgcgggaaagtcgagaggttcgtttgagggttcgtcgtagtcgtttgaagttgaggagaagtaggtttcgttttttgttcgtttcgttacgtttcgtaggtttcgttttcggtttcgttcgcgcgtttacgtcg

SEQ ID NO: 19544 - DNA, 702 bp, Artificial Sequence
  chemically treated genomic DNA (Homo sapiens) CpG-island No: 19544
cgacgtaaacgcgcgaacgaaaccgaaaacgaaacctacgaaacgtaacgaaacgaacaaaaaacgaaacctacttctcctcaacttcaaacgactacgacgaaccctcaaacgaacctctcgactttcccgcgcgacgccgcctcttactacgcctccgcctcctcctctactccgccaccgacttcctcctcctaaacaatcaacccgcgcgccgaccgactccgttataacgacccgcaaccctaacgtcgtaataaacaactcgacctaccgaccctaaccgattcaaacccacgcgacaaataacgaccgaaccctaaaacgcgaaatccgcaatacgaactcgaacgaccgaacccaaaaaaccccgcaaacgaaaacgaccaatttcccgaattcgactttacgtcacgcgaaaacgacaaaaaaaacgaaataacgaaatttaaaataaatccctcctcgaaaaaaccctaaaaaaaaaaaactacgtataaaaaaaaaaaataaaaataacgttttaattaacatataccgcctacgaacgtactacgaaaaaaaaccgaaaacaaattcgaaaataataacgcgaaataaaaacgtaaaaactttctcgaaaaaaacccttccctaaaaatttaaaatacgataataaaattctcgaaacacctctaaaaaaacctcgacacgaaaaacgac

SEQ ID NO: 19545 - DNA, 609 bp, Artificial Sequence
  chemically treated genomic DNA (Homo sapiens) CpG-island No: 19545
gcggcggttttaggaggagtcgtgggggacgtttttcggggaaagcggcggtcggggcgggagggcgagggtcgagggcggggcggggcgggacggtttcgcgtttttaggattttagttttttcgcgtcgtgtagtcgtttttttatttgttcgttcgttcgttgtcgggttttgagttcgcgtcgtcgtcgttaggaaggaggggttcgcgtttgttttacgtcgggggttaagtttggttgttatcgtcgtcgcgtttttagtttttgatggtcgtcggcgcgtcggagttttaaacgtcgacggttgttttcgcgcggttaattagcgcgcggtcgggggtaggatcgtaggagggcgggcgtttaatgggaagttgtgtttcgtcgtttcgttttttttttttttttatttttcgttcgggcgtcgacggtttcgttttcggagtggagggtacgttagggtgtttgaagttgagatttcgggttcgtagtcgttttatgaatttcgagtttcgtaattgacgttattgggcggggttttatggttagggtttcgtttaggtttaagtttttttatttgtgtttaatgtataggtgcggtgtcg

SEQ ID NO: 19546 - DNA, 609 bp, Artificial Sequence
  chemically treated genomic DNA (Homo sapiens) CpG-island No: 19546
cgacaccgcacctatacattaaacacaaataaaaaaacttaaacctaaacgaaaccctaaccataaaaccccgcccaataacgtcaattacgaaactcgaaattcataaaacgactacgaacccgaaatctcaacttcaaacaccctaacgtaccctccactccgaaaacgaaaccgtcgacgcccgaacgaaaaataaaaaaaaaaaaaaaacgaaacgacgaaacacaacttcccattaaacgcccgccctcctacgatcctacccccgaccgcgcgctaattaaccgcgcgaaaacaaccgtcgacgtttaaaactccgacgcgccgacgaccatcaaaaactaaaaacgcgacgacgataacaaccaaacttaacccccgacgtaaaacaaacgcgaacccctccttcctaacgacgacgacgcgaactcaaaacccgacaacgaacgaacgaacaaataaaaaaacgactacacgacgcgaaaaaactaaaatcctaaaaacgcgaaaccgtcccgccccgccccgccctcgaccctcgccctcccgccccgaccgccgctttccccgaaaaacgtcccccacgactcctcctaaaaccgccgc

SEQ ID NO: 19547 - DNA, 609 bp, Artificial Sequence
  chemically treated genomic DNA (Homo sapiens) CpG-island No: 19547
cggtatcgtatttgtgtattgagtataggtggggaaatttaggtttgagcgaggttttggttatgaagtttcgtttagtagcgttagttgcggaattcgaaatttatggggcgattgcgagttcggggttttagttttagatattttggcgtgttttttatttcggaaacggaatcgtcggcgttcgagcggggggtggggggggagggagggcggagcggcgaggtatagttttttattggacgttcgtttttttgcggttttgttttcggtcgcgcgttgattggtcgcgcgaaggtaatcgtcggcgtttgaaatttcggcgcgtcggcggttattaagggttagaagcgcggcggcggtagtagttaggtttggttttcggcgtggagtagacgcggattttttttttttggcggcggcggcgcgggtttagagttcggtaacgggcgggcgggtaggtaggagagcggttatacggcgcggggaggttggggttttgggggcgcgaggtcgtttcgtttcgtttcgttttcggttttcgttttttcgtttcggtcgtcgtttttttcgggaagcgttttttacggttttttttggggtcgtcgt

SEQ ID NO: 19548 - DNA, 609 bp, Artificial Sequence
  chemically treated genomic DNA (Homo sapiens) CpG-island No: 19548
acgacgaccccaaaaaaaaccgtaaaaaacgcttcccgaaaaaaacgacgaccgaaacgaaaaaacgaaaaccgaaaacgaaacgaaacgaaacgacctcgcgcccccaaaaccccaacctccccgcgccgtataaccgctctcctacctacccgcccgcccgttaccgaactctaaacccgcgccgccgccgccaaaaaaaaaaaatccgcgtctactccacgccgaaaaccaaacctaactactaccgccgccgcgcttctaacccttaataaccgccgacgcgccgaaatttcaaacgccgacgattaccttcgcgcgaccaatcaacgcgcgaccgaaaacaaaaccgcaaaaaaacgaacgtccaataaaaaactatacctcgccgctccgccctccctccccccccaccccccgctcgaacgccgacgattccgtttccgaaataaaaaacacgccaaaatatctaaaactaaaaccccgaactcgcaatcgccccataaatttcgaattccgcaactaacgctactaaacgaaacttcataaccaaaacctcgctcaaacctaaatttccccacctatactcaatacacaaatacgataccg

SEQ ID NO: 19549 - DNA, 542 bp, Artificial Sequence
  chemically treated genomic DNA (Homo sapiens) CpG-island No: 19549
tcgtacggggattgtattttttagagcgtttcgcgagcggtcgagcggcgggattttatgttttagagtgtttcgcgggcggtcgggcggcgggattttatgttttagagtgtttcgcggcggtcggcggcggtcgtcgtaatcgataggttcgggattggcgttgcggtttcgttcgcgcgtcggggcgggggtttagttcgatagtttttcggcggttgcgcgatggatagtttcgaggtgatttttattttcgtttatttggtgttcgtcgtgtgtttcgtgtttacgtttaacgagttttacgcggcggggtttacggtgtagaatttgttgtcgggttggttgggtagcgaggacgtcgttttcgtgtttttttatttgcgtcgtacggtcgttacgttgttgtgttattcgttgttgtcgttcggtgaggttgttcgggtcggtcggtcgtatttttttttgcgtagggtttgttgggaggttaggaggaggttttcgttagtttttcgaggtttcgaaagcgtttgggcgtagtt

SEQ ID NO: 19550 - DNA, 542 bp, Artificial Sequence
  chemically treated genomic DNA (Homo sapiens) CpG-island No: 19550
aactacgcccaaacgctttcgaaacctcgaaaaactaacgaaaacctcctcctaacctcccaacaaaccctacgcaaaaaaaaatacgaccgaccgacccgaacaacctcaccgaacgacaacaacgaataacacaacaacgtaacgaccgtacgacgcaaataaaaaaacacgaaaacgacgtcctcgctacccaaccaacccgacaacaaattctacaccgtaaaccccgccgcgtaaaactcgttaaacgtaaacacgaaacacacgacgaacaccaaataaacgaaaataaaaatcacctcgaaactatccatcgcgcaaccgccgaaaaactatcgaactaaacccccgccccgacgcgcgaacgaaaccgcaacgccaatcccgaacctatcgattacgacgaccgccgccgaccgccgcgaaacactctaaaacataaaatcccgccgcccgaccgcccgcgaaacactctaaaacataaaatcccgccgctcgaccgctcgcgaaacgctctaaaaaatacaatccccgtacga

SEQ ID NO: 19551 - DNA, 542 bp, Artificial Sequence
  chemically treated genomic DNA (Homo sapiens) CpG-island No: 19551
agttgcgtttaggcgttttcggggtttcggggagttggcggaggtttttttttgattttttagtaagttttgcgtaggagaggatgcggtcggtcggttcgagtagttttatcgagcggtagtagcgagtggtataatagcgtggcggtcgtgcggcgtaagtggaagggtacgaaggcggcgttttcgttgtttagttagttcgatagtaggttttgtatcgtgagtttcgtcgcgtggaattcgttgggcgtgaatacgaagtatacggcgaatattagataggcgagagtgaaggttatttcggggttgtttatcgcgtagtcgtcgggaagttgtcgagttaggttttcgtttcggcgcgcggacgaggtcgtagcgttagtttcggatttgtcggttgcggcggtcgtcgtcggtcgtcgcggggtattttaggatatggagtttcgtcgttcggtcgttcgcggggtattttagggtatggagtttcgtcgttcggtcgttcgcggggcgttttgggagatgtagttttcgtgcgg

SEQ ID NO: 19552 - DNA, 542 bp, Artificial Sequence
  chemically treated genomic DNA (Homo sapiens) CpG-island No: 19552
ccgcacgaaaactacatctcccaaaacgccccgcgaacgaccgaacgacgaaactccataccctaaaataccccgcgaacgaccgaacgacgaaactccatatcctaaaataccccgcgacgaccgacgacgaccgccgcaaccgacaaatccgaaactaacgctacgacctcgtccgcgcgccgaaacgaaaacctaactcgacaacttcccgacgactacgcgataaacaaccccgaaataaccttcactctcgcctatctaatattcgccgtatacttcgtattcacgcccaacgaattccacgcgacgaaactcacgatacaaaacctactatcgaactaactaaacaacgaaaacgccgccttcgtacccttccacttacgccgcacgaccgccacgctattataccactcgctactaccgctcgataaaactactcgaaccgaccgaccgcatcctctcctacgcaaaacttactaaaaaatcaaaaaaaaacctccgccaactccccgaaaccccgaaaacgcctaaacgcaact

SEQ ID NO: 19553 - DNA, 1300 bp, Artificial Sequence
  chemically treated genomic DNA (Homo sapiens) CpG-island No: 19553
ggttacgggatcgtgggaagtagttagtattcgttataggtcgcgtttttcgggtttcgggtttcgggttttcgttagggaggagatacgtttttatttgggtaggaattaagtagagtcgcgttttatttaggtcggaattaatgggagatgcgttacgatttaggtcgagaaacgtgtcgtttattttttttttacgatttgcgtcgcgtcgcgcgcggtcgaatttttcgttaaagttgttttcgttcgttaaggcgcgatttattagcgtcgtagaggttcgcggcggttcggtcgttttaatttcgcgggtgggggtaattttttttttaggtttttttttagtttacggcgtttatttggttttcgagtcgagggtcgggtagtcgggtttcgcggttgttcgcggtttcgaggtttcgttttagttttagtcggttcgcgaggcgcgcgtagttgagtggatttttgcggcgtggttcgatggtttcgttcgattcggcgcgcgcgggaggtcgaggggcggggttcggcgtttatataaaggcggttgggggcggggcgcgtagagttcgtgagcgtcggcgcggggacgcgggtttttgttttaggttttgttttgttttattttgcgttttttgttcgcgtcgtcgtcgttttagtttcggttttgcgttgcgcgttcggttcgtgttgttatggtttgtcgttcgcgaagttcgtcgaggtattagagtcgttgcgacggtgacgttaggtgaggtcgggttgcgcggcgggcgagggagcgcgtgtttcgtggggcgggggttgtgcggggtcggggtgtgggagggcggaggttgtaaggcggtttcgaatttttcgtgtttagtcgatcgcgttttttttcgtagttcgtcgtttttcgcgcgatggagtttgggacggaagcgtagagtcgacggtaggcgttggaggttcgaagacgtcgaggaggtagagtatcgcggcgtcgagcgtagattcgagaggtgggcgcgggattcgggggtcggggcgcggtggggtttttgacgaggtcgcgggttttagggatttcgtcgcgttttcgcggtgtcgggatcggttaggtcggtattttgcgtttttttattttggttttcgcgcggttcgtggattggggcggtcgtagtaggtttgggaggcgttggaatatttcggaagttttttgttaggatgggagttagttgaatcggcgttagttcgagttagttagttcgagtttgtgttgtgttttcgggagaggttagggttt

SEQ ID NO: 19554 - DNA, 1300 bp, Artificial Sequence
  chemically treated genomic DNA (Homo sapiens) CpG-island No: 19554
aaaccctaacctctcccgaaaacacaacacaaactcgaactaactaactcgaactaacgccgattcaactaactcccatcctaacaaaaaacttccgaaatattccaacgcctcccaaacctactacgaccgccccaatccacgaaccgcgcgaaaaccaaaataaaaaaacgcaaaataccgacctaaccgatcccgacaccgcgaaaacgcgacgaaatccctaaaacccgcgacctcgtcaaaaaccccaccgcgccccgacccccgaatcccgcgcccacctctcgaatctacgctcgacgccgcgatactctacctcctcgacgtcttcgaacctccaacgcctaccgtcgactctacgcttccgtcccaaactccatcgcgcgaaaaacgacgaactacgaaaaaaaacgcgatcgactaaacacgaaaaattcgaaaccgccttacaacctccgccctcccacaccccgaccccgcacaacccccgccccacgaaacacgcgctccctcgcccgccgcgcaacccgacctcacctaacgtcaccgtcgcaacgactctaatacctcgacgaacttcgcgaacgacaaaccataacaacacgaaccgaacgcgcaacgcaaaaccgaaactaaaacgacgacgacgcgaacaaaaaacgcaaaataaaacaaaacaaaacctaaaacaaaaacccgcgtccccgcgccgacgctcacgaactctacgcgccccgcccccaaccgcctttatataaacgccgaaccccgcccctcgacctcccgcgcgcgccgaatcgaacgaaaccatcgaaccacgccgcaaaaatccactcaactacgcgcgcctcgcgaaccgactaaaactaaaacgaaacctcgaaaccgcgaacaaccgcgaaacccgactacccgaccctcgactcgaaaaccaaataaacgccgtaaactaaaaaaaaacctaaaaaaaaaattacccccacccgcgaaattaaaacgaccgaaccgccgcgaacctctacgacgctaataaatcgcgccttaacgaacgaaaacaactttaacgaaaaattcgaccgcgcgcgacgcgacgcaaatcgtaaaaaaaaaataaacgacacgtttctcgacctaaatcgtaacgcatctcccattaattccgacctaaataaaacgcgactctacttaattcctacccaaataaaaacgtatctcctccctaacgaaaacccgaaacccgaaacccgaaaaacgcgacctataacgaatactaactacttcccacgatcccgtaacc

SEQ ID NO: 19555 - DNA, 1300 bp, Artificial Sequence
  chemically treated genomic DNA (Homo sapiens) CpG-island No: 19555
agattttgatttttttcgggagtataatatagattcgaattggttaattcgggttgacgtcggtttagttgatttttattttggtaagaggttttcggagtgttttagcgttttttaggtttgttgcggtcgttttagtttacgggtcgcgcggagattaagataaaaggacgtagggtgtcgatttgatcgatttcggtatcgcgagagcgcgacgaggtttttggagttcgcggtttcgttaagggttttatcgcgtttcgattttcgggtttcgcgtttatttttcgggtttgcgttcggcgtcgcggtgttttgttttttcggcgttttcgggtttttagcgtttgtcgtcggttttgcgttttcgttttaggttttatcgcgcgggggacggcgggttgcggggagggacgcggtcggttgggtacgggaggttcgggatcgttttataattttcgtttttttatatttcggtttcgtataattttcgttttacggggtacgcgttttttcgttcgtcgcgtagttcggttttatttggcgttatcgtcgtagcggttttgatgtttcggcgggtttcgcgggcggtaggttatggtagtacgggtcgggcgcgtagcgtagggtcgaggttgaggcggcggcggcgcgggtagagagcgtagagtagagtagggtagggtttgaggtagaaattcgcgttttcgcgtcggcgtttacgagttttgcgcgtttcgtttttaatcgtttttatgtgggcgtcgggtttcgtttttcggtttttcgcgcgcgtcgggtcgggcgagattatcgggttacgtcgtaggggtttatttagttgcgcgcgtttcgcgagtcgattggggttagggcgaggtttcgggatcgcgggtagtcgcgaagttcgattgttcggttttcggttcgggagttagatggacgtcgtgggttgaggagaggtttgaggaaaaggttgtttttattcgcgggattgaggcggtcgggtcgtcgcgggtttttgcgacgttgataggtcgcgttttggcgggcgggggtagttttggcgggagattcggtcgcgcgcgacgcggcgtaggtcgtgggggaagggtaagcggtacgtttttcggtttgggtcgtggcgtattttttattggtttcggtttgggtggagcgcggttttgtttggtttttgtttaggtgggggcgtgttttttttttggcgggaattcggaattcggaattcggaaggcgcggtttgtggcgggtattgattgttttttacggtttcgtggtt

SEQ ID NO: 19556 - DNA, 1300 bp, Artificial Sequence
  chemically treated genomic DNA (Homo sapiens) CpG-island No: 19556
aaccacgaaaccgtaaaaaacaatcaatacccgccacaaaccgcgccttccgaattccgaattccgaattcccgccaaaaaaaaaacacgcccccacctaaacaaaaaccaaacaaaaccgcgctccacccaaaccgaaaccaataaaaaatacgccacgacccaaaccgaaaaacgtaccgcttacccttcccccacgacctacgccgcgtcgcgcgcgaccgaatctcccgccaaaactacccccgcccgccaaaacgcgacctatcaacgtcgcaaaaacccgcgacgacccgaccgcctcaatcccgcgaataaaaacaaccttttcctcaaacctctcctcaacccacgacgtccatctaactcccgaaccgaaaaccgaacaatcgaacttcgcgactacccgcgatcccgaaacctcgccctaaccccaatcgactcgcgaaacgcgcgcaactaaataaacccctacgacgtaacccgataatctcgcccgacccgacgcgcgcgaaaaaccgaaaaacgaaacccgacgcccacataaaaacgattaaaaacgaaacgcgcaaaactcgtaaacgccgacgcgaaaacgcgaatttctacctcaaaccctaccctactctactctacgctctctacccgcgccgccgccgcctcaacctcgaccctacgctacgcgcccgacccgtactaccataacctaccgcccgcgaaacccgccgaaacatcaaaaccgctacgacgataacgccaaataaaaccgaactacgcgacgaacgaaaaaacgcgtaccccgtaaaacgaaaattatacgaaaccgaaatataaaaaaacgaaaattataaaacgatcccgaacctcccgtacccaaccgaccgcgtccctccccgcaacccgccgtcccccgcgcgataaaacctaaaacgaaaacgcaaaaccgacgacaaacgctaaaaacccgaaaacgccgaaaaaacaaaacaccgcgacgccgaacgcaaacccgaaaaataaacgcgaaacccgaaaatcgaaacgcgataaaacccttaacgaaaccgcgaactccaaaaacctcgtcgcgctctcgcgataccgaaatcgatcaaatcgacaccctacgtccttttatcttaatctccgcgcgacccgtaaactaaaacgaccgcaacaaacctaaaaaacgctaaaacactccgaaaacctcttaccaaaataaaaatcaactaaaccgacgtcaacccgaattaaccaattcgaatctatattatactcccgaaaaaaatcaaaatct

SEQ ID NO: 19557 - DNA, 1220 bp, Artificial Sequence
  chemically treated genomic DNA (Homo sapiens) CpG-island No: 19557
cgttttcggcgattatgagcgagggtttaatttatattgtgtaggtgtagaagtgcgattcgagagggcgagcgatttgttaacggttatatagcgggtagacggtaggcgggaaggcggcggcggcgagtttcgggtttcgagatcgcgcgtttcgggttgggttatcgtttgagttacggttagtgtcgatcgggtttttttttgcgcgttttgtttcgtcgttttaggtcgtcgtcgttataggttttgttttttaggtttggaggacgtcgtcgagtgttaggtacgtacgcgcgtagggggcggggcgtcgattcgggggcggggttagattttcgtatagggcgcgttgcggattcggtgggcggtgcgagtttgggcgtttggaggtttcgtttttttcgtcggcgcggcgcggttgagggtcggcgtggagaaggcggcggttgacgggttcgcggcggcggcggggcgcgggcggttaatgagggcggtcggagggggcggggcggcggtcgcggttttgtttcgtcgcggttgaggcgcgtcgttttgagcgagcggggtttgggcggtcggtagttttttcgtttcgttttttcgcggtcgcgtttaggtatcgagttcgggcggagcgcgtcgtcgttttttttttttttgtttacgttgtttatttttcggcgtatcggtttcgagttttgttcgcggtacgtggagggcgcgggcggtcgtgggcgcggggttttgcgtttcgagttgggcgcgtgttacgtttttttgttttcgtcgtttgcgtcgttcgtcgaggcgattttttcgtacgaggcgaggttcgttttggtggtttcgcgtcgtggttcggtggcgcgagaggcggggagtcgtcgtggtaaacggggttttggggcgtttcgaaggggatttagacgcgggaggttagattttttcggcgattcgaggaggggatttgcggcggatttcgaagtcgttttttttgcgtagtttgggggtgtaaatcgtcgagatttttttgtgtggagaaggcgtcggtgttcgttcgttgttgtcggattttagaggggtgttttttttcgttaatttgagcgtagtcgcggagtttttgttttttacgtagtttgtgttaagtggtttcgtgagttttcgcgcggtatttttggtgttttttttttgaagttaagtttttataattttaaagt

SEQ ID NO: 19558 - DNA, 1220 bp, Artificial Sequence
  chemically treated genomic DNA (Homo sapiens) CpG-island No: 19558
actttaaaattataaaaacttaacttcaaaaaaaaaacaccaaaaataccgcgcgaaaactcacgaaaccacttaacacaaactacgtaaaaaacaaaaactccgcgactacgctcaaattaacgaaaaaaaacacccctctaaaatccgacaacaacgaacgaacaccgacgccttctccacacaaaaaaatctcgacgatttacacccccaaactacgcaaaaaaaacgacttcgaaatccgccgcaaatcccctcctcgaatcgccgaaaaaatctaacctcccgcgtctaaatccccttcgaaacgccccaaaaccccgtttaccacgacgactccccgcctctcgcgccaccgaaccacgacgcgaaaccaccaaaacgaacctcgcctcgtacgaaaaaatcgcctcgacgaacgacgcaaacgacgaaaacaaaaaaacgtaacacgcgcccaactcgaaacgcaaaaccccgcgcccacgaccgcccgcgccctccacgtaccgcgaacaaaactcgaaaccgatacgccgaaaaataaacaacgtaaacaaaaaaaaaaaaaacgacgacgcgctccgcccgaactcgatacctaaacgcgaccgcgaaaaaacgaaacgaaaaaactaccgaccgcccaaaccccgctcgctcaaaacgacgcgcctcaaccgcgacgaaacaaaaccgcgaccgccgccccgccccctccgaccgccctcattaaccgcccgcgccccgccgccgccgcgaacccgtcaaccgccgccttctccacgccgaccctcaaccgcgccgcgccgacgaaaaaaacgaaacctccaaacgcccaaactcgcaccgcccaccgaatccgcaacgcgccctatacgaaaatctaaccccgcccccgaatcgacgccccgccccctacgcgcgtacgtacctaacactcgacgacgtcctccaaacctaaaaaacaaaacctataacgacgacgacctaaaacgacgaaacaaaacgcgcaaaaaaaaacccgatcgacactaaccgtaactcaaacgataacccaacccgaaacgcgcgatctcgaaacccgaaactcgccgccgccgccttcccgcctaccgtctacccgctatataaccgttaacaaatcgctcgccctctcgaatcgcacttctacacctacacaatataaattaaaccctcgctcataatcgccgaaaacg

SEQ ID NO: 19559 - DNA, 1220 bp, Artificial Sequence
  chemically treated genomic DNA (Homo sapiens) CpG-island No: 19559
gttttagagttatggaaatttagttttaaagaagaggtattaaggatgtcgcgcgaaaatttacgaggttatttaatataggttgcgtgggaaataggggtttcgcgattgcgtttagattaacggaaaaagatatttttttagagttcggtagtagcgggcgggtatcggcgttttttttatataggagaatttcggcgatttatatttttaggttacgtagaaaaagcggtttcggaattcgtcgtaagtttttttttcgggtcgtcggggaagtttggtttttcgcgtttgggtttttttcgggacgttttaaggtttcgtttattacggcgatttttcgtttttcgcgttatcgaattacggcgcggggttattagggcgggtttcgtttcgtgcggaaaagtcgtttcgacgggcggcgtagacggcggaggtagggggacgtagtacgcgtttagttcggagcgtagggtttcgcgtttacgatcgttcgcgttttttacgtgtcgcgggtaaagttcggagtcggtgcgtcgaggaatgggtagcgtggataagagaggagggggcggcggcgcgtttcgttcgggttcggtatttgagcgcggtcgcgggggggcggagcgagaagattgtcggtcgtttaggtttcgttcgtttagggcgacgcgttttagtcgcggcggaataaaatcgcggtcgtcgtttcgtttttttcggtcgtttttattggtcgttcgcgtttcgtcgtcgtcgcgagttcgttagtcgtcgttttttttacgtcggtttttagtcgcgtcgcgtcgacggagggggcggggtttttaggcgtttaggttcgtatcgtttatcgagttcgtagcgcgttttgtgcgagggtttggtttcgttttcggatcgacgtttcgttttttgcgcgcgtgcgtgtttggtattcggcggcgttttttaggtttagaaggtaagatttgtggcggcggcgatttgaggcggcggggtaggacgcgtagaggagggttcggtcggtattagtcgtggtttaggcggtgatttagttcggggcgcgcggtttcggggttcgaggttcgtcgtcgtcgttttttcgtttgtcgtttgttcgttgtgtagtcgttggtaggtcgttcgttttttcgggtcgtatttttgtatttgtatagtgtgaattaggttttcgtttatggtcgtcgagggcg

SEQ ID NO: 19560 - DNA, 1220 bp, Artificial Sequence
  chemically treated genomic DNA (Homo sapiens) CpG-island No: 19560
cgccctcgacgaccataaacgaaaacctaattcacactatacaaatacaaaaatacgacccgaaaaaacgaacgacctaccaacgactacacaacgaacaaacgacaaacgaaaaaacgacgacgacgaacctcgaaccccgaaaccgcgcgccccgaactaaatcaccgcctaaaccacgactaataccgaccgaaccctcctctacgcgtcctaccccgccgcctcaaatcgccgccgccacaaatcttaccttctaaacctaaaaaacgccgccgaataccaaacacgcacgcgcgcaaaaaacgaaacgtcgatccgaaaacgaaaccaaaccctcgcacaaaacgcgctacgaactcgataaacgatacgaacctaaacgcctaaaaaccccgccccctccgtcgacgcgacgcgactaaaaaccgacgtaaaaaaaacgacgactaacgaactcgcgacgacgacgaaacgcgaacgaccaataaaaacgaccgaaaaaaacgaaacgacgaccgcgattttattccgccgcgactaaaacgcgtcgccctaaacgaacgaaacctaaacgaccgacaatcttctcgctccgcccccccgcgaccgcgctcaaataccgaacccgaacgaaacgcgccgccgccccctcctctcttatccacgctacccattcctcgacgcaccgactccgaactttacccgcgacacgtaaaaaacgcgaacgatcgtaaacgcgaaaccctacgctccgaactaaacgcgtactacgtccccctacctccgccgtctacgccgcccgtcgaaacgacttttccgcacgaaacgaaacccgccctaataaccccgcgccgtaattcgataacgcgaaaaacgaaaaatcgccgtaataaacgaaaccttaaaacgtcccgaaaaaaacccaaacgcgaaaaaccaaacttccccgacgacccgaaaaaaaaacttacgacgaattccgaaaccgctttttctacgtaacctaaaaatataaatcgccgaaattctcctatataaaaaaaacgccgatacccgcccgctactaccgaactctaaaaaaatatctttttccgttaatctaaacgcaatcgcgaaacccctatttcccacgcaacctatattaaataacctcgtaaattttcgcgcgacatccttaatacctcttctttaaaactaaatttccataactctaaaac

SEQ ID NO: 19561 - DNA, 706 bp, Artificial Sequence
  chemically treated genomic DNA (Homo sapiens) CpG-island No: 19561
cgttcgggtttcgcgtatttatttagcgttgttagttgcggcgagagggtagacggggcggcgtcgggggttgtagtgggttcggttcgggggatttacgcgtttgggcgggggtggtttttttacgtcggttgtcgcggcggttcggggtcgacgtcggggacgatatagtgttcggagtatttgcgcgataaggataagttcgggtcgggttcgtttttcggtttttttgttttgtttcgtagcgcggacgttttcgtcggtttcgcgttacgtttttttcgtcggcgcgcggttatcgtggaaaggcggtcgtttgtcgacgacgttcgcggatttcgagtttatttggcgagtagcgtttttaaatcgcgagatttagagttttcgtcggcggtaaggtcgttttcgtttttggcggggttttattaattatagcggcgttcgtacgtggtttcgttttcgggaggcgttattgcgtatcggtagggggggatagtgtcgttttttttagcgttcgtgcgtaaattagaagtaggtttcgttcggttttttttggtttagatggtttgattttttgcgcggtagcgttttcgcgggaaaattgggttttatagtattagttttcggggtgtgtttttttagcgttggttagggagcgtgtgtttttttattttttaggcgtttttggttaataaggatatta

SEQ ID NO: 19562 - DNA, 706 bp, Artificial Sequence
  chemically treated genomic DNA (Homo sapiens) CpG-island No: 19562
taatatccttattaaccaaaaacgcctaaaaaataaaaaaacacacgctccctaaccaacgctaaaaaaacacaccccgaaaactaatactataaaacccaattttcccgcgaaaacgctaccgcgcaaaaaatcaaaccatctaaaccaaaaaaaaccgaacgaaacctacttctaatttacgcacgaacgctaaaaaaaacgacactatccccccctaccgatacgcaataacgcctcccgaaaacgaaaccacgtacgaacgccgctataattaataaaaccccgccaaaaacgaaaacgaccttaccgccgacgaaaactctaaatctcgcgatttaaaaacgctactcgccaaataaactcgaaatccgcgaacgtcgtcgacaaacgaccgcctttccacgataaccgcgcgccgacgaaaaaaacgtaacgcgaaaccgacgaaaacgtccgcgctacgaaacaaaacaaaaaaaccgaaaaacgaacccgacccgaacttatccttatcgcgcaaatactccgaacactatatcgtccccgacgtcgaccccgaaccgccgcgacaaccgacgtaaaaaaaccacccccgcccaaacgcgtaaatcccccgaaccgaacccactacaacccccgacgccgccccgtctaccctctcgccgcaactaacaacgctaaataaatacgcgaaacccgaacg

SEQ ID NO: 19563 - DNA, 706 bp, Artificial Sequence
  chemically treated genomic DNA (Homo sapiens) CpG-island No: 19563
taatgtttttattaattaaaaacgtttaagggataaagaagtatacgttttttagttaacgttagaggaatatatttcgagagttggtgttgtaggatttagttttttcgcgaaaacgttgtcgcgtagggggttagattatttggattaaggggggtcgagcgaggtttatttttggtttacgtacgggcgttgaaagaagcggtattgtttttttttgtcgatgcgtagtggcgtttttcggaggcggagttacgtacgagcgtcgttgtgattggtgaggtttcgttaggggcggagacgattttgtcgtcggcgggaattttgggtttcgcggtttgggagcgttattcgttaggtggattcggagttcgcgagcgtcgtcggtaagcggtcgtttttttacggtaatcgcgcgtcggcggggagggcgtggcgcggagtcgacgggaacgttcgcgttgcggagtagggtagggaagtcgggaggcgggttcggttcgagtttgtttttgtcgcgtaggtatttcgagtattatgtcgttttcggcgtcgatttcgagtcgtcgcggtagtcggcgtggaagggttattttcgtttagacgcgtgagtttttcgagtcgggtttattatagttttcggcgtcgtttcgtttgttttttcgtcgtagttggtagcgttgggtgggtgcgcgggattcgggcg

SEQ ID NO: 19564 - DNA, 706 bp, Artificial Sequence
  chemically treated genomic DNA (Homo sapiens) CpG-island No: 19564
cgcccgaatcccgcgcacccacccaacgctaccaactacgacgaaaaaacaaacgaaacgacgccgaaaactataataaacccgactcgaaaaactcacgcgtctaaacgaaaataacccttccacgccgactaccgcgacgactcgaaatcgacgccgaaaacgacataatactcgaaatacctacgcgacaaaaacaaactcgaaccgaacccgcctcccgacttccctaccctactccgcaacgcgaacgttcccgtcgactccgcgccacgccctccccgccgacgcgcgattaccgtaaaaaaacgaccgcttaccgacgacgctcgcgaactccgaatccacctaacgaataacgctcccaaaccgcgaaacccaaaattcccgccgacgacaaaatcgtctccgcccctaacgaaacctcaccaatcacaacgacgctcgtacgtaactccgcctccgaaaaacgccactacgcatcgacaaaaaaaaacaataccgcttctttcaacgcccgtacgtaaaccaaaaataaacctcgctcgaccccccttaatccaaataatctaaccccctacgcgacaacgttttcgcgaaaaaactaaatcctacaacaccaactctcgaaatatattcctctaacgttaactaaaaaacgtatacttctttatcccttaaacgtttttaattaataaaaacatta

SEQ ID NO: 19565 - DNA, 554 bp, Artificial Sequence
  chemically treated genomic DNA (Homo sapiens) CpG-island No: 19565
aggggcggggaggggcggggcgcgtcgcgttagttcgcggcgtttttaggtcgggtcgtagcggggcgtggtttttagaggcgtggttttgggcgtgggggcggggttttttggtggggcggggtcgcgtagggtcgttttcgtcgtcggtcgttcgcgtttcgttttcgtgtcgtagtttataggtttcgtttcggttcgttttttcgttcgttttttaagtcgtcgcggcgtcgagtcggttttttcgtcggtgttcgagaggcgttttcggttcggttcggttcggttcgcgtttttcgttttcgttttttcgggtcggcggcggtgggcgagttcgcgggttcggtcgtttttagttttagtttcgtcgggtttcgtttttcgtcgagtgtatgaggttgacgttattttgttgtatttggagggaagaacgtatgggagaggaaggtgcgcgggtcgcggggtgtggggcgagggtttggagggggtgttcggggtagcgtggggtacgggagggggtcgggtttgttaggaggtcgcgtttttgtttt

SEQ ID NO: 19566 - DNA, 554 bp, Artificial Sequence
  chemically treated genomic DNA (Homo sapiens) CpG-island No: 19566
aaaacaaaaacgcgacctcctaacaaacccgaccccctcccgtaccccacgctaccccgaacaccccctccaaaccctcgccccacaccccgcgacccgcgcaccttcctctcccatacgttcttccctccaaatacaacaaaataacgtcaacctcatacactcgacgaaaaacgaaacccgacgaaactaaaactaaaaacgaccgaacccgcgaactcgcccaccgccgccgacccgaaaaaacgaaaacgaaaaacgcgaaccgaaccgaaccgaaccgaaaacgcctctcgaacaccgacgaaaaaaccgactcgacgccgcgacgacttaaaaaacgaacgaaaaaacgaaccgaaacgaaacctataaactacgacacgaaaacgaaacgcgaacgaccgacgacgaaaacgaccctacgcgaccccgccccaccaaaaaaccccgcccccacgcccaaaaccacgcctctaaaaaccacgccccgctacgacccgacctaaaaacgccgcgaactaacgcgacgcgccccgcccctccccgcccct

SEQ ID NO: 19567 - DNA, 554 bp, Artificial Sequence
  chemically treated genomic DNA (Homo sapiens) CpG-island No: 19567
gaggtaggggcgcggttttttggtagattcggttttttttcgtgttttacgttgtttcgggtattttttttaggttttcgttttatatttcgcggttcgcgtattttttttttttatacgtttttttttttaggtgtaataaagtagcgttaattttatgtattcgacggggggcggggttcggcggggttggggttgggggcggtcgggttcgcgagttcgtttatcgtcgtcggttcggggaggcgggggcggagggcgcgggtcgggtcgggtcgggtcgggggcgtttttcggatatcggcggggaaatcggttcggcgtcgcggcggtttggggagcgagcggaggggcggatcgaggcggggtttgtgagttgcggtacgggggcggggcgcgggcggtcggcggcgggaacggttttgcgcggtttcgttttattagaaaatttcgtttttacgtttaaggttacgtttttagaggttacgtttcgttgcggttcggtttgggggcgtcgcgagttggcgcggcgcgtttcgttttttttcgttttt

SEQ ID NO: 19568 - DNA, 554 bp, Artificial Sequence
  chemically treated genomic DNA (Homo sapiens) CpG-island No: 19568
aaaaacgaaaaaaaacgaaacgcgccgcgccaactcgcgacgcccccaaaccgaaccgcaacgaaacgtaacctctaaaaacgtaaccttaaacgtaaaaacgaaattttctaataaaacgaaaccgcgcaaaaccgttcccgccgccgaccgcccgcgccccgcccccgtaccgcaactcacaaaccccgcctcgatccgcccctccgctcgctccccaaaccgccgcgacgccgaaccgatttccccgccgatatccgaaaaacgcccccgacccgacccgacccgacccgcgccctccgcccccgcctccccgaaccgacgacgataaacgaactcgcgaacccgaccgcccccaaccccaaccccgccgaaccccgccccccgtcgaatacataaaattaacgctactttattacacctaaaaaaaaaaacgtataaaaaaaaaaaatacgcgaaccgcgaaatataaaacgaaaacctaaaaaaaatacccgaaacaacgtaaaacacgaaaaaaaaccgaatctaccaaaaaaccgcgcccctacctc

SEQ ID NO: 19569 - DNA, 959 bp, Artificial Sequence
  chemically treated genomic DNA (Homo sapiens) CpG-island No: 19569
ttttcggcgttttgtttcgtttatttgcgcgaggagattttagttgttggtggtgggggacgcgaattcggggtttttcgggaatggggatagtaagagggggttaggcgtgagcgaggttgtaggtttcgtgcgagtttggggtggtttttgtgtcgacgttgcgcggggggcggaggcggggggtttaggggtttgtatcgagcgtttttttttgtcgtgcgaggcgcggtcgtagtttttttttgttaaaagttgcgtgtgtgtgatcggcgttcgggaggatttgtttgtaggtttttcgtcgcgttgagggtaaagttagagagttttttttttgttttgcggttattgttttttaatcgtaggcgttttttgtgtttagagttggggatcgattcgttgtcgtttttgttcgcggcgttattcgtggagattaatcgaaggttgcggcgttttttcgttttcgggttaggtttttgcgttgggagtgcgcggcgtggggttgttgtggggtcggattttcgcgagtttggaggtggtggcgatagggataatttgggtagggcgtgtggaaagtagtcgttaggttgtagattttttgttttcgtatatttcgtgttcgtttttttttgtcgcggcgtcgttttatttttgtcgcgcgtttcggggcggttggaggttgtgtttgtcgtttgtttcgggaaggtaagggatagcgtgttgggattttgcgttttttgattttaatcgtttagtacgtcggttagagtgttcggtttgtttggcgggttttgaaagtttttagttttcggtgtttgcgatttgtattcgtaggttttgtttttttcggaaatttttgagattcgtgatcgttcgttttttcgttttcgggatttttatattttagggttgtttgggggtggggtgggagatggcgtggaattttttgtaaattt

SEQ ID NO: 19570 - DNA, 959 bp, Artificial Sequence
  chemically treated genomic DNA (Homo sapiens) CpG-island No: 19570
aaatttacaaaaaattccacgccatctcccaccccacccccaaacaaccctaaaatataaaaatcccgaaaacgaaaaaacgaacgatcacgaatctcaaaaatttccgaaaaaaacaaaacctacgaatacaaatcgcaaacaccgaaaactaaaaactttcaaaacccgccaaacaaaccgaacactctaaccgacgtactaaacgattaaaatcaaaaaacgcaaaatcccaacacgctatcccttaccttcccgaaacaaacgacaaacacaacctccaaccgccccgaaacgcgcgacaaaaataaaacgacgccgcgacaaaaaaaaacgaacacgaaatatacgaaaacaaaaaatctacaacctaacgactactttccacacgccctacccaaattatccctatcgccaccacctccaaactcgcgaaaatccgaccccacaacaaccccacgccgcgcactcccaacgcaaaaacctaacccgaaaacgaaaaaacgccgcaaccttcgattaatctccacgaataacgccgcgaacaaaaacgacaacgaatcgatccccaactctaaacacaaaaaacgcctacgattaaaaaacaataaccgcaaaacaaaaaaaaaactctctaactttaccctcaacgcgacgaaaaacctacaaacaaatcctcccgaacgccgatcacacacacgcaacttttaacaaaaaaaaactacgaccgcgcctcgcacgacaaaaaaaaacgctcgatacaaacccctaaaccccccgcctccgccccccgcgcaacgtcgacacaaaaaccaccccaaactcgcacgaaacctacaacctcgctcacgcctaaccccctcttactatccccattcccgaaaaaccccgaattcgcgtcccccaccaccaacaactaaaatctcctcgcgcaaataaacgaaacaaaacgccgaaaa

SEQ ID NO: 19571 - DNA, 959 bp, Artificial Sequence
  chemically treated genomic DNA (Homo sapiens) CpG-island No: 19571
ggatttgtagaaagttttacgttattttttattttatttttaggtagttttgaagtatagaagtttcgggggcggggaggcgggcggttacgaattttaaaaattttcgaagaaaataggatttgcgaatataggtcgtagatatcgggaattaggggtttttagaattcgttaggtaggtcgggtattttggtcggcgtgttaggcggttggagttagggaacgtagagttttagtacgttgttttttgttttttcggagtaggcggtaaatatagtttttagtcgtttcggggcgcgcggtaggaatgaaacggcgtcgcggtagaaaggggcgagtacgggatgtacgaaagtaaaaagtttgtaatttagcggttgttttttatacgttttgtttaagttgtttttgtcgttattatttttaggttcgcgggagttcggttttataatagttttacgtcgcgtatttttagcgtaaaagtttaattcggaggcggggaaacgtcgtagttttcgattggtttttacgggtggcgtcgcgagtagaggcggtagcgggtcggtttttagttttgggtataaagagcgtttgcggttggaaggtagtagtcgtagagtagagaaagggttttttaattttgtttttagcgcggcggagaatttgtaggtaggttttttcgggcgtcggttatatatacgtaatttttaataaaaggaagttgcggtcgcgtttcgtacggtaagagaaggcgttcggtgtaaatttttgagtttttcgttttcgtttttcgcgtaacgtcggtataaaagttattttaaattcgtacggagtttgtagtttcgtttacgtttaatttttttttgttgtttttattttcgaagaatttcggattcgcgttttttattattagtagttggggttttttcgcgtaggtgagcgaggtagggcgtcggaga

SEQ ID NO: 19572 - DNA, 959 bp, Artificial Sequence
  chemically treated genomic DNA (Homo sapiens) CpG-island No: 19572
tctccgacgccctacctcgctcacctacgcgaaaaaaccccaactactaataataaaaaacgcgaatccgaaattcttcgaaaataaaaacaacaaaaaaaaattaaacgtaaacgaaactacaaactccgtacgaatttaaaataacttttataccgacgttacgcgaaaaacgaaaacgaaaaactcaaaaatttacaccgaacgccttctcttaccgtacgaaacgcgaccgcaacttccttttattaaaaattacgtatatataaccgacgcccgaaaaaacctacctacaaattctccgccgcgctaaaaacaaaattaaaaaaccctttctctactctacgactactaccttccaaccgcaaacgctctttatacccaaaactaaaaaccgacccgctaccgcctctactcgcgacgccacccgtaaaaaccaatcgaaaactacgacgtttccccgcctccgaattaaacttttacgctaaaaatacgcgacgtaaaactattataaaaccgaactcccgcgaacctaaaaataataacgacaaaaacaacttaaacaaaacgtataaaaaacaaccgctaaattacaaactttttactttcgtacatcccgtactcgcccctttctaccgcgacgccgtttcattcctaccgcgcgccccgaaacgactaaaaactatatttaccgcctactccgaaaaaacaaaaaacaacgtactaaaactctacgttccctaactccaaccgcctaacacgccgaccaaaatacccgacctacctaacgaattctaaaaacccctaattcccgatatctacgacctatattcgcaaatcctattttcttcgaaaatttttaaaattcgtaaccgcccgcctccccgcccccgaaacttctatacttcaaaactacctaaaaataaaataaaaaataacgtaaaactttctacaaatcc

SEQ ID NO: 19573 - DNA, 604 bp, Artificial Sequence
  chemically treated genomic DNA (Homo sapiens) CpG-island No: 19573
tttagtcgcggtcggttttacggtttttggattttgagagtcgtgggcgtttagggtcgattttggtttttggttttagagtatagtttttcgttttttcgcgatttagcgaggttatcggagttagcgaggagacgtgggtcgcggtgagaagagagagtattcggttcgtgttagggttgtaaggtagttgtcgtttattttcggaaatcggtggttagtgatagatgttagcggtttataatttcggtttttatgtagttttcgtcgttttttttatgaggaacgtacgtgtgcgcgtaattacgtacgtacgtatattacgtacgtacgtaggaggttcgtatttagttacgtttatatatcgttaaatcgttaggaagttacgtatttacgaagttacgtagtgacgtcgttacgtacgtacgtacgtatttgttataaggagacgttgtttagtttatcggattttgtttcgcgttagttaattaggataaggtcggggagttcgagataggtagtttagattaagaatcggaaggaggaaaaggaatcggagggaggaagaggaggggcgggacgagattattaggtaggattttta

SEQ ID NO: 19574 - DNA, 604 bp, Artificial Sequence
  chemically treated genomic DNA (Homo sapiens) CpG-island No: 19574
taaaaatcctacctaataatctcgtcccgcccctcctcttcctccctccgattccttttcctccttccgattcttaatctaaactacctatctcgaactccccgaccttatcctaattaactaacgcgaaacaaaatccgataaactaaacaacgtctccttataacaaatacgtacgtacgtacgtaacgacgtcactacgtaacttcgtaaatacgtaacttcctaacgatttaacgatatataaacgtaactaaatacgaacctcctacgtacgtacgtaatatacgtacgtacgtaattacgcgcacacgtacgttcctcataaaaaaaacgacgaaaactacataaaaaccgaaattataaaccgctaacatctatcactaaccaccgatttccgaaaataaacgacaactaccttacaaccctaacacgaaccgaatactctctcttctcaccgcgacccacgtctcctcgctaactccgataacctcgctaaatcgcgaaaaaacgaaaaactatactctaaaaccaaaaaccaaaatcgaccctaaacgcccacgactctcaaaatccaaaaaccgtaaaaccgaccgcgactaaa

SEQ ID NO: 19575 - DNA, 604 bp, Artificial Sequence
  chemically treated genomic DNA (Homo sapiens) CpG-island No: 19575
taaaaattttgtttggtggtttcgtttcgtttttttttttttttttttcggttttttttttttttttcggtttttggtttaggttgtttgtttcgagtttttcggttttgttttggttggttggcgcgggataggattcggtaaattgaatagcgtttttttgtggtaagtgcgtgcgtacgtgcgtggcgacgttattgcgtggtttcgtgaatacgtggttttttagcgatttggcggtgtataggcgtggttgaatacgggttttttgcgtacgtgcgtggtgtacgtacgtgcgtgattacgcgtatacgtacgttttttatgaaagggacgacgggagttgtatgaaagtcgaagttatggatcgttagtatttgttattggttatcggttttcgggagtaagcggtagttattttatagttttgatacgagtcgggtgttttttttttttatcgcggtttacgttttttcgttggtttcggtggtttcgttgggtcgcgaggaggcggaggattgtattttgaggttaaaagttagagtcggttttgaacgtttacgatttttagggtttagaggtcgtgagatcggtcgcggttgaa

SEQ ID NO: 19576 - DNA, 604 bp, Artificial Sequence
  chemically treated genomic DNA (Homo sapiens) CpG-island No: 19576
ttcaaccgcgaccgatctcacgacctctaaaccctaaaaatcgtaaacgttcaaaaccgactctaacttttaacctcaaaatacaatcctccgcctcctcgcgacccaacgaaaccaccgaaaccaacgaaaaaacgtaaaccgcgataaaaaaaaaaaacacccgactcgtatcaaaactataaaataactaccgcttactcccgaaaaccgataaccaataacaaatactaacgatccataacttcgactttcatacaactcccgtcgtccctttcataaaaaacgtacgtatacgcgtaatcacgcacgtacgtacaccacgcacgtacgcaaaaaacccgtattcaaccacgcctatacaccgccaaatcgctaaaaaaccacgtattcacgaaaccacgcaataacgtcgccacgcacgtacgcacgcacttaccacaaaaaaacgctattcaatttaccgaatcctatcccgcgccaaccaaccaaaacaaaaccgaaaaactcgaaacaaacaacctaaaccaaaaaccgaaaaaaaaaaaaaaaaccgaaaaaaaaaaaaaaaaaaacgaaacgaaaccaccaaacaaaattttta

SEQ ID NO: 19577 - DNA, 812 bp, Artificial Sequence
  chemically treated genomic DNA (Homo sapiens) CpG-island No: 19577
ttttcgtcggtcgcgtgcggatataaggatggggattttttagcgaggagcgttttgggcggggtttcggacgtatgcgcggttttcgtacggaagttcggaaggaggggtagggggcggtggtttaggttttttcgggcggcggcggcggcggcggcggcgacggcgacggcgacggtagcggggacggtagtagtagcgggagtagtagcgtggacgcggttggcgttggcgttatgaattcgttgtaaggcgtaggttgtgtagtacggggtgcgggggaggaggaggaggacgtcgcggtgaagtttttcgttatgaatttgaggggttttttttaggattttaattcgaggtgaggcggcgtcgttggcgttttcgggagttcgcgttgcgggttcgggcgcgggttggtgttcggtttcggggaggtacggcgggcgagatgttgtagttcgaggattcgggcgtttgttcgagtttttttgcgggtgtaagcggtttttaggtaaaatagtcggtttcggcgttcgttcgtttttttttttcgtgttcggtgtttttagtttttgttcggttacggtcggaagggttcggtcgcgagtatcgttttgttttaagggaattttatttttttttgtttgttgttttttattggtgttttaattttttcgtttcggttttatttttttttgcgtcgttgcgggttttttatttttcgcgttagggtcgttttattcgatttaatatttttatttttattttagttgttttttttagtttttcgtagtttttggggttttttttgggtt

SEQ ID NO: 19578 - DNA, 812 bp, Artificial Sequence
  chemically treated genomic DNA (Homo sapiens) CpG-island No: 19578
aacccaaaaaaaaccccaaaaactacgaaaaactaaaaaaaacaactaaaataaaaataaaaatattaaatcgaataaaacgaccctaacgcgaaaaataaaaaacccgcaacgacgcaaaaaaaaataaaaccgaaacgaaaaaattaaaacaccaataaaaaacaacaaacaaaaaaaaataaaattcccttaaaacaaaacgatactcgcgaccgaacccttccgaccgtaaccgaacaaaaactaaaaacaccgaacacgaaaaaaaaaaacgaacgaacgccgaaaccgactattttacctaaaaaccgcttacacccgcaaaaaaactcgaacaaacgcccgaatcctcgaactacaacatctcgcccgccgtacctccccgaaaccgaacaccaacccgcgcccgaacccgcaacgcgaactcccgaaaacgccaacgacgccgcctcacctcgaattaaaatcctaaaaaaaacccctcaaattcataacgaaaaacttcaccgcgacgtcctcctcctcctcccccgcaccccgtactacacaacctacgccttacaacgaattcataacgccaacgccaaccgcgtccacgctactactcccgctactactaccgtccccgctaccgtcgccgtcgccgtcgccgccgccgccgccgccgccgcccgaaaaaacctaaaccaccgccccctacccctccttccgaacttccgtacgaaaaccgcgcatacgtccgaaaccccgcccaaaacgctcctcgctaaaaaatccccatccttatatccgcacgcgaccgacgaaaa

SEQ ID NO: 19579 - DNA, 812 bp, Artificial Sequence
  chemically treated genomic DNA (Homo sapiens) CpG-island No: 19579
aatttaaggaaaattttaaggattgcgaggaattggaggaaatagttggggtgggggtaggggtgttgggtcgagtgagacggttttgacgcggagaatggagggttcgtagcggcgtagaagaggatggaatcgagacgaagaagttgggatattaatgagggatagtaagtagaaaagaatggggtttttttggggtaggacggtgttcgcggtcgggttttttcggtcgtggtcgggtaggggttgaaagtatcgggtacgggaggaggaagcgggcgggcgtcgaggtcgattgttttgtttggggatcgtttgtattcgtagggaggttcgggtaggcgttcgggttttcgggttgtagtatttcgttcgtcgtgttttttcggagtcgaatattagttcgcgttcgagttcgtagcgcggattttcgggggcgttaacgacgtcgttttatttcgggttgaagttttggaagaggttttttaggtttatggcggagaattttatcgcggcgtttttttttttttttttcgtatttcgtgttgtatagtttgcgttttatagcgggtttatggcgttagcgttagtcgcgtttacgttgttgttttcgttattgttgtcgttttcgttgtcgtcgtcgtcgtcgtcgtcgtcgtcgtcgtcgtcgtcgttcggagaaatttgagttatcgttttttgttttttttttcgggttttcgtacgagggtcgcgtatgcgttcggagtttcgtttagagcgtttttcgttgggaggtttttatttttgtgttcgtacgcgatcggcggagg

SEQ ID NO: 19580 - DNA, 812 bp, Artificial Sequence
  chemically treated genomic DNA (Homo sapiens) CpG-island No: 19580
cctccgccgatcgcgtacgaacacaaaaataaaaacctcccaacgaaaaacgctctaaacgaaactccgaacgcatacgcgaccctcgtacgaaaacccgaaaaaaaaaacaaaaaacgataactcaaatttctccgaacgacgacgacgacgacgacgacgacgacgacgacgacgacaacgaaaacgacaacaataacgaaaacaacaacgtaaacgcgactaacgctaacgccataaacccgctataaaacgcaaactatacaacacgaaatacgaaaaaaaaaaaaaaaaacgccgcgataaaattctccgccataaacctaaaaaacctcttccaaaacttcaacccgaaataaaacgacgtcgttaacgcccccgaaaatccgcgctacgaactcgaacgcgaactaatattcgactccgaaaaaacacgacgaacgaaatactacaacccgaaaacccgaacgcctacccgaacctccctacgaatacaaacgatccccaaacaaaacaatcgacctcgacgcccgcccgcttcctcctcccgtacccgatactttcaacccctacccgaccacgaccgaaaaaacccgaccgcgaacaccgtcctaccccaaaaaaaccccattcttttctacttactatccctcattaatatcccaacttcttcgtctcgattccatcctcttctacgccgctacgaaccctccattctccgcgtcaaaaccgtctcactcgacccaacacccctacccccaccccaactatttcctccaattcctcgcaatccttaaaattttccttaaatt

SEQ ID NO: 19581 - DNA, 1105 bp, Artificial Sequence
  chemically treated genomic DNA (Homo sapiens) CpG-island No: 19581
cgggagcggtcgcgcgagttttggagtagggcgcggttattggtgacgtacgtcggggagtacggcgtttacgtttttattattagcgaggttttatattcggcgttttaagttcggggttggaggcgtttcggttttttttttttcggagcgggatcggtttcgttttcgcgtttcgggtcgttttcggcggttttttttattttttagttttggttttttcgggcgtagtatatttttagtcggtcgtagtttgatacgtcgcgcggttttttagtttttcgcggttgtttttttaggtatggtatagggtttcgttttattatggtagtagtacggtatagtacgttcgattttatgttcggcgttaaaggtgagggcgttcgtcgttatttgcgtggttattttcgtcgttttcgtcgtttggcgggttggggcgggggtcgggcgtggcgtgcgtcgcgggtcgaataatgcgggcggttcgcgcggcgtcgtattttttcggattgttacgtatagcgcgttgcggggtcgcgtgtatcggcggtcgggcggaggtcgcgtttttgttggtttcgcgtttcgtttcggtcgtagttcggggtttgtaggggtagtttcgggtgttcgtcggtcgcgtcgttttttcgggttttggtcgtttattcgcgtttttacgcgggttcgtcgttttcgcgttttcgttcggggagttttcgggttgtcgggcgcgggcggattttttatgggacgagggttgtagggattgcggcggagcgaggcgtgattcgcgcggcgagttcgggttgggggcgtgcgtcgagcggggttgttcgcgcgatttttttttgtttttgtaggcgggtaaattttttttttgggggcgggggttttttttcgtagggagttggggttggggaaaggtttgcggacgcgtagcgtttgtagaatttttagtcgattgcgtaggagacggatttttcggaaaggaattgggggacgggaaaaggaaacgattattattattgggggtggggaggtatgaggtttgggcgcgggaatcgtttatatttcgaatcggggagttattaaaagatagtcg

SEQ ID NO: 19582 - DNA, 1105 bp, Artificial Sequence
  chemically treated genomic DNA (Homo sapiens) CpG-island No: 19582
cgactatcttttaataactccccgattcgaaatataaacgattcccgcgcccaaacctcatacctccccacccccaataataataatcgtttccttttcccgtcccccaattcctttccgaaaaatccgtctcctacgcaatcgactaaaaattctacaaacgctacgcgtccgcaaacctttccccaaccccaactccctacgaaaaaaaacccccgcccccaaaaaaaaaatttacccgcctacaaaaacaaaaaaaaatcgcgcgaacaaccccgctcgacgcacgcccccaacccgaactcgccgcgcgaatcacgcctcgctccgccgcaatccctacaaccctcgtcccataaaaaatccgcccgcgcccgacaacccgaaaactccccgaacgaaaacgcgaaaacgacgaacccgcgtaaaaacgcgaataaacgaccaaaacccgaaaaaacgacgcgaccgacgaacacccgaaactacccctacaaaccccgaactacgaccgaaacgaaacgcgaaaccaacaaaaacgcgacctccgcccgaccgccgatacacgcgaccccgcaacgcgctatacgtaacaatccgaaaaaatacgacgccgcgcgaaccgcccgcattattcgacccgcgacgcacgccacgcccgacccccgccccaacccgccaaacgacgaaaacgacgaaaataaccacgcaaataacgacgaacgccctcacctttaacgccgaacataaaatcgaacgtactataccgtactactaccataataaaacgaaaccctataccatacctaaaaaaacaaccgcgaaaaactaaaaaaccgcgcgacgtatcaaactacgaccgactaaaaatatactacgcccgaaaaaaccaaaactaaaaaataaaaaaaaccgccgaaaacgacccgaaacgcgaaaacgaaaccgatcccgctccgaaaaaaaaaaaaccgaaacgcctccaaccccgaacttaaaacgccgaatataaaacctcgctaataataaaaacgtaaacgccgtactccccgacgtacgtcaccaataaccgcgccctactccaaaactcgcgcgaccgctcccg

SEQ ID NO: 19583 - DNA, 1105 bp, Artificial Sequence
  chemically treated genomic DNA (Homo sapiens) CpG-island No: 19583
cggttgttttttgatagtttttcgattcggggtgtaaacgattttcgcgtttagattttatgtttttttatttttaataataataatcgtttttttttttcgttttttagttttttttcgggggattcgttttttacgtagtcggttgagaattttgtaagcgttgcgcgttcgtagatttttttttagttttagttttttacgaggggaaattttcgtttttaagagggaaatttattcgtttgtaagaataggaaaaggtcgcgcgggtagtttcgttcggcgtacgtttttagttcgggttcgtcgcgcgggttacgtttcgtttcgtcgtagtttttgtaattttcgttttatggggggttcgttcgcgttcggtagttcggggatttttcgagcgggagcgcgaaggcggcgagttcgcgtgggagcgcgggtggacggttagggttcggaagggcggcgcggtcggcgggtattcgggattgtttttgtaggtttcgagttgcggtcgggacggagcgcggagttagtaggagcgcggttttcgttcgatcgtcggtgtacgcggtttcgtagcgcgttgtgcgtggtagttcgggagagtgcggcgtcgcgcgggtcgttcgtattgttcggttcgcggcgtacgttacgttcgattttcgttttagttcgttaggcggcgggagcggcggggatggttacgtaggtggcggcgggcgtttttatttttggcgtcgagtatgaagtcgagcgtgttgtgtcgtgttgttgttatagtgaggcgaggttttgtgttatgtttgggggagtagtcgcgggagattggggggtcgcgcggcgtgttaggttgcggtcggttgggagtgtgttgcgttcggggaggttaggattaggaggtgggaggggtcgtcgggagcgattcggggcgcgggggcggggtcggtttcgtttcgggagggaggaagtcgggacgtttttagtttcgaatttggagcgtcgggtgtgaggtttcgttaatggtggaaacgtgggcgtcgtgtttttcggcgtgcgttattaatggtcgcgttttgttttaaggttcgcgcggtcgttttcg

SEQ ID NO: 19584 - DNA, 1105 bp, Artificial Sequence
  chemically treated genomic DNA (Homo sapiens) CpG-island No: 19584
cgaaaacgaccgcgcgaaccttaaaacaaaacgcgaccattaataacgcacgccgaaaaacacgacgcccacgtttccaccattaacgaaacctcacacccgacgctccaaattcgaaactaaaaacgtcccgacttcctccctcccgaaacgaaaccgaccccgcccccgcgccccgaatcgctcccgacgacccctcccacctcctaatcctaacctccccgaacgcaacacactcccaaccgaccgcaacctaacacgccgcgcgaccccccaatctcccgcgactactcccccaaacataacacaaaacctcgcctcactataacaacaacacgacacaacacgctcgacttcatactcgacgccaaaaataaaaacgcccgccgccacctacgtaaccatccccgccgctcccgccgcctaacgaactaaaacgaaaatcgaacgtaacgtacgccgcgaaccgaacaatacgaacgacccgcgcgacgccgcactctcccgaactaccacgcacaacgcgctacgaaaccgcgtacaccgacgatcgaacgaaaaccgcgctcctactaactccgcgctccgtcccgaccgcaactcgaaacctacaaaaacaatcccgaatacccgccgaccgcgccgcccttccgaaccctaaccgtccacccgcgctcccacgcgaactcgccgccttcgcgctcccgctcgaaaaatccccgaactaccgaacgcgaacgaaccccccataaaacgaaaattacaaaaactacgacgaaacgaaacgtaacccgcgcgacgaacccgaactaaaaacgtacgccgaacgaaactacccgcgcgaccttttcctattcttacaaacgaataaatttccctcttaaaaacgaaaatttcccctcgtaaaaaactaaaactaaaaaaaaatctacgaacgcgcaacgcttacaaaattctcaaccgactacgtaaaaaacgaatcccccgaaaaaaaactaaaaaacgaaaaaaaaaaacgattattattattaaaaataaaaaaacataaaatctaaacgcgaaaatcgtttacaccccgaatcgaaaaactatcaaaaaacaaccg

SEQ ID NO: 19585 - DNA, 530 bp, Artificial Sequence
  chemically treated genomic DNA (Homo sapiens) CpG-island No: 19585
tttcgacgcggggttggggcgcgcgtagggtattgtgggtgtatagtttagttagcgcgtcgtcggttggtgggttttaggcgtggattattatttttatggtgttttacgcgtagttagtcgtcgtcgtttgcgcgtttaggtttttgggattagtagttttagtttcgtggatgtgggtttgaatcggatggtttggaattcgttttttcggcgatttgtttggtagggcggggcgtttcgcgaagatggtggcgcgcgtggcgtgtggttttcgtcgtttggttaagttttagcgtagcgtatcggtcggcgtttcgttggtttggagtttatatttatcgggtttttgatttcgcgtttttcgcgttcggttttcggtatgtttcgcgttcgtaagggtaatacgtttcggaagggtggttagcgtcgtggaggaggtgagtggggtggggggcgcgggatagttgtatgagcggcgggcgggggttttgttggatttttttggttgttttcgagggttttgggtg

SEQ ID NO: 19586 - DNA, 530 bp, Artificial Sequence
  chemically treated genomic DNA (Homo sapiens) CpG-island No: 19586
cacccaaaaccctcgaaaacaaccaaaaaaatccaacaaaacccccgcccgccgctcatacaactatcccgcgccccccaccccactcacctcctccacgacgctaaccacccttccgaaacgtattacccttacgaacgcgaaacataccgaaaaccgaacgcgaaaaacgcgaaatcaaaaacccgataaatataaactccaaaccaacgaaacgccgaccgatacgctacgctaaaacttaaccaaacgacgaaaaccacacgccacgcgcgccaccatcttcgcgaaacgccccgccctaccaaacaaatcgccgaaaaaacgaattccaaaccatccgattcaaacccacatccacgaaactaaaactactaatcccaaaaacctaaacgcgcaaacgacgacgactaactacgcgtaaaacaccataaaaataataatccacgcctaaaacccaccaaccgacgacgcgctaactaaactatacacccacaataccctacgcgcgccccaaccccgcgtcgaaa

SEQ ID NO: 19587 - DNA, 530 bp, Artificial Sequence
  chemically treated genomic DNA (Homo sapiens) CpG-island No: 19587
tatttagggttttcgagaataattaaggggatttagtaggattttcgttcgtcgtttatatagttgtttcgcgttttttattttatttattttttttacggcgttgattattttttcggagcgtgttgtttttacgggcgcgaggtatgtcgggaatcgggcgcggggggcgcggggttagggattcggtgggtgtgggttttaggttaacgagacgtcggtcggtgcgttgcgttgagatttggttagacgacgggagttatacgttacgcgcgttattattttcgcgaggcgtttcgttttgttaaataggtcgtcgggaaggcgagttttaggttattcgatttaggtttatatttacgaggttaaaattattaattttagaggtttgagcgcgtaggcgacggcggttagttgcgcgtagagtattatgggaatggtagtttacgtttggggtttattagtcgacgacgcgttggttgaattatgtatttataatgttttgcgcgcgttttagtttcgcgtcggga

SEQ ID NO: 19588 - DNA, 530 bp, Artificial Sequence
  chemically treated genomic DNA (Homo sapiens) CpG-island No: 19588
tcccgacgcgaaactaaaacgcgcgcaaaacattataaatacataattcaaccaacgcgtcgtcgactaataaaccccaaacgtaaactaccattcccataatactctacgcgcaactaaccgccgtcgcctacgcgctcaaacctctaaaattaataattttaacctcgtaaatataaacctaaatcgaataacctaaaactcgccttcccgacgacctatttaacaaaacgaaacgcctcgcgaaaataataacgcgcgtaacgtataactcccgtcgtctaaccaaatctcaacgcaacgcaccgaccgacgtctcgttaacctaaaacccacacccaccgaatccctaaccccgcgccccccgcgcccgattcccgacatacctcgcgcccgtaaaaacaacacgctccgaaaaaataatcaacgccgtaaaaaaaataaataaaataaaaaacgcgaaacaactatataaacgacgaacgaaaatcctactaaatccccttaattattctcgaaaaccctaaata

SEQ ID NO: 19589 - DNA, 664 bp, Artificial Sequence
  chemically treated genomic DNA (Homo sapiens) CpG-island No: 19589
gtttgtcgttttttgtttggttttcggcgtggggatagtttggttattagtgcgttgcgttgcgcggttttcgtttagcgcgaggtttaggggcgtgggtttttcggttacggtttttttttcgcgattttaggggtagtgattgtagcgtaggttgcgggcggtatatgcgtagggagttcgcgttgttattttcgttcggttttattagttgtagaaagtttcggtattagagtttggggttcggcggcgcggcgggcgtagttttttcggttcgcgttagtcgttcggtttgcgtagtatttaatacgtgtagcgataggcgacgtagcggttgcgtaaagttttgttcgacggcggcgtataagtatacgttcgagtttcggcgtcgtagtttgcgtagtagtagttttcgggcggtgcgttcggtgcgtttttttgttagtatttgcgggtagagggtagcgtgaggcgggggtgtcgggtcgggaatagggttttcgggttttagtacgcgacggaagaagtaaagagttattgggagtcgaggtggagcgggaaaggggtgttcgtaggcgtatattttaaggttgagtgtttgggagttggtggtttttaagggagaattcgaaagaggcggggtttatatgaatttggtgggggg

SEQ ID NO: 19590 - DNA, 664 bp, Artificial Sequence
  chemically treated genomic DNA (Homo sapiens) CpG-island No: 19590
ccccccaccaaattcatataaaccccgcctctttcgaattctcccttaaaaaccaccaactcccaaacactcaaccttaaaatatacgcctacgaacacccctttcccgctccacctcgactcccaataactctttacttcttccgtcgcgtactaaaacccgaaaaccctattcccgacccgacacccccgcctcacgctaccctctacccgcaaatactaacaaaaaaacgcaccgaacgcaccgcccgaaaactactactacgcaaactacgacgccgaaactcgaacgtatacttatacgccgccgtcgaacaaaactttacgcaaccgctacgtcgcctatcgctacacgtattaaatactacgcaaaccgaacgactaacgcgaaccgaaaaaactacgcccgccgcgccgccgaaccccaaactctaataccgaaactttctacaactaataaaaccgaacgaaaataacaacgcgaactccctacgcatataccgcccgcaacctacgctacaatcactacccctaaaatcgcgaaaaaaaaaccgtaaccgaaaaacccacgcccctaaacctcgcgctaaacgaaaaccgcgcaacgcaacgcactaataaccaaactatccccacgccgaaaaccaaacaaaaaacgacaaac

SEQ ID NO: 19591 - DNA, 664 bp, Artificial Sequence
  chemically treated genomic DNA (Homo sapiens) CpG-island No: 19591
ttttttattaagtttatgtaaatttcgtttttttcggatttttttttgaagattattagtttttaaatatttagttttaaaatgtgcgtttgcgggtatttttttttcgttttatttcggtttttaatgattttttgtttttttcgtcgcgtgttagggttcggaagttttgttttcggttcgatattttcgttttacgttgttttttgttcgtaggtgttggtagaggagcgtatcgagcgtatcgttcggggattattgttgcgtaggttgcggcgtcgggattcgggcgtgtatttgtgcgtcgtcgtcgagtagggttttacgtaatcgttgcgtcgtttgtcgttgtacgtgttgagtgttacgtaggtcgaacgattggcgcgggtcgaggaggttgcgttcgtcgcgtcgtcgggttttaaattttggtatcgggattttttgtagttggtggagtcgggcggaggtggtagcgcgaattttttgcgtatgtgtcgttcgtagtttgcgttgtagttattgtttttggagtcgcggagaaagggtcgtaatcggaggatttacgtttttgagtttcgcgttgagcgggggtcgcgtagcgtaacgtattggtgattagattgtttttacgtcgggaattaagtaggagacgataggt

SEQ ID NO: 19592 - DNA, 664 bp, Artificial Sequence
  chemically treated genomic DNA (Homo sapiens) CpG-island No: 19592
acctatcgtctcctacttaattcccgacgtaaaaacaatctaatcaccaatacgttacgctacgcgacccccgctcaacgcgaaactcaaaaacgtaaatcctccgattacgaccctttctccgcgactccaaaaacaataactacaacgcaaactacgaacgacacatacgcaaaaaattcgcgctaccacctccgcccgactccaccaactacaaaaaatcccgataccaaaatttaaaacccgacgacgcgacgaacgcaacctcctcgacccgcgccaatcgttcgacctacgtaacactcaacacgtacaacgacaaacgacgcaacgattacgtaaaaccctactcgacgacgacgcacaaatacacgcccgaatcccgacgccgcaacctacgcaacaataatccccgaacgatacgctcgatacgctcctctaccaacacctacgaacaaaaaacaacgtaaaacgaaaatatcgaaccgaaaacaaaacttccgaaccctaacacgcgacgaaaaaaacaaaaaatcattaaaaaccgaaataaaacgaaaaaaaaatacccgcaaacgcacattttaaaactaaatatttaaaaactaataatcttcaaaaaaaaatccgaaaaaaacgaaatttacataaacttaataaaaaa

SEQ ID NO: 19593 - DNA, 617 bp, Artificial Sequence
  chemically treated genomic DNA (Homo sapiens) CpG-island No: 19593
tcgcgtcgtttttttttcgttttttcgtaggtttttgtcgattattttagagcgttcggtcgtcgttttgttttcggcgtttacggtgtagtttatttcgtcgttcgtcggttcggtcgtcgttcggtttttatacggtttacggttcggttcggtttcgttcgatttatttcgtttttattattagttttttgcgggaagtattcgggtcggtagtttcgagcgattgcgggaggcgttttttttatcgtcgcgtatcgacggcggggcgggtcgggggtggggtttgggcgaattaagtttgtgattgggtcggggcgggtttgtaggcggggttagaggagattagaggttgttgattggttcgagggcggagcgaagggggaagttaggcgtagtttaggttcgggtttgggttgtaggcggggttacgcggagaaaaggtaataggggtggttttaaatttcgggattcggtattgggcgggttgtaggcgggatcgggttgtgattgggtgcggagcgtcgggagttttgttgttggatagtcgggagggcggatttgttaattcgagggtggggattcggtgttttcgagggtagagtaggaattagttt

SEQ ID NO: 19594 - DNA, 617 bp, Artificial Sequence
  chemically treated genomic DNA (Homo sapiens) CpG-island No: 19594
aaactaattcctactctaccctcgaaaacaccgaatccccaccctcgaattaacaaatccgccctcccgactatccaacaacaaaactcccgacgctccgcacccaatcacaacccgatcccgcctacaacccgcccaataccgaatcccgaaatttaaaaccacccctattaccttttctccgcgtaaccccgcctacaacccaaacccgaacctaaactacgcctaacttcccccttcgctccgccctcgaaccaatcaacaacctctaatctcctctaaccccgcctacaaacccgccccgacccaatcacaaacttaattcgcccaaaccccacccccgacccgccccgccgtcgatacgcgacgataaaaaaaacgcctcccgcaatcgctcgaaactaccgacccgaatacttcccgcaaaaaactaataataaaaacgaaataaatcgaacgaaaccgaaccgaaccgtaaaccgtataaaaaccgaacgacgaccgaaccgacgaacgacgaaataaactacaccgtaaacgccgaaaacaaaacgacgaccgaacgctctaaaataatcgacaaaaacctacgaaaaaacgaaaaaaaaacgacgcga

SEQ ID NO: 19595 - DNA, 617 bp, Artificial Sequence
  chemically treated genomic DNA (Homo sapiens) CpG-island No: 19595
gggttggtttttgttttgttttcgagggtatcggatttttattttcgggttaatagattcgttttttcggttgtttagtaatagagttttcggcgtttcgtatttaattatagttcggtttcgtttgtagttcgtttagtgtcgggtttcggggtttggaattatttttattgtttttttttcgcgtggtttcgtttgtagtttaggttcgagtttgggttgcgtttaattttttttttcgtttcgttttcgagttaattaatagtttttaattttttttggtttcgtttgtaagttcgtttcggtttagttataggtttggttcgtttaggttttattttcggttcgtttcgtcgtcggtgcgcggcggtagggaaggcgtttttcgtagtcgttcggaattgtcgattcgagtgtttttcgtagagggttggtggtgggagcggagtgggtcgggcggggtcgagtcgggtcgtgggtcgtgtgggggtcgggcggcggtcgggtcggcggacggcgggatgggttgtatcgtgagcgtcgaggataaggcggcggtcgagcgttttaagatgatcgataagaatttgcgggaggacggagagaaggcggcgcgg

SEQ ID NO: 19596 - DNA, 617 bp, Artificial Sequence
  chemically treated genomic DNA (Homo sapiens) CpG-island No: 19596
ccgcgccgccttctctccgtcctcccgcaaattcttatcgatcatcttaaaacgctcgaccgccgccttatcctcgacgctcacgatacaacccatcccgccgtccgccgacccgaccgccgcccgacccccacacgacccacgacccgactcgaccccgcccgacccactccgctcccaccaccaaccctctacgaaaaacactcgaatcgacaattccgaacgactacgaaaaacgccttccctaccgccgcgcaccgacgacgaaacgaaccgaaaataaaacctaaacgaaccaaacctataactaaaccgaaacgaacttacaaacgaaaccaaaaaaaattaaaaactattaattaactcgaaaacgaaacgaaaaaaaaaattaaacgcaacccaaactcgaacctaaactacaaacgaaaccacgcgaaaaaaaaacaataaaaataattccaaaccccgaaacccgacactaaacgaactacaaacgaaaccgaactataattaaatacgaaacgccgaaaactctattactaaacaaccgaaaaaacgaatctattaacccgaaaataaaaatccgataccctcgaaaacaaaacaaaaaccaaccc

SEQ ID NO: 19597 - DNA, 689 bp, Artificial Sequence
  chemically treated genomic DNA (Homo sapiens) CpG-island No: 19597
gtcgagcgcgtcggtgttcgtaggaagtttcgtttagcgcggatcgtattttttcgcgacgtttttggagaagtcgttagtttttgggtcgttagtagcgcgcgttttcggcgtgggaggagcgcggcgagtaggggcggggttagtgattttcgtagttaatcggggtggcggcgcgtttttggagggttcgtagttcgttcggcgcgtacggggcggggtttcgtttgatcgtggcggtcgtcgggtagtagagttcgggcgtagcgagcgtagcgtagcgtagggagcgtaggcggtggcggtattaggttttcggggttttagcgttcggcgtagcgaagtagttttcggcggtggtaattacggcggcggcgtcggggcgatgttgtgggtttcgttgggcgtcggtgttttggttttttttttaggtatttagtttcgtttgtttttcgtttcggggaatcgtagcgttcgggaggtatttttgtgaggttgtgggttcgttgtcggggagtgggtgggtggggtcgggcggggttgtgcggtttgggtcgttttttttcggaggaagagggtggggatcgagggaagcgggcgggggtgggagcgttgttttcgggtcgtcgttgatggtattttagggtttcgttttttttttgtttttatgtgggttgaaagaggttttg

SEQ ID NO: 19598 - DNA, 689 bp, Artificial Sequence
  chemically treated genomic DNA (Homo sapiens) CpG-island No: 19598
caaaacctctttcaacccacataaaaacaaaaaaaaaacgaaaccctaaaataccatcaacgacgacccgaaaacaacgctcccacccccgcccgcttccctcgatccccaccctcttcctccgaaaaaaaacgacccaaaccgcacaaccccgcccgaccccacccacccactccccgacaacgaacccacaacctcacaaaaatacctcccgaacgctacgattccccgaaacgaaaaacaaacgaaactaaatacctaaaaaaaaaaccaaaacaccgacgcccaacgaaacccacaacatcgccccgacgccgccgccgtaattaccaccgccgaaaactacttcgctacgccgaacgctaaaaccccgaaaacctaataccgccaccgcctacgctccctacgctacgctacgctcgctacgcccgaactctactacccgacgaccgccacgatcaaacgaaaccccgccccgtacgcgccgaacgaactacgaaccctccaaaaacgcgccgccaccccgattaactacgaaaatcactaaccccgcccctactcgccgcgctcctcccacgccgaaaacgcgcgctactaacgacccaaaaactaacgacttctccaaaaacgtcgcgaaaaaatacgatccgcgctaaacgaaacttcctacgaacaccgacgcgctcgac

SEQ ID NO: 19599 - DNA, 689 bp, Artificial Sequence
  chemically treated genomic DNA (Homo sapiens) CpG-island No: 19599
taaaattttttttaatttatatggaggtaggaggaggacggagttttgggatgttattagcggcggttcggagatagcgtttttattttcgttcgtttttttcggtttttatttttttttttcgagggaaggcggtttagatcgtatagtttcgttcggttttatttatttatttttcggtagcgagtttatagttttataaagatatttttcgggcgttgcggtttttcggggcgaggggtaagcggggttgggtatttgaggaagaggttaggatatcggcgtttaacgagatttatagtatcgtttcggcgtcgtcgtcgtagttgttatcgtcggaggttatttcgttgcgtcgagcgttggagtttcgggaatttggtgtcgttatcgtttgcgttttttgcgttgcgttgcgttcgttgcgttcgggttttgttgttcggcgatcgttacggttaagcggagtttcgtttcgtgcgcgtcgggcgagttgcggattttttaaggacgcgtcgttatttcgattggttgcgggagttattggtttcgtttttgttcgtcgcgttttttttacgtcgggggcgcgcgttgttggcggtttagagattggcggtttttttaggggcgtcgcgggagggtgcggttcgcgttgggcgaggttttttgcgggtatcggcgcgttcggt

SEQ ID NO: 19600 - DNA, 689 bp, Artificial Sequence
  chemically treated genomic DNA (Homo sapiens) CpG-island No: 19600
accgaacgcgccgatacccgcaaaaaacctcgcccaacgcgaaccgcaccctcccgcgacgcccctaaaaaaaccgccaatctctaaaccgccaacaacgcgcgcccccgacgtaaaaaaaacgcgacgaacaaaaacgaaaccaataactcccgcaaccaatcgaaataacgacgcgtccttaaaaaatccgcaactcgcccgacgcgcacgaaacgaaactccgcttaaccgtaacgatcgccgaacaacaaaacccgaacgcaacgaacgcaacgcaacgcaaaaaacgcaaacgataacgacaccaaattcccgaaactccaacgctcgacgcaacgaaataacctccgacgataacaactacgacgacgacgccgaaacgatactataaatctcgttaaacgccgatatcctaacctcttcctcaaatacccaaccccgcttacccctcgccccgaaaaaccgcaacgcccgaaaaatatctttataaaactataaactcgctaccgaaaaataaataaataaaaccgaacgaaactatacgatctaaaccgccttccctcgaaaaaaaaaaataaaaaccgaaaaaaacgaacgaaaataaaaacgctatctccgaaccgccgctaataacatcccaaaactccgtcctcctcctacctccatataaattaaaaaaaatttta

SEQ ID NO: 19601 - DNA, 1462 bp, Artificial Sequence
  chemically treated genomic DNA (Homo sapiens) CpG-island No: 19601
aggcgagcgtaaatagtgtacggatgcgtgtgtttatcgtgtgcgtaggcgagtgtaagtgtacgggtgtgtgtgttgtgcgtaggcgagtgtaaattgtacgggcgcgtgtgtttatcgtgtgcgtaggcgagtgtaaatagtgtacgggtgcgtgtgtttattgtgcgtaggcgtttgtaaatagtgtacgggcgtgtgtgtgtttattgcgtaggcgagtgtaaattgtacgggcgcgtgtgtgtttattgtgtgcgtaggcgagcgtaaattgtacgggtacgtgtgtttattgcgtaggcgagcgtaaatagtgtacgggcgcgtgtgtgtttattgtgtgcgtaggcgagtgtaaattgtacgggtacgtgtgtttattgtgtataggcgagtgtaaatagtgtacgggcgcgtgtgtttattgtgtgcgtaggcgagtgtaagtgtacgggcgtgtgtgtttattgcgtaggcgagtgtaaattgtataggcgcgtgtgtgtttattgtgcgtaggcgagtgtaaattgtacgggcgcgtgtgtgtttattgcgtaggcgagtttaaatagtgtacgggcgcgtgtgtgtttattgtgtgcgtaggcgagtgtaagtgtacgagcgcgtgtgtgtttattgcgtaggcgtttgtaaatagtgtatgggtatgtgtgttgtgtgtgtgtaggcgatcgtaaatagtgtacggacgcgtgtgtgtttatcgtgtgcgtaggcgagtgtaaatagtgtacgggtgtgtgtgtttattgtgtaggcgagtgtaaattgtataggcgcgtgtgtttatcgtgtgcgtaggcgagtgtaaatagtgtacgggcgcgtgtgtttatcgtgtgcgtaggcgtgtaaattgtacgggcgcgtgtgtttattgcgtaggcgagtgtaaatagtgtacgggcgcgtgtgtgtttattgtgcgtaggcgagtttaaatagcgtacgggcgcgtgtgtgtttattgcgtaggcgagtgtaaattgtacgggcgcgtgtgtttattgcgtaggcgagcgtaaatagtgtacgggcgcgcgtgtgtttatcgtgcgcgtaggcgagcgtaaatagtgtacgggcgcgcgtgtgtttatcgtgcgcgtaggcgagcgtaaatagtgtacgggcgcgcgtgtgtttatcgtgcgcgtaggcgagcgtaaatagtgtacgggcgcgcgtgtgtttatcgtgcgcgtaggcgagcgtaaatagtgtacgggcgcgcgtgtgtttatcgtgcgcgtaggcgagcgtaagtagtgtacgggcgcgcgtgtttatcgtgtgcgtaggcgagtgtaaatagtgtacgggcgtgtgtgtttatcgtgtgcgtaggcgagtgtaaatatagttggtgttttggtgcgtgtgtgttgtgagtataggtgtttgtaaatgatgtaaattttttttgacgtta

SEQ ID NO: 19602 - DNA, 1462 bp, Artificial Sequence
  chemically treated genomic DNA (Homo sapiens) CpG-island No: 19602
taacgtcaaaaaaaatttacatcatttacaaacacctatactcacaacacacacgcaccaaaacaccaactatatttacactcgcctacgcacacgataaacacacacgcccgtacactatttacactcgcctacgcacacgataaacacgcgcgcccgtacactacttacgctcgcctacgcgcacgataaacacacgcgcgcccgtacactatttacgctcgcctacgcgcacgataaacacacgcgcgcccgtacactatttacgctcgcctacgcgcacgataaacacacgcgcgcccgtacactatttacgctcgcctacgcgcacgataaacacacgcgcgcccgtacactatttacgctcgcctacgcgcacgataaacacacgcgcgcccgtacactatttacgctcgcctacgcaataaacacacgcgcccgtacaatttacactcgcctacgcaataaacacacacgcgcccgtacgctatttaaactcgcctacgcacaataaacacacacgcgcccgtacactatttacactcgcctacgcaataaacacacgcgcccgtacaatttacacgcctacgcacacgataaacacacgcgcccgtacactatttacactcgcctacgcacacgataaacacacgcgcctatacaatttacactcgcctacacaataaacacacacacccgtacactatttacactcgcctacgcacacgataaacacacacgcgtccgtacactatttacgatcgcctacacacacacaacacacatacccatacactatttacaaacgcctacgcaataaacacacacgcgctcgtacacttacactcgcctacgcacacaataaacacacacgcgcccgtacactatttaaactcgcctacgcaataaacacacacgcgcccgtacaatttacactcgcctacgcacaataaacacacacgcgcctatacaatttacactcgcctacgcaataaacacacacgcccgtacacttacactcgcctacgcacacaataaacacacgcgcccgtacactatttacactcgcctatacacaataaacacacgtacccgtacaatttacactcgcctacgcacacaataaacacacacgcgcccgtacactatttacgctcgcctacgcaataaacacacgtacccgtacaatttacgctcgcctacgcacacaataaacacacacgcgcccgtacaatttacactcgcctacgcaataaacacacacacgcccgtacactatttacaaacgcctacgcacaataaacacacgcacccgtacactatttacactcgcctacgcacacgataaacacacgcgcccgtacaatttacactcgcctacgcacaacacacacacccgtacacttacactcgcctacgcacacgataaacacacgcatccgtacactatttacgctcgcct

SEQ ID NO: 19603 - DNA, 1462 bp, Artificial Sequence
  chemically treated genomic DNA (Homo sapiens) CpG-island No: 19603
tgacgttaagggaggtttatattatttatagatatttgtgtttatagtatatacgtattagggtattagttgtgtttatattcgtttgcgtatacggtgaatatatacgttcgtgtattgtttatattcgtttgcgtatacggtgagtacgcgcgttcgtgtattgtttacgttcgtttgcgcgtacggtgagtatacgcgcgttcgtgtattgtttacgttcgtttgcgcgtacggtgagtatacgcgcgttcgtgtattgtttacgttcgtttgcgcgtacggtgagtatacgcgcgttcgtgtattgtttacgttcgtttgcgcgtacggtgagtatacgcgcgttcgtgtattgtttacgttcgtttgcgcgtacggtgagtatacgcgcgttcgtgtattgtttacgttcgtttgcgtagtgagtatacgcgttcgtgtagtttatattcgtttgcgtagtgagtatatacgcgttcgtgcgttgtttaaattcgtttgcgtatagtgagtatatacgcgttcgtgtattgtttatattcgtttgcgtagtgagtatacgcgttcgtgtagtttatacgtttgcgtatacggtgagtatacgcgttcgtgtattgtttatattcgtttgcgtatacggtgagtatacgcgtttgtgtagtttatattcgtttgtatagtgagtatatatattcgtgtattgtttatattcgtttgcgtatacggtgagtatatacgcgttcgtgtattgtttacggtcgtttgtatatatatagtatatatgtttatgtattgtttatagacgtttgcgtagtgagtatatacgcgttcgtgtatttatattcgtttgcgtatatagtgagtatatacgcgttcgtgtattgtttaaattcgtttgcgtagtgagtatatacgcgttcgtgtagtttatattcgtttgcgtatagtgagtatatacgcgtttgtgtagtttatattcgtttgcgtagtgagtatatacgttcgtgtatttatattcgtttgcgtatatagtgagtatacgcgttcgtgtattgtttatattcgtttgtgtatagtaagtatacgtgttcgtgtagtttatattcgtttgcgtatatagtgagtatatacgcgttcgtgtattgtttacgttcgtttgcgtagtgagtatacgtgttcgtgtagtttacgttcgtttgcgtatatagtgagtatatacgcgttcgtgtagtttatattcgtttgcgtagtgagtatatatacgttcgtgtattgtttatagacgtttgcgtatagtgagtatacgtattcgtgtattgtttatattcgtttgcgtatacggtgagtatacgcgttcgtgtagtttatattcgtttgcgtatagtatatatattcgtgtatttatattcgtttgcgtatacggtgagtatacgtattcgtgtattgtttacgttcgttt

SEQ ID NO: 19604 - DNA, 1462 bp, Artificial Sequence
  chemically treated genomic DNA (Homo sapiens) CpG-island No: 19604
aaacgaacgtaaacaatacacgaatacgtatactcaccgtatacgcaaacgaatataaatacacgaatatatatactatacgcaaacgaatataaactacacgaacgcgtatactcaccgtatacgcaaacgaatataaacaatacacgaatacgtatactcactatacgcaaacgtctataaacaatacacgaacgtatatatactcactacgcaaacgaatataaactacacgaacgcgtatatactcactatatacgcaaacgaacgtaaactacacgaacacgtatactcactacgcaaacgaacgtaaacaatacacgaacgcgtatatactcactatatacgcaaacgaatataaactacacgaacacgtatacttactatacacaaacgaatataaacaatacacgaacgcgtatactcactatatacgcaaacgaatataaatacacgaacgtatatactcactacgcaaacgaatataaactacacaaacgcgtatatactcactatacgcaaacgaatataaactacacgaacgcgtatatactcactacgcaaacgaatttaaacaatacacgaacgcgtatatactcactatatacgcaaacgaatataaatacacgaacgcgtatatactcactacgcaaacgtctataaacaatacataaacatatatactatatatatacaaacgaccgtaaacaatacacgaacgcgtatatactcaccgtatacgcaaacgaatataaacaatacacgaatatatatactcactatacaaacgaatataaactacacaaacgcgtatactcaccgtatacgcaaacgaatataaacaatacacgaacgcgtatactcaccgtatacgcaaacgtataaactacacgaacgcgtatactcactacgcaaacgaatataaacaatacacgaacgcgtatatactcactatacgcaaacgaatttaaacaacgcacgaacgcgtatatactcactacgcaaacgaatataaactacacgaacgcgtatactcactacgcaaacgaacgtaaacaatacacgaacgcgcgtatactcaccgtacgcgcaaacgaacgtaaacaatacacgaacgcgcgtatactcaccgtacgcgcaaacgaacgtaaacaatacacgaacgcgcgtatactcaccgtacgcgcaaacgaacgtaaacaatacacgaacgcgcgtatactcaccgtacgcgcaaacgaacgtaaacaatacacgaacgcgcgtatactcaccgtacgcgcaaacgaacgtaaacaatacacgaacgcgcgtactcaccgtatacgcaaacgaatataaacaatacacgaacgtatatattcaccgtatacgcaaacgaatataaacacaactaataccctaatacgtatatactataaacacaaatatctataaataatataaacctcccttaacgtca

SEQ ID NO: 19605 - DNA, 534 bp, Artificial Sequence
  chemically treated genomic DNA (Homo sapiens) CpG-island No: 19605
ttcgtgttttttttcgtttatgtgtttatatttatacggatattcgtgtttatttttgtttatgtgtttatatacggattttcgtgtttatttttacgtgtttatatacggatattcgtgtttatttttgtttatgtgtttatatattgattttcgtgtttatttttacgtgtttatatacggatattcgtgtttttatttatgtgtttatatatacgtgtttatttatgtgtttatatacggatattcgtgtttatttttgtttatgtgtttatatacggattttcgtgtttatttacgtgtttatacggatacgtgtttatttttatatgtttacggatatttatgtttatatttatatgtttatatacgtgtttatattcgttttatttatgtgtgtttatatatatacggatattcgtgtttatatagatattcgtgtattttcgtttttgtgtgtatatacgggtatatgattttttaaatgtgtatattcgtgttttttatatatttattagagtattcgtagtatag

SEQ ID NO: 19606 - DNA, 534 bp, Artificial Sequence
  chemically treated genomic DNA (Homo sapiens) CpG-island No: 19606
ctatactacgaatactctaataaatatataaaaaacacgaatatacacatttaaaaaatcatatacccgtatatacacacaaaaacgaaaatacacgaatatctatataaacacgaatatccgtatatatataaacacacataaataaaacgaatataaacacgtatataaacatataaatataaacataaatatccgtaaacatataaaaataaacacgtatccgtataaacacgtaaataaacacgaaaatccgtatataaacacataaacaaaaataaacacgaatatccgtatataaacacataaataaacacgtatatataaacacataaataaaaacacgaatatccgtatataaacacgtaaaaataaacacgaaaatcaatatataaacacataaacaaaaataaacacgaatatccgtatataaacacgtaaaaataaacacgaaaatccgtatataaacacataaacaaaaataaacacgaatatccgtataaatataaacacataaacgaaaaaaaacacgaa

SEQ ID NO: 19607 - DNA, 534 bp, Artificial Sequence
  chemically treated genomic DNA (Homo sapiens) CpG-island No: 19607
ttgtgttgcgggtgttttggtgagtgtgtgagggatacgagtatgtatatttgggagattatatgttcgtgtgtgtatataagggcgagagtgtacgagtatttgtgtgagtacgagtgttcgtgtgtatgtgagtatatatgggtgaggcgagtgtgagtacgtgtgtgagtatatgagtgtgagtatgggtgttcgtgagtatgtgagagtgagtacgtgttcgtgtgagtacgtgagtgagtacgagggttcgtgtgtgagtatatgggtaagaatgagtacgagtgttcgtgtgtgagtatatgggtgagtacgtgtgtgtgagtatatgggtgagagtacgagtgttcgtgtgtgagtacgtgagagtgagtacgagggttagtgtgtgagtatatgggtaagaatgagtacgagtgttcgtgtgtgagtacgtgagagtgagtacgagggttcgtgtgtgagtatatgggtaagaatgagtacgagtgttcgtgtgagtgtgagtatatgggcgagagggagtacgag

SEQ ID NO: 19608 - DNA, 534 bp, Artificial Sequence
  chemically treated genomic DNA (Homo sapiens) CpG-island No: 19608
ctcgtactccctctcgcccatatactcacactcacacgaacactcgtactcattcttacccatatactcacacacgaaccctcgtactcactctcacgtactcacacacgaacactcgtactcattcttacccatatactcacacactaaccctcgtactcactctcacgtactcacacacgaacactcgtactctcacccatatactcacacacacgtactcacccatatactcacacacgaacactcgtactcattcttacccatatactcacacacgaaccctcgtactcactcacgtactcacacgaacacgtactcactctcacatactcacgaacacccatactcacactcatatactcacacacgtactcacactcgcctcacccatatatactcacatacacacgaacactcgtactcacacaaatactcgtacactctcgcccttatatacacacacgaacatataatctcccaaatatacatactcgtatccctcacacactcaccaaaacacccgcaacacaa

SEQ ID NO: 19609 - DNA, 1651 bp, Artificial Sequence
  chemically treated genomic DNA (Homo sapiens) CpG-island No: 19609
gtaatacgacgtgtttggggttttttcgttattttcgttaatttcggtgataattttgatatcggtttttaagtgttattttagttatgttgttttttttttcgtagttttaggcggtagtttcgcggttcggcgttcggtttttcggtggtttcggagcgaagtttcgtaatggagagcggaggatttttttttttcgatttcgtacgattaagatcgtttattttttttttaacgttcggttgtgggagtcgttcgagtttttttcgttagggcgttttttttcgggaggtcgtttttttgggggaataaggttaaggattacgggatttggggaagtaagttcggttgggttaggattgtttgcgtagttcgttggaatttaaggtattagagggtttgacggttacgtgaggacgaattacgtaggcgtagtttcgcgtttcgggtaaggattttcggtaagttttaaaggggagcgtgtatcgcgatgacgtttttaaggcgcgttacgttcgttcggcggcgtagttgtttagcgtaatttcggtttcgtttcgatagtttcggatttttgtttcgttcgatttcgtttcgttacgggagcgcgttattcgttcgcgtagtaacggttttaatagcgttaggttcgcgtttataagaagttcgattaaggtcggcgtgggcgaggtttggttagacgttgacgtatcgttggagttattgatttcgggacgattggcggacggtcgcgggtttggagatttagagcgagacggtttatttcgttttcgagttagtagaacgggttgaacgtgtcgataattttattcgttagttagcggcgcgggcgtgttcgagtcggttcgtgggcgtggttaggtgcgtgggcggggattattgggcggggttcggcgcgggggcggggtttggcgggagtagtttcggggtcggggcggggttcggcgggcggggttcggttaagtatagttttggcgtagcggcggggtttggtggggcgtggttcggtgagggaggtttcgtttgggggcgtggttttttttagtaggcggggtttggtgtcgggggcggggtttggcgggcgcgggcgcgtgtgcgtgttgtgggtttcgtattggtacgtaagttttagtaatttttgagaattttcggaggaagaggtcggggttcggtgcggtagcgttttgggggcggaatcgtaggcgcgggtcgggttttgttggggcgcggggcgcggttttcggagaaagcggtcgtttcgggataggagggattcgggagaaatttttttggggcggtttcgtatgtcggggtcgcgattttaggcgattttggtagaggggttcgtttgcgtcgagttcgcgattttcgagggagttacggtttcgtgaattacgttgttcgttttggttattggttgtcgtttttgtttcgtgggattttagttcgtaaggtttgcggagcggcggtttcgtttcgagtgttttgagcgcggttcgagttgtttttggtttattttgttgtcgatattcgagcgtcgtttggagtttttggtattgaggggcgtaggtcgagttttagattagtttgggaaacgtaaagcgattttatttttataaaagtgggtttt

SEQ ID NO: 19610 - DNA, 1651 bp, Artificial Sequence
  chemically treated genomic DNA (Homo sapiens) CpG-island No: 19610
aaaacccacttttataaaaataaaatcgctttacgtttcccaaactaatctaaaactcgacctacgcccctcaataccaaaaactccaaacgacgctcgaatatcgacaacaaaataaaccaaaaacaactcgaaccgcgctcaaaacactcgaaacgaaaccgccgctccgcaaaccttacgaactaaaatcccacgaaacaaaaacgacaaccaataaccaaaacgaacaacgtaattcacgaaaccgtaactccctcgaaaatcgcgaactcgacgcaaacgaacccctctaccaaaatcgcctaaaatcgcgaccccgacatacgaaaccgccccaaaaaaatttctcccgaatccctcctatcccgaaacgaccgctttctccgaaaaccgcgccccgcgccccaacaaaacccgacccgcgcctacgattccgcccccaaaacgctaccgcaccgaaccccgacctcttcctccgaaaattctcaaaaattactaaaacttacgtaccaatacgaaacccacaacacgcacacgcgcccgcgcccgccaaaccccgcccccgacaccaaaccccgcctactaaaaaaaaccacgcccccaaacgaaacctccctcaccgaaccacgccccaccaaaccccgccgctacgccaaaactatacttaaccgaaccccgcccgccgaaccccgccccgaccccgaaactactcccgccaaaccccgcccccgcgccgaaccccgcccaataatccccgcccacgcacctaaccacgcccacgaaccgactcgaacacgcccgcgccgctaactaacgaataaaattatcgacacgttcaacccgttctactaactcgaaaacgaaataaaccgtctcgctctaaatctccaaacccgcgaccgtccgccaatcgtcccgaaatcaataactccaacgatacgtcaacgtctaaccaaacctcgcccacgccgaccttaatcgaacttcttataaacgcgaacctaacgctattaaaaccgttactacgcgaacgaataacgcgctcccgtaacgaaacgaaatcgaacgaaacaaaaatccgaaactatcgaaacgaaaccgaaattacgctaaacaactacgccgccgaacgaacgtaacgcgccttaaaaacgtcatcgcgatacacgctcccctttaaaacttaccgaaaatccttacccgaaacgcgaaactacgcctacgtaattcgtcctcacgtaaccgtcaaaccctctaataccttaaattccaacgaactacgcaaacaatcctaacccaaccgaacttacttccccaaatcccgtaatccttaaccttattcccccaaaaaaacgacctcccgaaaaaaaacgccctaacgaaaaaaactcgaacgactcccacaaccgaacgttaaaaaaaaaataaacgatcttaatcgtacgaaatcgaaaaaaaaaaatcctccgctctccattacgaaacttcgctccgaaaccaccgaaaaaccgaacgccgaaccgcgaaactaccgcctaaaactacgaaaaaaaaaacaacataactaaaataacacttaaaaaccgatatcaaaattatcaccgaaattaacgaaaataacgaaaaaaccccaaacacgtcgtattac

SEQ ID NO: 19611 - DNA, 1651 bp, Artificial Sequence
  chemically treated genomic DNA (Homo sapiens) CpG-island No: 19611
aaaatttatttttgtggaggtggggtcgttttgcgttttttaggttggtttggaattcggtttgcgttttttagtgttaggggttttaggcgacgttcgggtgtcggtagtagagtggattaggagtagttcggatcgcgtttagaatattcgggacgaggtcgtcgtttcgtaggttttgcgggttggggttttacgaaataaaggcggtagttagtggttaggacgggtagcgtggtttacggggtcgtggttttttcgggggtcgcgagttcggcgtaaacgagtttttttattaaggtcgtttagagtcgcgatttcgatatgcggagtcgttttaggggggtttttttcgggttttttttgtttcgaggcggtcgtttttttcgggggtcgcgtttcgcgttttagtaaggttcgattcgcgtttgcgatttcgtttttaaggcgttgtcgtatcgggtttcggttttttttttcgaggatttttaggaattgttgagatttgcgtgttagtgcgaggtttataatacgtatacgcgttcgcgttcgttagatttcgttttcggtattaagtttcgtttattgggggagattacgtttttaagcgagattttttttatcgagttacgttttattaggtttcgtcgttgcgttaagattgtgtttagtcgagtttcgttcgtcgggtttcgtttcgatttcgagattattttcgttaggtttcgttttcgcgtcgagtttcgtttagtagttttcgtttacgtatttgattacgtttacgagtcggttcgaatacgttcgcgtcgttgattggcgggtggggttgtcgatacgtttaattcgttttgttggttcgagaacgaagtaggtcgtttcgttttgggtttttaggttcgcgatcgttcgttagtcgtttcgaggttagtagttttagcggtgcgttagcgtttagttaggtttcgtttacgtcggttttggtcgggttttttgtagacgcgggtttggcgttattgaggtcgttgttgcgcgggcgagtggcgcgttttcgtggcggggcggggtcgggcggggtaggggttcggggttatcgaggcggggtcgaggttgcgttgggtagttgcgtcgtcgggcggacgtggcgcgttttgaggacgttatcgcggtgtacgtttttttttggggtttgtcggaagtttttgttcggggcgcggggttgcgtttgcgtggttcgtttttacgtggtcgttaagttttttagtgttttagattttagcgagttacgtaagtaattttggtttagtcgagtttgtttttttaaatttcgtaatttttgattttatttttttaaagaagcggtttttcgggaaggagcgttttggcggagaagattcgaacggtttttatagtcgggcgttgggggaaaggtgggcggttttggtcgtgcgaggtcggggagggagggtttttcgttttttattgcggagtttcgtttcgggattatcgggggatcggacgtcgggtcgcgaagttgtcgtttggggttgcggggaggagagtaatataattggaatggtatttaggggtcggtgttagggttgttatcggggttggcggaaatgacgaaggggttttaggtacgtcgtgttat

SEQ ID NO: 19612 - DNA, 1651 bp, Artificial Sequence
  chemically treated genomic DNA (Homo sapiens) CpG-island No: 19612
ataacacgacgtacctaaaaccccttcgtcatttccgccaaccccgataacaaccctaacaccgacccctaaataccattccaattatattactctcctccccgcaaccccaaacgacaacttcgcgacccgacgtccgatcccccgataatcccgaaacgaaactccgcaataaaaaacgaaaaaccctccctccccgacctcgcacgaccaaaaccgcccacctttcccccaacgcccgactataaaaaccgttcgaatcttctccgccaaaacgctccttcccgaaaaaccgcttctttaaaaaaataaaatcaaaaattacgaaatttaaaaaaacaaactcgactaaaccaaaattacttacgtaactcgctaaaatctaaaacactaaaaaacttaacgaccacgtaaaaacgaaccacgcaaacgcaaccccgcgccccgaacaaaaacttccgacaaaccccaaaaaaaaacgtacaccgcgataacgtcctcaaaacgcgccacgtccgcccgacgacgcaactacccaacgcaacctcgaccccgcctcgataaccccgaacccctaccccgcccgaccccgccccgccacgaaaacgcgccactcgcccgcgcaacaacgacctcaataacgccaaacccgcgtctacaaaaaacccgaccaaaaccgacgtaaacgaaacctaactaaacgctaacgcaccgctaaaactactaacctcgaaacgactaacgaacgatcgcgaacctaaaaacccaaaacgaaacgacctacttcgttctcgaaccaacaaaacgaattaaacgtatcgacaaccccacccgccaatcaacgacgcgaacgtattcgaaccgactcgtaaacgtaatcaaatacgtaaacgaaaactactaaacgaaactcgacgcgaaaacgaaacctaacgaaaataatctcgaaatcgaaacgaaacccgacgaacgaaactcgactaaacacaatcttaacgcaacgacgaaacctaataaaacgtaactcgataaaaaaaatctcgcttaaaaacgtaatctcccccaataaacgaaacttaataccgaaaacgaaatctaacgaacgcgaacgcgtatacgtattataaacctcgcactaacacgcaaatctcaacaattcctaaaaatcctcgaaaaaaaaaaccgaaacccgatacgacaacgccttaaaaacgaaatcgcaaacgcgaatcgaaccttactaaaacgcgaaacgcgacccccgaaaaaaacgaccgcctcgaaacaaaaaaaacccgaaaaaaacccccctaaaacgactccgcatatcgaaatcgcgactctaaacgaccttaataaaaaaactcgtttacgccgaactcgcgacccccgaaaaaaccacgaccccgtaaaccacgctacccgtcctaaccactaactaccgcctttatttcgtaaaaccccaacccgcaaaacctacgaaacgacgacctcgtcccgaatattctaaacgcgatccgaactactcctaatccactctactaccgacacccgaacgtcgcctaaaacccctaacactaaaaaacgcaaaccgaattccaaaccaacctaaaaaacgcaaaacgaccccacctccacaaaaataaatttt

SEQ ID NO: 19613 - DNA, 933 bp, Artificial Sequence
  chemically treated genomic DNA (Homo sapiens) CpG-island No: 19613
gttcgagcgttggatatggcgtcggtatttcgggggagggaatcgagaagtttggaggaagggagggaagggaaggcgcggagttcggtcgggcggggttttttatagtaggagtattcgtcgtatgggtttcggtcgggggtgcggggaggtcgggtagtcgtttacgttagttcggggatgcgtcgttcgggttaggtcgcgtcggtttcgagcggtttcggatcgtattttttcgattttcggttgggttgtgtcgtttttcggtcgggtcgcgtcgtttcgtttattttttgtcgtcgtagtcggtcgtttgtttcgttttttttttgtttttagcggtattgtttcgcgttcggtatataggtagtcgtcgtcggatttgttgtttttaatatggtcgttattatcgtcggttttcggtttttttcgtcggtagtagtcggaaatattcgaagcggttagaaacgggaggtggggcgcgtttttttttttcggttatagattacgggtgaatttcggaaatagtcgaagaaggtaaatttcggggacgcgttttttttttcgatttcgaagacgaagtttcggttttgtttacggaaatttacgaagcgatttcgggtgtttatttttcgttttcgtttacggttatttagttacgtttatcggttttttttcgtttattttaagggggttttcggtagttttcggaaatattcgaagttgtttcgcgtgttgagtcggttacgtttttttttatagttttgtcgagggcggtcgtcggttattttcggtaatattcgaggtttttcgagtattcggtcgttttttcgggtggttttcggagtttgattcgtttcgtgttttttcgttagttttcgggtatttttaaattttgaataggaagcgtgggttatttgtttgtgtttgtga

SEQ ID NO: 19614 - DNA, 933 bp, Artificial Sequence
  chemically treated genomic DNA (Homo sapiens) CpG-island No: 19614
tcacaaacacaaacaaataacccacgcttcctattcaaaatttaaaaatacccgaaaactaacgaaaaaacacgaaacgaatcaaactccgaaaaccacccgaaaaaacgaccgaatactcgaaaaacctcgaatattaccgaaaataaccgacgaccgccctcgacaaaactataaaaaaaaacgtaaccgactcaacacgcgaaacaacttcgaatatttccgaaaactaccgaaaacccccttaaaataaacgaaaaaaaaccgataaacgtaactaaataaccgtaaacgaaaacgaaaaataaacacccgaaatcgcttcgtaaatttccgtaaacaaaaccgaaacttcgtcttcgaaatcgaaaaaaaaaacgcgtccccgaaatttaccttcttcgactatttccgaaattcacccgtaatctataaccgaaaaaaaaaaacgcgccccacctcccgtttctaaccgcttcgaatatttccgactactaccgacgaaaaaaaccgaaaaccgacgataataacgaccatattaaaaacaacaaatccgacgacgactacctatataccgaacgcgaaacaataccgctaaaaacaaaaaaaaaacgaaacaaacgaccgactacgacgacaaaaaataaacgaaacgacgcgacccgaccgaaaaacgacacaacccaaccgaaaatcgaaaaaatacgatccgaaaccgctcgaaaccgacgcgacctaacccgaacgacgcatccccgaactaacgtaaacgactacccgacctccccgcacccccgaccgaaacccatacgacgaatactcctactataaaaaaccccgcccgaccgaactccgcgccttcccttccctcccttcctccaaacttctcgattccctcccccgaaataccgacgccatatccaacgctcgaac

SEQ ID NO: 19615 - DNA, 933 bp, Artificial Sequence
  chemically treated genomic DNA (Homo sapiens) CpG-island No: 19615
ttataagtatagataggtgatttacgttttttgtttaaggtttgaaaatgttcgaaaattgacggaaagatacgaagcgaattagatttcgagagttattcggggaaacgatcgggtgttcggagggtttcgggtgttgtcggaaatggtcgacgatcgttttcggtagggttgtgggagggggcgtggtcggtttagtacgcggagtagtttcgggtattttcggaaattgtcgaaagtttttttgaagtgggcggggaaaggtcggtgggcgtggttggatggtcgtggacgggggcggggggtaggtattcggggtcgtttcgtggattttcgtaaatagagtcgaagtttcgttttcggaatcgaggaggagagcgcgttttcggggtttatttttttcggttgttttcggaatttattcgtagtttgtggtcgggaggagaaggcgcgttttatttttcgtttttagtcgtttcggatgttttcggttgttgtcggcgaaaagagtcgagggtcggcggtggtggcggttatgttgggagtagtaggttcggcggcggttgtttgtgtgtcgggcgcggagtagtgtcgttgagggtaggggaggagcgaggtaggcggtcggttgcggcggtagagagtaggcggagcggcgcggttcggtcgaaaggcggtatagtttagtcgggggtcgggggggtgcggttcggagtcgttcggagtcggcgcggtttagttcgagcggcgtattttcgggttggcgtgagcggttgttcggttttttcgtattttcggtcggggtttatgcggcgggtgtttttgttgtgagaagtttcgttcggtcgggtttcgcgtttttttttttttttttttttttaagtttttcggttttttttttcgagatatcggcgttatgtttagcgttcggat

SEQ ID NO: 19616 - DNA, 933 bp, Artificial Sequence
  chemically treated genomic DNA (Homo sapiens) CpG-island No: 19616
atccgaacgctaaacataacgccgatatctcgaaaaaaaaaaccgaaaaacttaaaaaaaaaaaaaaaaaaaaaaacgcgaaacccgaccgaacgaaacttctcacaacaaaaacacccgccgcataaaccccgaccgaaaatacgaaaaaaccgaacaaccgctcacgccaacccgaaaatacgccgctcgaactaaaccgcgccgactccgaacgactccgaaccgcacccccccgacccccgactaaactataccgcctttcgaccgaaccgcgccgctccgcctactctctaccgccgcaaccgaccgcctacctcgctcctcccctaccctcaacgacactactccgcgcccgacacacaaacaaccgccgccgaacctactactcccaacataaccgccaccaccgccgaccctcgactcttttcgccgacaacaaccgaaaacatccgaaacgactaaaaacgaaaaataaaacgcgccttctcctcccgaccacaaactacgaataaattccgaaaacaaccgaaaaaaataaaccccgaaaacgcgctctcctcctcgattccgaaaacgaaacttcgactctatttacgaaaatccacgaaacgaccccgaatacctaccccccgcccccgtccacgaccatccaaccacgcccaccgacctttccccgcccacttcaaaaaaactttcgacaatttccgaaaatacccgaaactactccgcgtactaaaccgaccacgccccctcccacaaccctaccgaaaacgatcgtcgaccatttccgacaacacccgaaaccctccgaacacccgatcgtttccccgaataactctcgaaatctaattcgcttcgtatctttccgtcaattttcgaacattttcaaaccttaaacaaaaaacgtaaatcacctatctatacttataa

SEQ ID NO: 19617 - DNA, 565 bp, Artificial Sequence
  chemically treated genomic DNA (Homo sapiens) CpG-island No: 19617
tttcgattcgcgttgcgtttacgtgtagggttcgatttttttcgggaggcgcggcgtcggttggggttaggcggtcgaggatttcgcggtttttcgtttcgtttcgtttcgcgggttttcgcgtatcgtcgtcgcgtatttatttttacgggtggagcggggcggggtagtacggtttcgcgcgtagtttcgattcgttaggcgtatcgatcggcggcgtagcgttggcgcgacggttcgattcggtcgggtttttgtttcgggcgcgggttcggtttgggagcgggcgagttcgtttgtaggggaggcggggattcgggttcgggttgggggcggggaaggggttggatacgtttgcgtatacggcggttcgatttttaggagttttcgggaggggtagaaagggcggggtggaggaggggaaagggcgggggtgatgtcgcgcggtcgtaggtttgggatggtgttcgcgttttcgagattcggatagaggtaagtaggggcgtcgtgggtgttagagaggcggaagacgaggtttgatggggtgagtatagggttagggtag

SEQ ID NO: 19618 - DNA, 565 bp, Artificial Sequence
  chemically treated genomic DNA (Homo sapiens) CpG-island No: 19618
ctaccctaaccctatactcaccccatcaaacctcgtcttccgcctctctaacacccacgacgcccctacttacctctatccgaatctcgaaaacgcgaacaccatcccaaacctacgaccgcgcgacatcacccccgccctttcccctcctccaccccgccctttctacccctcccgaaaactcctaaaaatcgaaccgccgtatacgcaaacgtatccaaccccttccccgcccccaacccgaacccgaatccccgcctcccctacaaacgaactcgcccgctcccaaaccgaacccgcgcccgaaacaaaaacccgaccgaatcgaaccgtcgcgccaacgctacgccgccgatcgatacgcctaacgaatcgaaactacgcgcgaaaccgtactaccccgccccgctccacccgtaaaaataaatacgcgacgacgatacgcgaaaacccgcgaaacgaaacgaaacgaaaaaccgcgaaatcctcgaccgcctaaccccaaccgacgccgcgcctcccgaaaaaaatcgaaccctacacgtaaacgcaacgcgaatcgaaa

SEQ ID NO: 19619 - DNA, 565 bp, Artificial Sequence
  chemically treated genomic DNA (Homo sapiens) CpG-island No: 19619
ttgttttggttttgtgtttattttattaggtttcgtttttcgtttttttggtatttacggcgtttttgtttgtttttgttcgggtttcggaggcgcgaatattattttaagtttgcgatcgcgcggtattattttcgttttttttttttttttatttcgttttttttatttttttcgggagtttttgggagtcgggtcgtcgtgtgcgtaagcgtgtttagtttttttttcgtttttaattcgggttcgggttttcgttttttttgtaggcggattcgttcgtttttaggtcggattcgcgttcgggatagggattcggtcgagtcgagtcgtcgcgttagcgttgcgtcgtcggtcggtgcgtttagcggatcggagttgcgcgcggaatcgtgttgtttcgtttcgttttattcgtgagggtgagtacgcggcggcggtgcgcgggggttcgcggggcggggcggggcggggagtcgcggggttttcggtcgtttgattttagtcggcgtcgcgtttttcggagggggtcgggttttgtacgtgggcgtagcgcgggtcgggg

SEQ ID NO: 19620 - DNA, 565 bp, Artificial Sequence
  chemically treated genomic DNA (Homo sapiens) CpG-island No: 19620
ccccgacccgcgctacgcccacgtacaaaacccgaccccctccgaaaaacgcgacgccgactaaaatcaaacgaccgaaaaccccgcgactccccgccccgccccgccccgcgaacccccgcgcaccgccgccgcgtactcaccctcacgaataaaacgaaacgaaacaacacgattccgcgcgcaactccgatccgctaaacgcaccgaccgacgacgcaacgctaacgcgacgactcgactcgaccgaatccctatcccgaacgcgaatccgacctaaaaacgaacgaatccgcctacaaaaaaaacgaaaacccgaacccgaattaaaaacgaaaaaaaaactaaacacgcttacgcacacgacgacccgactcccaaaaactcccgaaaaaaataaaaaaaacgaaataaaaaaaaaaaaaaaacgaaaataataccgcgcgatcgcaaacttaaaataatattcgcgcctccgaaacccgaacaaaaacaaacaaaaacgccgtaaataccaaaaaaacgaaaaacgaaacctaataaaataaacacaaaaccaaaacaa

SEQ ID NO: 19621 - DNA, 596 bp, Artificial Sequence
  chemically treated genomic DNA (Homo sapiens) CpG-island No: 19621
gtagattacgttggttaggcggtcgtagcgggttgagtaggtagacgacggcgggaaatatacggagaggatagagttaaagaaaagcgttatcgttatcgttatcgttattaggtgggtttcgtaggtggagaaggcgcggcgtcggtcgcggtaagtcgagtatcgcgattaggatgcgcgcgtaggaaaaggaatacgaggagtagcggggttaatattacggttaggttttcggagaagatggtcgttttcgcggcggacgtgttcgaggtcgttaagtttagtattatcgttatgtcgtaaaagaaggggcgtacgggggtggggtaggggtaggagagcgcggagaggagtagcgtgtgtagtagcgagtgtaggtgcgttacggtttacgacgtacgtattagcgaggcgtagcgtttatggcgttattagcgcgtcgtagcgtaggggtcggtacgtcgtcgtcgcgcggtcgtaggatatggtcgtcgggaggtagttttcggtgatgtttagagttacgaagaagtatatttcggtaaagtacgtttggaaggatatggtttggttcgggtggagtaggtcggtta

SEQ ID NO: 19622 - DNA, 596 bp, Artificial Sequence
  chemically treated genomic DNA (Homo sapiens) CpG-island No: 19622
taaccgacctactccacccgaaccaaaccatatccttccaaacgtactttaccgaaatatacttcttcgtaactctaaacatcaccgaaaactacctcccgacgaccatatcctacgaccgcgcgacgacgacgtaccgacccctacgctacgacgcgctaataacgccataaacgctacgcctcgctaatacgtacgtcgtaaaccgtaacgcacctacactcgctactacacacgctactcctctccgcgctctcctacccctaccccacccccgtacgccccttcttttacgacataacgataatactaaacttaacgacctcgaacacgtccgccgcgaaaacgaccatcttctccgaaaacctaaccgtaatattaaccccgctactcctcgtattccttttcctacgcgcgcatcctaatcgcgatactcgacttaccgcgaccgacgccgcgccttctccacctacgaaacccacctaataacgataacgataacgataacgcttttctttaactctatcctctccgtatatttcccgccgtcgtctacctactcaacccgctacgaccgcctaaccaacgtaatctac

SEQ ID NO: 19623 - DNA, 596 bp, Artificial Sequence
  chemically treated genomic DNA (Homo sapiens) CpG-island No: 19623
tggtcggtttgttttattcgggttaggttatatttttttaggcgtgttttgtcgagatgtattttttcgtggttttgggtattatcgagagttatttttcggcggttatgttttacgatcgcgcgacggcggcgtgtcggtttttgcgttacggcgcgttggtgacgttatgggcgttgcgtttcgttggtgcgtgcgtcgtgggtcgtgacgtatttgtattcgttgttgtatacgttgttttttttcgcgtttttttatttttattttattttcgtgcgtttttttttttgcgatatgacggtgatgttgagtttggcgatttcggatacgttcgtcgcggagacggttatttttttcgagggtttggtcgtggtgttggtttcgttgtttttcgtgtttttttttttacgcgcgtattttggtcgcggtgttcggtttgtcgcggtcggcgtcgcgttttttttatttgcggggtttatttagtggcggtggcggtggcggtggcgtttttttttggttttgtttttttcgtgtatttttcgtcgtcgtttgtttatttagttcgttacgatcgtttggttagcgtggtttat

SEQ ID NO: 19624 - DNA, 596 bp, Artificial Sequence
  chemically treated genomic DNA (Homo sapiens) CpG-island No: 19624
ataaaccacgctaaccaaacgatcgtaacgaactaaataaacaaacgacgacgaaaaatacacgaaaaaaacaaaaccaaaaaaaaacgccaccgccaccgccaccgccactaaataaaccccgcaaataaaaaaaacgcgacgccgaccgcgacaaaccgaacaccgcgaccaaaatacgcgcgtaaaaaaaaaaacacgaaaaacaacgaaaccaacaccacgaccaaaccctcgaaaaaaataaccgtctccgcgacgaacgtatccgaaatcgccaaactcaacatcaccgtcatatcgcaaaaaaaaaaacgcacgaaaataaaataaaaataaaaaaacgcgaaaaaaaacaacgtatacaacaacgaatacaaatacgtcacgacccacgacgcacgcaccaacgaaacgcaacgcccataacgtcaccaacgcgccgtaacgcaaaaaccgacacgccgccgtcgcgcgatcgtaaaacataaccgccgaaaaataactctcgataatacccaaaaccacgaaaaaatacatctcgacaaaacacgcctaaaaaaatataacctaacccgaataaaacaaaccgacca

SEQ ID NO: 19625 - DNA, 528 bp, Artificial Sequence
  chemically treated genomic DNA (Homo sapiens) CpG-island No: 19625
  unsure (56..57, 490..491, 498, 500, 509, 512..513, 516, 520)
gtcgtcggtttttatttaggtcgaggtggttcggttttatgtatcgcgacgtaatnnggggaggtagataaggtatagggcggcgttataatttatgttaattcgttttatgtgttcgtcgaggcgtataaatcgtcgtgacgattagcggtttaatgatcgaagttaggttggtaagagtcgcgagcgatttttgaagttgtttttgatggtcgttatttatttgtttggatagtatggtttgtaacgcgggatttcgatgtcgtcggaagcgagaagaattataatggggaaggttatttagtttcgcgtcgcgaacgttagtaagacgtagtttagcgcgtcggtcgttatgtcggcgataatggtttgtttttcgtcgaaacgtttggtggcgggattagtgacgaaggtttgagcgagggcgtgtaagatttcgaatatcgtaagcgataggtcgattatcgtcgcgttttagcgaaagcggttnncgtcgangnaaatgattnagnnngngtgncggtattt

SEQ ID NO: 19626 - DNA, 528 bp, Artificial Sequence
  chemically treated genomic DNA (Homo sapiens) CpG-island No: 19626
  unsure (9, 13, 15..16, 20, 29, 31, 38..39, 472..)
aaataccgncacncnnnctnaatcatttncntcgacgnnaaccgctttcgctaaaacgcgacgataatcgacctatcgcttacgatattcgaaatcttacacgccctcgctcaaaccttcgtcactaatcccgccaccaaacgtttcgacgaaaaacaaaccattatcgccgacataacgaccgacgcgctaaactacgtcttactaacgttcgcgacgcgaaactaaataaccttccccattataattcttctcgcttccgacgacatcgaaatcccgcgttacaaaccatactatccaaacaaataaataacgaccatcaaaaacaacttcaaaaatcgctcgcgactcttaccaacctaacttcgatcattaaaccgctaatcgtcacgacgatttatacgcctcgacgaacacataaaacgaattaacataaattataacgccgccctataccttatctacctccccnnattacgtcgcgatacataaaaccgaaccacctcgacctaaataaaaaccgacgac

SEQ ID NO: 19627 - DNA, 528 bp, Artificial Sequence
  chemically treated genomic DNA (Homo sapiens) CpG-island No: 19627
  unsure (9, 13, 15..16, 20, 29, 31, 38..39, 472..)
aggtgtcgntatntnnnttnggttatttntntcgacgnnaatcgttttcgttggagcgcgacgatgatcggtttgtcgtttgcggtattcggaattttgtacgttttcgtttaagttttcgttattggtttcgttattaaacgtttcggcgagaagtaggttattatcgtcggtatggcggtcgacgcgttgggttacgttttgttggcgttcgcgacgcgaggttggatggttttttttattatgatttttttcgttttcggcggtatcgggatttcgcgttgtaggttatgttgtttaggtaggtagatgacgattattagggatagttttaaggatcgttcgcggtttttattagtttaatttcgattattggatcgttgatcgttacggcgatttatgcgtttcggcgagtatatggaacgggttggtatggattgtagcgtcgttttatattttgtttgtttttttnngttgcgtcgcggtgtatggagtcgggttatttcgatttgaatggaagtcggcggt

SEQ ID NO: 19628 - DNA, 528 bp, Artificial Sequence
  chemically treated genomic DNA (Homo sapiens) CpG-island No: 19628
  unsure (56..57, 490..491, 498, 500, 509, 512..513, 516, 520)
accgccgacttccattcaaatcgaaataacccgactccatacaccgcgacgcaacnnaaaaaaacaaacaaaatataaaacgacgctacaatccataccaacccgttccatatactcgccgaaacgcataaatcgccgtaacgatcaacgatccaataatcgaaattaaactaataaaaaccgcgaacgatccttaaaactatccctaataatcgtcatctacctacctaaacaacataacctacaacgcgaaatcccgataccgccgaaaacgaaaaaaatcataataaaaaaaaccatccaacctcgcgtcgcgaacgccaacaaaacgtaacccaacgcgtcgaccgccataccgacgataataacctacttctcgccgaaacgtttaataacgaaaccaataacgaaaacttaaacgaaaacgtacaaaattccgaataccgcaaacgacaaaccgatcatcgtcgcgctccaacgaaaacgattnncgtcgananaaataaccnaannnanatancgacacct

SEQ ID NO: 19629 - DNA, 665 bp, Artificial Sequence
  chemically treated genomic DNA (Homo sapiens) CpG-island No: 19629
tggatgcgcggatagtcgttgttggttttttggatgtcgacggatttgtattgtcggtagaatttcgcgaggtcgtttagttttaggtagtagttgaattaattcgcgaggggatcgagttcggggtgggcgaaagaattttagtatgagattttcgcgttggaggattatttagtcggcgtttcggaaaacgatttcgaagtttaattttttatagaaggcggcggtggaatcgaaatttcgtgatggtaggttgggcgtcgtttggtcggttatttcgaattttagagtttcgtttagaagaattcgttaagaaggcgatagaaggcgatgcgttgcgaatcgggagcggcgatatcgtaaagtacgaggaagcggttagtttattcgtcgttaagttttttagtaatattacgggtagttaacgttatgttttgatagcggttcgttatatttagtcggttatagtcgatgaatttagaaaagcggttattttttattatgatattcggtaagtaggtatcgttatgggttacgacgagattttcgtcgtcgggtatgcgcgttttgagtttggcgaatagttcggttggcgcgagtttttgatgtttttcgtttagattattttgatggacgacgagatcggagtttattagagtaagaga

SEQ ID NO: 19630 - DNA, 665 bp, Artificial Sequence
  chemically treated genomic DNA (Homo sapiens) CpG-island No: 19630
tctcttactctaataaactccgatctcgtcgtccatcaaaataatctaaacgaaaaacatcaaaaactcgcgccaaccgaactattcgccaaactcaaaacgcgcatacccgacgacgaaaatctcgtcgtaacccataacgatacctacttaccgaatatcataataaaaaataaccgcttttctaaattcatcgactataaccgactaaatataacgaaccgctatcaaaacataacgttaactacccgtaatattactaaaaaacttaacgacgaataaactaaccgcttcctcgtactttacgatatcgccgctcccgattcgcaacgcatcgccttctatcgccttcttaacgaattcttctaaacgaaactctaaaattcgaaataaccgaccaaacgacgcccaacctaccatcacgaaatttcgattccaccgccgccttctataaaaaattaaacttcgaaatcgttttccgaaacgccgactaaataatcctccaacgcgaaaatctcatactaaaattctttcgcccaccccgaactcgatcccctcgcgaattaattcaactactacctaaaactaaacgacctcgcgaaattctaccgacaatacaaatccgtcgacatccaaaaaaccaacaacgactatccgcgcatcca

SEQ ID NO: 19631 - DNA, 665 bp, Artificial Sequence
  chemically treated genomic DNA (Homo sapiens) CpG-island No: 19631
ttttttattttgatggatttcggtttcgtcgtttattaggatgatttggacgaagagtattaggggttcgcgttagtcgaattgttcgttaggtttaaggcgcgtatgttcgacggcgaggatttcgtcgtgatttatggcgatgtttgtttgtcgaatattatggtggaaaatggtcgtttttttggatttatcgattgtggtcggttgggtgtggcggatcgttattaggatatagcgttggttattcgtgatattgttgaagagtttggcggcgaatgggttgatcgttttttcgtgttttacggtatcgtcgttttcgattcgtagcgtatcgttttttatcgtttttttgacgagtttttttgagcgggattttggggttcgaaatgatcgattaagcgacgtttaatttgttattacgagatttcgattttatcgtcgttttttatgaaaggttgggtttcggaatcgtttttcgggacgtcggttggatgattttttagcgcggggattttatgttggagttttttcgtttatttcgggttcgattttttcgcgagttggtttagttgttgtttgaggttggacgatttcgcggagttttatcggtagtgtaaattcgtcggtatttaggaaattagtagcggttattcgcgtattta

SEQ ID NO: 19632 - DNA, 665 bp, Artificial Sequence
  chemically treated genomic DNA (Homo sapiens) CpG-island No: 19632
taaatacgcgaataaccgctactaatttcctaaataccgacgaatttacactaccgataaaactccgcgaaatcgtccaacctcaaacaacaactaaaccaactcgcgaaaaaatcgaacccgaaataaacgaaaaaactccaacataaaatccccgcgctaaaaaatcatccaaccgacgtcccgaaaaacgattccgaaacccaacctttcataaaaaacgacgataaaatcgaaatctcgtaataacaaattaaacgtcgcttaatcgatcatttcgaaccccaaaatcccgctcaaaaaaactcgtcaaaaaaacgataaaaaacgatacgctacgaatcgaaaacgacgataccgtaaaacacgaaaaaacgatcaacccattcgccgccaaactcttcaacaatatcacgaataaccaacgctatatcctaataacgatccgccacacccaaccgaccacaatcgataaatccaaaaaaacgaccattttccaccataatattcgacaaacaaacatcgccataaatcacgacgaaatcctcgccgtcgaacatacgcgccttaaacctaacgaacaattcgactaacgcgaacccctaatactcttcgtccaaatcatcctaataaacgacgaaaccgaaatccatcaaaataaaaaa

SEQ ID NO: 19633 - DNA, 607 bp, Artificial Sequence
  chemically treated genomic DNA (Homo sapiens) CpG-island No: 19633
gattttttcggtgcgttttttagcgcggtttttttcggtgcgttagttatcgtggtttttttcggcgcgtttttcggcgcggtttttttcggggttttttagcgcggcgtttttttgggggtttttcggcgtagtttttttcggggatttttcggcgtcgtttttttcggggtattcggggtttttcggcgcggtttttttcgggggtttttcggcgcggtttttttcgggggtttttcggcgcggtttttttcgggggtttttcggcgcggtttttttcgggggtttttcgtcgcggttttgtttttttcgggggttttttagtatggttttttttcgcgcggttttttttgggtttttttagcgcggtatttttttcgggggttttttagcgcggtattttttcggcggttttttagtgcggtttttttagattttttttagcgcggttttttttatttttttgggagggtttgaatacggttagtacggatttgggcggacggcgcgggacgggtgattattggcgttgttgaggtgagttgtgtgtttcgcggtcgttttagattataggcgttagtagtgtagtttggtttgggtagtgcgt

SEQ ID NO: 19634 - DNA, 607 bp, Artificial Sequence
  chemically treated genomic DNA (Homo sapiens) CpG-island No: 19634
acgcactacccaaaccaaactacactactaacgcctataatctaaaacgaccgcgaaacacacaactcacctcaacaacgccaataatcacccgtcccgcgccgtccgcccaaatccgtactaaccgtattcaaaccctcccaaaaaaataaaaaaaaccgcgctaaaaaaaatctaaaaaaaccgcactaaaaaaccgccgaaaaaataccgcgctaaaaaacccccgaaaaaaataccgcgctaaaaaaacccaaaaaaaaccgcgcgaaaaaaaaccatactaaaaaacccccgaaaaaaacaaaaccgcgacgaaaaacccccgaaaaaaaccgcgccgaaaaacccccgaaaaaaaccgcgccgaaaaacccccgaaaaaaaccgcgccgaaaaacccccgaaaaaaaccgcgccgaaaaaccccgaataccccgaaaaaaacgacgccgaaaaatccccgaaaaaaactacgccgaaaaacccccaaaaaaacgccgcgctaaaaaaccccgaaaaaaaccgcgccgaaaaacgcgccgaaaaaaaccacgataactaacgcaccgaaaaaaaccgcgctaaaaaacgcaccgaaaaaatc

SEQ ID NO: 19635 - DNA, 607 bp, Artificial Sequence
  chemically treated genomic DNA (Homo sapiens) CpG-island No: 19635
gcgtattgtttaggttaggttgtattgttgacgtttgtgatttgggacggtcgcggggtatatagtttattttagtaacgttagtgattattcgtttcgcgtcgttcgtttaggttcgtgttgatcgtgtttaaatttttttagagagatggggagggtcgcgttgaggagagtttgggagaatcgtattgaggagtcgtcgggagagtgtcgcgttgaggagttttcggggagagtgtcgcgttgaggaggtttagggaggatcgcgcggaggagaattatgttgaggagttttcggggagaatagaatcgcggcgagaggttttcggagagaatcgcgtcgaagaattttcggggagaatcgcgtcgaagaattttcggggagaatcgcgtcgaagaattttcggggagaatcgcgtcgaaaagtttcgggtgtttcgaggagaacggcgtcgaggagttttcggggagaattgcgtcgaggagtttttagaagagcgtcgcgttgaggagtttcgaggagaatcgcgtcgaggggcgcgtcggggagaattacgatgattgacgtatcgaggaggatcgcgttgaggggcgtatcgggagaatt

SEQ ID NO: 19636 - DNA, 607 bp, Artificial Sequence
  chemically treated genomic DNA (Homo sapiens) CpG-island No: 19636
aattctcccgatacgcccctcaacgcgatcctcctcgatacgtcaatcatcgtaattctccccgacgcgcccctcgacgcgattctcctcgaaactcctcaacgcgacgctcttctaaaaactcctcgacgcaattctccccgaaaactcctcgacgccgttctcctcgaaacacccgaaacttttcgacgcgattctccccgaaaattcttcgacgcgattctccccgaaaattcttcgacgcgattctccccgaaaattcttcgacgcgattctctccgaaaacctctcgccgcgattctattctccccgaaaactcctcaacataattctcctccgcgcgatcctccctaaacctcctcaacgcgacactctccccgaaaactcctcaacgcgacactctcccgacgactcctcaatacgattctcccaaactctcctcaacgcgaccctccccatctctctaaaaaaatttaaacacgatcaacacgaacctaaacgaacgacgcgaaacgaataatcactaacgttactaaaataaactatataccccgcgaccgtcccaaatcacaaacgtcaacaatacaacctaacctaaacaatacgc

SEQ ID NO: 19637 - DNA, 696 bp, Artificial Sequence
  chemically treated genomic DNA (Homo sapiens) CpG-island No: 19637
cgttagggtgatagcgcggcgttaagggaggaggtttcgcgtcggggttcgtcgggatttggcgcgggcggaaagaatatagatttttacgaatcggatttttcggggatttgggtttttttttgcgggcgttggagattcgggaggcggtttcggggattttcggttttcgtcgtcgtcgttttttaagcgttcgcgtttcggtttggggatattcggttttttttttttattttcggggattttttagtcgcgttttattttattaattttttatttaagggcgcgtcgttattaatttggagtttatttttttttaagatcgtgcgttttcggggcgttcgggttttttttttcgttattttaatttcggcgcgattcgggcgttttttggaaagatttaggcgtcgggttttgcgtttttttcgggagcgagggcggtcggacgattgggatttttttttttttagtcgtgaattttttgtttttttgtttttttttgtaggaaaattggagtttgtttttttttcggttacggagagaacgcgggtaatttgtgtggggggttcgggcgtttgcgttttttttttgcgcgcgcgtttttttttttaaaaatgggattttttttttttcgtattaaggtgtacggacgttaaatagtgatgaaatgagaagaaagttaattgtcggtttggg

SEQ ID NO: 19638 - DNA, 696 bp, Artificial Sequence
  chemically treated genomic DNA (Homo sapiens) CpG-island No: 19638
cccaaaccgacaattaactttcttctcatttcatcactatttaacgtccgtacaccttaatacgaaaaaaaaaaaatcccatttttaaaaaaaaaaacgcgcgcgcaaaaaaaaaacgcaaacgcccgaaccccccacacaaattacccgcgttctctccgtaaccgaaaaaaaaacaaactccaattttcctacaaaaaaaaacaaaaaaacaaaaaattcacgactaaaaaaaaaaaaatcccaatcgtccgaccgccctcgctcccgaaaaaaacgcaaaacccgacgcctaaatctttccaaaaaacgcccgaatcgcgccgaaattaaaataacgaaaaaaaaaacccgaacgccccgaaaacgcacgatcttaaaaaaaaataaactccaaattaataacgacgcgcccttaaataaaaaattaataaaataaaacgcgactaaaaaatccccgaaaataaaaaaaaaaaaccgaatatccccaaaccgaaacgcgaacgcttaaaaaacgacgacgacgaaaaccgaaaatccccgaaaccgcctcccgaatctccaacgcccgcaaaaaaaaacccaaatccccgaaaaatccgattcgtaaaaatctatattctttccgcccgcgccaaatcccgacgaaccccgacgcgaaacctcctcccttaacgccgcgctatcaccctaacg

SEQ ID NO: 19639 - DNA, 696 bp, Artificial Sequence
  chemically treated genomic DNA (Homo sapiens) CpG-island No: 19639
tttaggtcggtaattggttttttttttattttattattgtttggcgttcgtatattttggtgcgaagggggaaagattttatttttggaagggagagcgcgcgcgtaggaggggggcgtaggcgttcgagttttttatataggttattcgcgtttttttcgtggtcggaggaaaagtaaattttagtttttttgtagagagagatagagagataaggagtttacggttggagagaggagggttttagtcgttcggtcgttttcgttttcgggaggagcgtagagttcggcgtttggatttttttaggaagcgttcgggtcgcgtcggggttgagatggcgaggggggggattcgggcgtttcggggacgtacgattttgggagaagatgagttttaagttggtggcggcgcgtttttggatggagagttggtgagatggaacgcggttggagaattttcgaaagtgagaagaaggggtcgggtgtttttaaatcgggacgcgggcgtttgggaggcggcggcggcggaggtcgaggattttcggggtcgtttttcgggtttttagcgttcgtagaaagaagtttaggttttcgggagattcggttcgtaaagatttatatttttttcgttcgcgttagatttcggcggatttcggcgcgaggtttttttttttagcgtcgcgttgttattttggcg

SEQ ID NO: 19640 - DNA, 696 bp, Artificial Sequence
  chemically treated genomic DNA (Homo sapiens) CpG-island No: 19640
cgccaaaataacaacgcgacgctaaaaaaaaaaacctcgcgccgaaatccgccgaaatctaacgcgaacgaaaaaaatataaatctttacgaaccgaatctcccgaaaacctaaacttctttctacgaacgctaaaaacccgaaaaacgaccccgaaaatcctcgacctccgccgccgccgcctcccaaacgcccgcgtcccgatttaaaaacacccgaccccttcttctcactttcgaaaattctccaaccgcgttccatctcaccaactctccatccaaaaacgcgccgccaccaacttaaaactcatcttctcccaaaatcgtacgtccccgaaacgcccgaatcccccccctcgccatctcaaccccgacgcgacccgaacgcttcctaaaaaaatccaaacgccgaactctacgctcctcccgaaaacgaaaacgaccgaacgactaaaaccctcctctctccaaccgtaaactccttatctctctatctctctctacaaaaaaactaaaatttacttttcctccgaccacgaaaaaaacgcgaataacctatataaaaaactcgaacgcctacgcccccctcctacgcgcgcgctctcccttccaaaaataaaatctttcccccttcgcaccaaaatatacgaacgccaaacaataataaaataaaaaaaaaaccaattaccgacctaaa

SEQ ID NO: 19641 - DNA, 854 bp, Artificial Sequence
  chemically treated genomic DNA (Homo sapiens) CpG-island No: 19641
gcgtttttgcgtgcgttcgtcgcggagttcggagattagtaattgtattagataggtagcgtatggggggttgggcgaggtcgtcgcgtataaatagtgagatttttaatggaaaggcgtaaataatagcgttggtgatttattcgcgcgtacgggtcgtttttttcgcgcggggagacgcgcgtatttattagtttcggttgttcgttagtttcggttttagttatggaagagtttacggtttttgtatttaagttttttgattagaaaagtaaggacggtaacggcggaggcggaggcggcggaggtaagaaggattttattacgtatcgggaagttttggagagcggattggcgcgttttcgggagttggggacgtcggattttagtttttaggatattacggagggcggcggttattgttcggtgtatttgtttaaggattacgtagataatgataaggagaaattgaaagaattcggtatcgcgagagtggtagaaggtaagtttttttgcgcgtcggttttaggggggtttttttggggttcggcgttttttcgttacggagtcggtttcgcgcgtttttcgttgtgtatatttgtagttttcgtttcgttagggtaaggttcgggtcgttaggttttgtttaagaaaggaaggaaggtaggagtggattcgatcggagacgcgggtggtgggtagcggggtgcggggggatttagggagggtcgtagcgggggtcgcgcgcgtgggtatcgatacgggaaggtttcgggttggggtggattcgggtggttgtgtttgaagtcgtagggtttgagatgttttttttattttttttttttttttttttt

SEQ ID NO: 19642 - DNA, 854 bp, Artificial Sequence
  chemically treated genomic DNA (Homo sapiens) CpG-island No: 19642
aaaaaaaaaaaaaaaaaaaaataaaaaaaacatctcaaaccctacgacttcaaacacaaccacccgaatccaccccaacccgaaaccttcccgtatcgatacccacgcgcgcgacccccgctacgaccctccctaaatccccccgcaccccgctacccaccacccgcgtctccgatcgaatccactcctaccttccttcctttcttaaacaaaacctaacgacccgaaccttaccctaacgaaacgaaaactacaaatatacacaacgaaaaacgcgcgaaaccgactccgtaacgaaaaaacgccgaaccccaaaaaaacccccctaaaaccgacgcgcaaaaaaacttaccttctaccactctcgcgataccgaattctttcaatttctccttatcattatctacgtaatccttaaacaaatacaccgaacaataaccgccgccctccgtaatatcctaaaaactaaaatccgacgtccccaactcccgaaaacgcgccaatccgctctccaaaacttcccgatacgtaataaaatccttcttacctccgccgcctccgcctccgccgttaccgtccttacttttctaatcaaaaaacttaaatacaaaaaccgtaaactcttccataactaaaaccgaaactaacgaacaaccgaaactaataaatacgcgcgtctccccgcgcgaaaaaaacgacccgtacgcgcgaataaatcaccaacgctattatttacgcctttccattaaaaatctcactatttatacgcgacgacctcgcccaaccccccatacgctacctatctaatacaattactaatctccgaactccgcgacgaacgcacgcaaaaacgc

SEQ ID NO: 19643 - DNA, 854 bp, Artificial Sequence
  chemically treated genomic DNA (Homo sapiens) CpG-island No: 19643
ggaaaggaaagaaaaagaaaatgaaaaagatattttaggttttacggttttaggtatagttattcggatttattttagttcgggattttttcgtgtcggtgtttacgcgcgcggttttcgttgcgattttttttgggttttttcgtatttcgttatttattattcgcgttttcggtcgggtttatttttgttttttttttttttttaggtaaagtttgacggttcgggttttattttggcgagacgggagttgtaaatgtgtatagcgaggggcgcgcggggtcgatttcgtggcgaggaggcgtcgaattttaggagggtttttttggagtcggcgcgtaaaggaatttattttttgttattttcgcggtgtcgaatttttttagtttttttttgttattgtttacgtggtttttgaataaatgtatcgggtagtggtcgtcgtttttcgtgatgttttggaggttggaattcgacgtttttagttttcgggagcgcgttagttcgttttttaaaatttttcggtacgtaatggaattttttttattttcgtcgttttcgttttcgtcgttatcgtttttgtttttttggttaaaagatttggatataaaagtcgtgagtttttttatggttggggtcggggttggcgagtagtcggggttggtggatgcgcgcgttttttcgcgcggagaggacggttcgtgcgcgcgggtggattattagcgttgttatttacgtttttttattggaaattttattatttatacgcggcgatttcgtttagttttttatgcgttgtttgtttggtgtaattattggttttcgggtttcgcggcggacgtacgtagagacgt

SEQ ID NO: 19644 - DNA, 854 bp, Artificial Sequence
  chemically treated genomic DNA (Homo sapiens) CpG-island No: 19644
acgtctctacgtacgtccgccgcgaaacccgaaaaccaataattacaccaaacaaacaacgcataaaaaactaaacgaaatcgccgcgtataaataataaaatttccaataaaaaaacgtaaataacaacgctaataatccacccgcgcgcacgaaccgtcctctccgcgcgaaaaaacgcgcgcatccaccaaccccgactactcgccaaccccgaccccaaccataaaaaaactcacgacttttatatccaaatcttttaaccaaaaaaacaaaaacgataacgacgaaaacgaaaacgacgaaaataaaaaaaattccattacgtaccgaaaaattttaaaaaacgaactaacgcgctcccgaaaactaaaaacgtcgaattccaacctccaaaacatcacgaaaaacgacgaccactacccgatacatttattcaaaaaccacgtaaacaataacaaaaaaaaactaaaaaaattcgacaccgcgaaaataacaaaaaataaattcctttacgcgccgactccaaaaaaaccctcctaaaattcgacgcctcctcgccacgaaatcgaccccgcgcgcccctcgctatacacatttacaactcccgtctcgccaaaataaaacccgaaccgtcaaactttacctaaaaaaaaaaaaaaaacaaaaataaacccgaccgaaaacgcgaataataaataacgaaatacgaaaaaacccaaaaaaaatcgcaacgaaaaccgcgcgcgtaaacaccgacacgaaaaaatcccgaactaaaataaatccgaataactatacctaaaaccgtaaaacctaaaatatctttttcattttctttttctttcctttcc

SEQ ID NO: 19645 - DNA, 553 bp, Artificial Sequence
  chemically treated genomic DNA (Homo sapiens) CpG-island No: 19645
ggattttacgtagtttttgcgttaaagcgtattggttttcgagggttttttttttatcgcgggatgtacgaaggggttcgttacgttgcgtaaaattttttcggttttagttttgtgtttttcgttttttacgtagggatttatgaatgtaaagagaagcgcgaggacgtgaagtcggaggacgaggacgggtagattaagttgaaatagaggcgtagtcgtattaattttacgttggagtagttgaacgagttcgagcgatttttcgacgagatttattatttcgacgtttttatgcgcgaggagtttagttagcgtttggggtttttcgaggcgcgcgtgtaggtaggaattcgggggcgggggcggggggttcggagttatcgtttggttttcgggagcgtatagtacgcgtatagttatttgcgttcgggtcgtcgtcgtttttttttcggagcgcggggaggttgggtgagggacgggttggggtttttggatttttggagacgtttgaggtttgtaggatgggtttattgcgtttgttttttattaa

SEQ ID NO: 19646 - DNA, 553 bp, Artificial Sequence
  chemically treated genomic DNA (Homo sapiens) CpG-island No: 19646
ttaataaaaaacaaacgcaataaacccatcctacaaacctcaaacgtctccaaaaatccaaaaaccccaacccgtccctcacccaacctccccgcgctccgaaaaaaaaacgacgacgacccgaacgcaaataactatacgcgtactatacgctcccgaaaaccaaacgataactccgaaccccccgcccccgcccccgaattcctacctacacgcgcgcctcgaaaaaccccaaacgctaactaaactcctcgcgcataaaaacgtcgaaataataaatctcgtcgaaaaatcgctcgaactcgttcaactactccaacgtaaaattaatacgactacgcctctatttcaacttaatctacccgtcctcgtcctccgacttcacgtcctcgcgcttctctttacattcataaatccctacgtaaaaaacgaaaaacacaaaactaaaaccgaaaaaattttacgcaacgtaacgaaccccttcgtacatcccgcgataaaaaaaaaaccctcgaaaaccaatacgctttaacgcaaaaactacgtaaaatcc

SEQ ID NO: 19647 - DNA, 553 bp, Artificial Sequence
  chemically treated genomic DNA (Homo sapiens) CpG-island No: 19647
ttggtgaaaaataaacgtaatgaatttattttataggttttaggcgtttttaaaagtttaggaattttagttcgttttttatttaattttttcgcgtttcgggaaggggacggcggcggttcgggcgtaggtggttgtacgcgtgttgtgcgttttcgaggattaggcgatggtttcgggtttttcgttttcgttttcgggtttttatttgtacgcgcgtttcggagagttttaggcgttggttgagtttttcgcgtatgaaggcgtcggggtaatgggtttcgtcgaagagtcgttcgagttcgtttagttgttttagcgtgaagttggtgcggttgcgtttttgttttagtttggtttgttcgttttcgtttttcgattttacgttttcgcgtttttttttgtatttataaatttttgcgtggggagcggagggtatagggttgaggtcggggaggttttgcgtaacgtggcgaattttttcgtgtatttcgcggtggaaagggggttttcgaaaattaatgcgttttgacgtaaaaattgcgtggggttt

SEQ ID NO: 19648 - DNA, 553 bp, Artificial Sequence
  chemically treated genomic DNA (Homo sapiens) CpG-island No: 19648
aaaccccacgcaatttttacgtcaaaacgcattaattttcgaaaaccccctttccaccgcgaaatacacgaaaaaattcgccacgttacgcaaaacctccccgacctcaaccctataccctccgctccccacgcaaaaatttataaatacaaaaaaaaacgcgaaaacgtaaaatcgaaaaacgaaaacgaacaaaccaaactaaaacaaaaacgcaaccgcaccaacttcacgctaaaacaactaaacgaactcgaacgactcttcgacgaaacccattaccccgacgccttcatacgcgaaaaactcaaccaacgcctaaaactctccgaaacgcgcgtacaaataaaaacccgaaaacgaaaacgaaaaacccgaaaccatcgcctaatcctcgaaaacgcacaacacgcgtacaaccacctacgcccgaaccgccgccgtccccttcccgaaacgcgaaaaaattaaataaaaaacgaactaaaattcctaaacttttaaaaacgcctaaaacctataaaataaattcattacgtttatttttcaccaa

SEQ ID NO: 19649 - DNA, 538 bp, Artificial Sequence
  chemically treated genomic DNA (Homo sapiens) CpG-island No: 19649
tttacgcgtattcgtatttgtattcgtatttggcggcgtacgcgttttatttgatgtttttttcgtcgtttttcgggttgtttatcgcgtcgttggtcgagttcgtttcggtcgtcgtcgtggtcgtcgtcgtcgttaaaagtaatagtaagaattttagtatcgtcgatttgcggtttaaggcgcggaagtacgcggaggttttggggttttgattcgtcgcgtagtttttcgcgcgttcggattttcgggtttcgcgtatttcgtttgtatcgcgcgttttgtatttaatttcgtttggagtttttttcgcggttatcgtgtttcgggtatttcgggagtttttgtaagaggtttgaggagggaggttttcgggatcgtttacgtacgatttagttagattttcgcggagatggtgtagaaggcggagcgggtgagcggtcgtgcgtttagttcgggtttttttaaggttgttcgtgcgttttgggattttggagaagggtaaattttcgtttggttgcgtttttttttgttatat

SEQ ID NO: 19650 - DNA, 538 bp, Artificial Sequence
  chemically treated genomic DNA (Homo sapiens) CpG-island No: 19650
atataacaaaaaaaaacgcaaccaaacgaaaatttacccttctccaaaatcccaaaacgcacgaacaaccttaaaaaaacccgaactaaacgcacgaccgctcacccgctccgccttctacaccatctccgcgaaaatctaactaaatcgtacgtaaacgatcccgaaaacctccctcctcaaacctcttacaaaaactcccgaaatacccgaaacacgataaccgcgaaaaaaactccaaacgaaattaaatacaaaacgcgcgatacaaacgaaatacgcgaaacccgaaaatccgaacgcgcgaaaaactacgcgacgaatcaaaaccccaaaacctccgcgtacttccgcgccttaaaccgcaaatcgacgatactaaaattcttactattacttttaacgacgacgacgaccacgacgacgaccgaaacgaactcgaccaacgacgcgataaacaacccgaaaaacgacgaaaaaaacatcaaataaaacgcgtacgccgccaaatacgaatacaaatacgaatacgcgtaaa

SEQ ID NO: 19651 - DNA, 538 bp, Artificial Sequence
  chemically treated genomic DNA (Homo sapiens) CpG-island No: 19651
gtatagtagaggaagacgtagttaggcgggggtttatttttttttagggttttaggacgtacgggtagttttggagaggttcgggttggacgtacggtcgtttattcgtttcgttttttgtattattttcgcgagggtttggttgggtcgtgcgtggacggtttcgggagtttttttttttaggttttttgtaggagttttcggggtgttcggagtacggtggtcgcggaaggagttttaggcggggttgagtgtaggacgcgcggtgtaggcggggtgcgcggagttcgggagttcgggcgcgcggggggttgcgcggcgggttagagttttagggttttcgcgtgttttcgcgttttgagtcgtaggtcggcgatgttggaatttttgttgttgtttttggcggcggcggcgattacggcggcggtcgaggcggattcggttagcgacgcgatgggtagttcgaagggcggcggggggaatattaggtagggcgcgtgcgtcgttaggtgcgggtgtaggtgcgggtgcgcgtggg

SEQ ID NO: 19652 - DNA, 538 bp, Artificial Sequence
  chemically treated genomic DNA (Homo sapiens) CpG-island No: 19652
cccacgcgcacccgcacctacacccgcacctaacgacgcacgcgccctacctaatattccccccgccgcccttcgaactacccatcgcgtcgctaaccgaatccgcctcgaccgccgccgtaatcgccgccgccgccaaaaacaacaacaaaaattccaacatcgccgacctacgactcaaaacgcgaaaacacgcgaaaaccctaaaactctaacccgccgcgcaaccccccgcgcgcccgaactcccgaactccgcgcaccccgcctacaccgcgcgtcctacactcaaccccgcctaaaactccttccgcgaccaccgtactccgaacaccccgaaaactcctacaaaaaacctaaaaaaaaaaactcccgaaaccgtccacgcacgacccaaccaaaccctcgcgaaaataatacaaaaaacgaaacgaataaacgaccgtacgtccaacccgaacctctccaaaactacccgtacgtcctaaaaccctaaaaaaaaataaacccccgcctaactacgtcttcctctactatac

SEQ ID NO: 19653 - DNA, 543 bp, Artificial Sequence
  chemically treated genomic DNA (Homo sapiens) CpG-island No: 19653
tttttgtcgagtatgcgttttagtttttttttttggggttgtgatcgtggggtcgaagcgcgcgtgcgcggcggcggttggcggcggcggtggggcggggtttgggttgttagtcggtttaggaggaggaaggagtttgcggcgtgtagtgtgaggggcgggattcggttgtcggcggtgggtttagttgggggaggtcgggttatgttggtgggttagggcgcggggtcgttggggttcgcggtggttatcgtcgcggtggtgttgttgttgagcggcgtggggtcggcgtacggttcggaggatatcgtggtgggttgcggtggtttcgttaagtcggacgtggagattaattatttttttatcgaggtgagcgttcgtttcgtcgttcggcgtcgagtcgtcgggtcggtggtttagtttttttgggtcgcgttggtttcgtttttgatatcgggcggtgtggagtttttggagtttttatttttttcgaggttatgttgttcgcgggttttttgtagtttttttttagtcgcgttggag

SEQ ID NO: 19654 - DNA, 543 bp, Artificial Sequence
  chemically treated genomic DNA (Homo sapiens) CpG-island No: 19654
ctccaacgcgactaaaaaaaaactacaaaaaacccgcgaacaacataacctcgaaaaaaataaaaactccaaaaactccacaccgcccgatatcaaaaacgaaaccaacgcgacccaaaaaaactaaaccaccgacccgacgactcgacgccgaacgacgaaacgaacgctcacctcgataaaaaaataattaatctccacgtccgacttaacgaaaccaccgcaacccaccacgatatcctccgaaccgtacgccgaccccacgccgctcaacaacaacaccaccgcgacgataaccaccgcgaaccccaacgaccccgcgccctaacccaccaacataacccgacctcccccaactaaacccaccgccgacaaccgaatcccgcccctcacactacacgccgcaaactccttcctcctcctaaaccgactaacaacccaaaccccgccccaccgccgccgccaaccgccgccgcgcacgcgcgcttcgaccccacgatcacaaccccaaaaaaaaaaactaaaacgcatactcgacaaaaa

SEQ ID NO: 19655 - DNA, 543 bp, Artificial Sequence
  chemically treated genomic DNA (Homo sapiens) CpG-island No: 19655
ttttagcgcgattggggaggggttgtagggagttcgcggatagtatagtttcggaagaggtaagggttttaaggattttatatcgttcggtgttagagacgaggttagcgcggtttagagaggttgaattatcggttcggcgattcggcgtcgggcggcggggcgggcgtttatttcgatgagagagtagttgatttttacgttcgatttgacgaagttatcgtagtttattacgatgtttttcgagtcgtgcgtcggttttacgtcgtttagtagtagtattatcgcggcggtgattatcgcgggttttagcggtttcgcgttttggtttattagtatggttcgattttttttagttagatttatcgtcggtagtcgggtttcgttttttatattgtacgtcgtaggtttttttttttttttaggtcggttgatagtttaggtttcgttttatcgtcgtcgttagtcgtcgtcgcgtacgcgcgtttcgattttacggttatagttttagaagagagaattaaggcgtatgttcggtaagga

SEQ ID NO: 19656 - DNA, 543 bp, Artificial Sequence
  chemically treated genomic DNA (Homo sapiens) CpG-island No: 19656
tccttaccgaacatacgccttaattctctcttctaaaactataaccgtaaaatcgaaacgcgcgtacgcgacgacgactaacgacgacgataaaacgaaacctaaactatcaaccgacctaaaaaaaaaaaaaaacctacgacgtacaatataaaaaacgaaacccgactaccgacgataaatctaactaaaaaaaatcgaaccatactaataaaccaaaacgcgaaaccgctaaaacccgcgataatcaccgccgcgataatactactactaaacgacgtaaaaccgacgcacgactcgaaaaacatcgtaataaactacgataacttcgtcaaatcgaacgtaaaaatcaactactctctcatcgaaataaacgcccgccccgccgcccgacgccgaatcgccgaaccgataattcaacctctctaaaccgcgctaacctcgtctctaacaccgaacgatataaaatccttaaaacccttacctcttccgaaactatactatccgcgaactccctacaacccctccccaatcgcgctaaaa

SEQ ID NO: 19657 - DNA, 780 bp, Artificial Sequence
  chemically treated genomic DNA (Homo sapiens) CpG-island No: 19657
gttcgttcgtttatttatttattcgtacgtttattttatttttttttatttttatttaagcgtttagttcgcgcgcgtcgttttttcgtaggttgattagatttgtttgtttagttcgttttcgtttaaatttcgtttttttttcgttacgtttttttttcgggttaatcggggacgagattggggtcggggcggggtttcgtttttttagaattttcggcggcgtttacggtttcggaaacgcgtcgcggggttgttagttcggttgggtacgggcggtttcgtggcgttttttgttacgttaggtttgtttgggtcgcgttagcgtcgttttatcgagggtcgcgcgtcggtcgtcgtcgggtttgggtgagtgtgcgggtcgcgggaggatgtgcggggggcgttggaggggtcgtagggcggaggtgatcgtgggggcggtaggaggacgtgtggatttgagtgagcgtgtagggtcgcgagaggatgtgtagggggtgtaggattgtgtgcggggttggagcgagtgtgcgggtcgtagaagagtgtacggtggagggagggggcgtttttgggtagttggagagttgttcggttttgggcgggttagagtagggaacgggtttcggatgacgagtacgaagaggttcgaaggttttttcgaggcgggcggggggcggcgatttcgggtgggaatcgttaaagtgtagaggtttgttttgttttttgggggacgttaggagatgggaatcgtttaggggcggagagaaaggattt

SEQ ID NO: 19658 - DNA, 780 bp, Artificial Sequence
  chemically treated genomic DNA (Homo sapiens) CpG-island No: 19658
aaatcctttctctccgcccctaaacgattcccatctcctaacgtcccccaaaaaacaaaacaaacctctacactttaacgattcccacccgaaatcgccgccccccgcccgcctcgaaaaaaccttcgaacctcttcgtactcgtcatccgaaacccgttccctactctaacccgcccaaaaccgaacaactctccaactacccaaaaacgccccctccctccaccgtacactcttctacgacccgcacactcgctccaaccccgcacacaatcctacaccccctacacatcctctcgcgaccctacacgctcactcaaatccacacgtcctcctaccgcccccacgatcacctccgccctacgacccctccaacgccccccgcacatcctcccgcgacccgcacactcacccaaacccgacgacgaccgacgcgcgaccctcgataaaacgacgctaacgcgacccaaacaaacctaacgtaacaaaaaacgccacgaaaccgcccgtacccaaccgaactaacaaccccgcgacgcgtttccgaaaccgtaaacgccgccgaaaattctaaaaaaacgaaaccccgccccgaccccaatctcgtccccgattaacccgaaaaaaaaacgtaacgaaaaaaaaacgaaatttaaacgaaaacgaactaaacaaacaaatctaatcaacctacgaaaaaacgacgcgcgcgaactaaacgcttaaataaaaataaaaaaaaataaaataaacgtacgaataaataaataaacgaacgaac

SEQ ID NO: 19659 - DNA, 780 bp, Artificial Sequence
  chemically treated genomic DNA (Homo sapiens) CpG-island No: 19659
gggtttttttttttcgtttttgagcggtttttattttttagcgttttttaaagagtagagtaggtttttatattttagcgatttttattcgggatcgtcgtttttcgttcgtttcgggaaggttttcgggttttttcgtattcgttattcgggattcgttttttgttttggttcgtttaaggtcgagtagttttttaattgtttagagacgttttttttttttatcgtgtatttttttgcggttcgtatattcgttttagtttcgtatatagttttgtattttttgtatattttttcgcggttttgtacgtttatttaggtttatacgtttttttgtcgtttttacgattattttcgttttgcggtttttttagcgtttttcgtatattttttcgcggttcgtatatttatttaggttcggcggcggtcgacgcgcggttttcggtggagcggcgttggcgcggtttaggtaggtttggcgtggtaggaagcgttacggagtcgttcgtgtttagtcgagttaatagtttcgcggcgcgttttcggagtcgtgagcgtcgtcgggggttttgagggagcgaggtttcgtttcggttttagtttcgttttcgattggttcgggaagggggcgtggcgggaagggggcggggtttgggcgggggcggattgggtaggtaagtttgattagtttgcgggggagcggcgcgcgcgggttggacgtttgggtggaggtggggaggagtggaatgagcgtgcgaatgaatgaatgaacgagcgaat

SEQ ID NO: 19660 - DNA, 780 bp, Artificial Sequence
  chemically treated genomic DNA (Homo sapiens) CpG-island No: 19660
attcgctcgttcattcattcattcgcacgctcattccactcctccccacctccacccaaacgtccaacccgcgcgcgccgctcccccgcaaactaatcaaacttacctacccaatccgcccccgcccaaaccccgcccccttcccgccacgcccccttcccgaaccaatcgaaaacgaaactaaaaccgaaacgaaacctcgctccctcaaaacccccgacgacgctcacgactccgaaaacgcgccgcgaaactattaactcgactaaacacgaacgactccgtaacgcttcctaccacgccaaacctacctaaaccgcgccaacgccgctccaccgaaaaccgcgcgtcgaccgccgccgaacctaaataaatatacgaaccgcgaaaaaatatacgaaaaacgctaaaaaaaccgcaaaacgaaaataatcgtaaaaacgacaaaaaaacgtataaacctaaataaacgtacaaaaccgcgaaaaaatatacaaaaaatacaaaactatatacgaaactaaaacgaatatacgaaccgcaaaaaaatacacgataaaaaaaaaaaacgtctctaaacaattaaaaaactactcgaccttaaacgaaccaaaacaaaaaacgaatcccgaataacgaatacgaaaaaacccgaaaaccttcccgaaacgaacgaaaaacgacgatcccgaataaaaatcgctaaaatataaaaacctactctactctttaaaaaacgctaaaaaataaaaaccgctcaaaaacgaaaaaaaaaaaccc

SEQ ID NO: 19661 - DNA, 553 bp, Artificial Sequence
  chemically treated genomic DNA (Homo sapiens) CpG-island No: 19661
ttcgattgcgacgattgcggtaagttttttcgaggggttaacgggttggtcgagtattagcgtatttatagtggggttaagttatacgggtgtttttattgcggtaagttttttcgaaggagttcggagtttattaagtatcggcggatttatacgggcgagaagttttacgtttgcggttagtgcggtaaggtttttcgttagagttttagttttttggagtacgtacgtatttatagtggcgagcggttttacgtatgcggcgagtgtggtaaggtttttcgtgggttttttgattttattaagtatcggcgtatttatagcggattgaaattttatgagtgcgataaatgcggtaaggtttttcgtcggagtttcggttttagtcgttatcggcggatttatagtggggcgcggcgttgcgaatgtagttagtgtggtcgcgtgtttaagaggcgttcggtattgtagaagtattagttaatttattacgagtagaaacgttttgtggtttcgcgggatagggacggagtttttagaggggatggtagag

SEQ ID NO: 19662 - DNA, 553 bp, Artificial Sequence
  chemically treated genomic DNA (Homo sapiens) CpG-island No: 19662
ctctaccatcccctctaaaaactccgtccctatcccgcgaaaccacaaaacgtttctactcgtaataaattaactaatacttctacaataccgaacgcctcttaaacacgcgaccacactaactacattcgcaacgccgcgccccactataaatccgccgataacgactaaaaccgaaactccgacgaaaaaccttaccgcatttatcgcactcataaaatttcaatccgctataaatacgccgatacttaataaaatcaaaaaacccacgaaaaaccttaccacactcgccgcatacgtaaaaccgctcgccactataaatacgtacgtactccaaaaaactaaaactctaacgaaaaaccttaccgcactaaccgcaaacgtaaaacttctcgcccgtataaatccgccgatacttaataaactccgaactccttcgaaaaaacttaccgcaataaaaacacccgtataacttaaccccactataaatacgctaatactcgaccaacccgttaacccctcgaaaaaacttaccgcaatcgtcgcaatcgaa

SEQ ID NO: 19663 - DNA, 553 bp, Artificial Sequence
  chemically treated genomic DNA (Homo sapiens) CpG-island No: 19663
ttttgttattttttttggggatttcgtttttgtttcgcgggattatagggcgtttttattcgtggtgggttggttgatgtttttgtagtgtcgagcgttttttgaatacgcggttatattggttgtattcgtagcgtcgcgttttattgtggattcgtcggtggcgattgaggtcggagtttcggcggaaggttttgtcgtatttgtcgtatttatagggttttagttcgttgtggatgcgtcggtgtttgatgaggttagagggtttacggaaggttttgttatattcgtcgtatgcgtagggtcgttcgttattgtggatgcgtgcgtgttttaggaggttggagttttggcggaaggttttgtcgtattggtcgtaggcgtagggtttttcgttcgtgtggattcgtcggtgtttggtgagtttcgagttttttcggaagagtttgtcgtagtggggatattcgtatggtttggttttattgtggatgcgttggtgttcggttagttcgttgatttttcggaaggatttgtcgtagtcgtcgtagtcgaa

SEQ ID NO: 19664 - DNA, 553 bp, Artificial Sequence
  chemically treated genomic DNA (Homo sapiens) CpG-island No: 19664
ttcgactacgacgactacgacaaatccttccgaaaaatcaacgaactaaccgaacaccaacgcatccacaataaaaccaaaccatacgaatatccccactacgacaaactcttccgaaaaaactcgaaactcaccaaacaccgacgaatccacacgaacgaaaaaccctacgcctacgaccaatacgacaaaaccttccgccaaaactccaacctcctaaaacacgcacgcatccacaataacgaacgaccctacgcatacgacgaatataacaaaaccttccgtaaaccctctaacctcatcaaacaccgacgcatccacaacgaactaaaaccctataaatacgacaaatacgacaaaaccttccgccgaaactccgacctcaatcgccaccgacgaatccacaataaaacgcgacgctacgaatacaaccaatataaccgcgtattcaaaaaacgctcgacactacaaaaacatcaaccaacccaccacgaataaaaacgccctataatcccgcgaaacaaaaacgaaatccccaaaaaaaataacaaaa

SEQ ID NO: 19665 - DNA, 654 bp, Artificial Sequence
  chemically treated genomic DNA (Homo sapiens) CpG-island No: 19665
aacgcgggtttttttcgttttttttaggagtcgcggtgcgttgattatttcgattttagtttttagagtagtttagatagaaagcggaagtgtttcggggcgcgtggggagttaggttagacgtttttgtggggcgggcgcggggcgggtcgttatttttttgcgtcgcgtatgttttatgttttttttataacgcgtttcgtttttacgttgtcgtcgtttcggtttcgttcgttttcggttcgttcgtcggcgtattagattgagatttttttttaggacgtttttcgcgagcggtatttagaggcgaagtcgagataagtttaggagtttttatttttcgttcgcgttttttggggacgcggtttcggagggtttttaggaggaggcggcggttttggtttcgggtttgtcgggagtaggaagggaggtcgattttttcggttgttcgtcgagtttaggtaagagggtcgagttgggtcgtaggggtgcgggtaagcgggtaaggggttcgtttcggtagggtgtaggtgtcgagggggacgagggagttgcggcggcggcgataagtagggattttttgggaggcgggttagtattgagtggtcggattagttttcggggtcgtttcgtattaggggcgttaggggaaga

SEQ ID NO: 19666 - DNA, 654 bp, Artificial Sequence
  chemically treated genomic DNA (Homo sapiens) CpG-island No: 19666
tcttcccctaacgcccctaatacgaaacgaccccgaaaactaatccgaccactcaatactaacccgcctcccaaaaaatccctacttatcgccgccgccgcaactccctcgtccccctcgacacctacaccctaccgaaacgaaccccttacccgcttacccgcacccctacgacccaactcgaccctcttacctaaactcgacgaacaaccgaaaaaatcgacctcccttcctactcccgacaaacccgaaaccaaaaccgccgcctcctcctaaaaaccctccgaaaccgcgtccccaaaaaacgcgaacgaaaaataaaaactcctaaacttatctcgacttcgcctctaaataccgctcgcgaaaaacgtcctaaaaaaaaatctcaatctaatacgccgacgaacgaaccgaaaacgaacgaaaccgaaacgacgacaacgtaaaaacgaaacgcgttataaaaaaaacataaaacatacgcgacgcaaaaaaataacgacccgccccgcgcccgccccacaaaaacgtctaacctaactccccacgcgccccgaaacacttccgctttctatctaaactactctaaaaactaaaatcgaaataatcaacgcaccgcgactcctaaaaaaaacgaaaaaaacccgcgtt

SEQ ID NO: 19667 - DNA, 654 bp, Artificial Sequence
  chemically treated genomic DNA (Homo sapiens) CpG-island No: 19667
tttttttttggcgtttttggtacggggcggtttcgagggttggttcggttatttagtgttagttcgttttttagggagtttttgtttgtcgtcgtcgtcgtagttttttcgtttttttcgatatttgtattttgtcgagacgggttttttattcgtttattcgtatttttgcggtttagttcggtttttttatttgggttcggcgggtagtcgagggagtcggtttttttttttgttttcggtaggttcgaggttaaggtcgtcgtttttttttagaagtttttcgaggtcgcgtttttaggaaacgcgggcggggggtgggggtttttgggtttgtttcgatttcgtttttgggtatcgttcgcgaagagcgttttgaaggggagttttagtttggtgcgtcgacgagcgggtcgggagcgggcggggtcggggcggcggtagcgtgggaacggggcgcgttgtggggggggtatggagtatgcgcggcgtagagggatggcggttcgtttcgcgttcgttttataggggcgtttggtttggttttttacgcgtttcgaggtattttcgttttttgtttgggttgttttgaaggttggggtcgaagtggttagcgtatcgcggtttttgaaggggacgggagggattcgcgtt

SEQ ID NO: 19668 - DNA, 654 bp, Artificial Sequence
  chemically treated genomic DNA (Homo sapiens) CpG-island No: 19668
aacgcgaatccctcccgtccccttcaaaaaccgcgatacgctaaccacttcgaccccaaccttcaaaacaacccaaacaaaaaacgaaaatacctcgaaacgcgtaaaaaaccaaaccaaacgcccctataaaacgaacgcgaaacgaaccgccatccctctacgccgcgcatactccataccccccccacaacgcgccccgttcccacgctaccgccgccccgaccccgcccgctcccgacccgctcgtcgacgcaccaaactaaaactccccttcaaaacgctcttcgcgaacgatacccaaaaacgaaatcgaaacaaacccaaaaacccccaccccccgcccgcgtttcctaaaaacgcgacctcgaaaaacttctaaaaaaaaacgacgaccttaacctcgaacctaccgaaaacaaaaaaaaaaaccgactccctcgactacccgccgaacccaaataaaaaaaccgaactaaaccgcaaaaatacgaataaacgaataaaaaacccgtctcgacaaaatacaaatatcgaaaaaaacgaaaaaactacgacgacgacgacaaacaaaaactccctaaaaaacgaactaacactaaataaccgaaccaaccctcgaaaccgccccgtaccaaaaacgccaaaaaaaaa

SEQ ID NO: 19669 - DNA, 843 bp, Artificial Sequence
  chemically treated genomic DNA (Homo sapiens) CpG-island No: 19669
cgagaagttttacgcgtgtttcgagtgcggtaagttgtttcgtcgtagtttcgcgtttttggagtattagcgtatttatagcggcgagaagttttacgtttgtttcgagtgtagtaagatttttacgcgtagttttaattttattaagtattaggttatttatagcggcgagcggtttttcgtttgcggcgattgcggtaaattgtttcgtcgtagtttcgcgtttttggagtacgcgcgcgtgtatagcggcgagcggttttacgcgtgtttagagtgcggtaaggtttttagtcgtagttttaattttatcgagtattagcgtacgtatcgcggcgagaagttttacgtttgcggttagtgcgttaaggtttttaagggcgtttcgtagtttatttattattagcgtagttatagcggcgagcggtttttcgcgtgtcgcgagtgcggtaaggtttttcgtggtcgttcgggttttagttagtatcggcgcgtgtatagcggtgagaagttttacgagtgtagcgattgcggtaaggttttcggtcggcgcgttaatttatttaagtattaggtagtgtacggcgttaggcgttttgcgaaggcggagacggcgcggaggttagcgggttttgggagtatcggttttgggagcgcggtggcggttattagtttttcgcggtcgagtatagtcgttaggttttttaggtttagtcgtcgttgatttttcgttagcgtatttagggcgcggtcggtttgcgtggggggtttttttggggacgtcgaggtttagttttttttaggtgggaagatcgtttttttagggtttcgattgcggttata

SEQ ID NO: 19670 - DNA, 843 bp, Artificial Sequence
  chemically treated genomic DNA (Homo sapiens) CpG-island No: 19670
tataaccgcaatcgaaaccctaaaaaaacgatcttcccacctaaaaaaaactaaacctcgacgtccccaaaaaaaccccccacgcaaaccgaccgcgccctaaatacgctaacgaaaaatcaacgacgactaaacctaaaaaacctaacgactatactcgaccgcgaaaaactaataaccgccaccgcgctcccaaaaccgatactcccaaaacccgctaacctccgcgccgtctccgccttcgcaaaacgcctaacgccgtacactacctaatacttaaataaattaacgcgccgaccgaaaaccttaccgcaatcgctacactcgtaaaacttctcaccgctatacacgcgccgatactaactaaaacccgaacgaccacgaaaaaccttaccgcactcgcgacacgcgaaaaaccgctcgccgctataactacgctaataataaataaactacgaaacgcccttaaaaaccttaacgcactaaccgcaaacgtaaaacttctcgccgcgatacgtacgctaatactcgataaaattaaaactacgactaaaaaccttaccgcactctaaacacgcgtaaaaccgctcgccgctatacacgcgcgcgtactccaaaaacgcgaaactacgacgaaacaatttaccgcaatcgccgcaaacgaaaaaccgctcgccgctataaataacctaatacttaataaaattaaaactacgcgtaaaaatcttactacactcgaaacaaacgtaaaacttctcgccgctataaatacgctaatactccaaaaacgcgaaactacgacgaaacaacttaccgcactcgaaacacgcgtaaaacttctcg

SEQ ID NO: 19671 - DNA, 843 bp, Artificial Sequence
  chemically treated genomic DNA (Homo sapiens) CpG-island No: 19671
tgtggtcgtaatcgaggttttgggagggcggtttttttatttgaagggggttgagtttcgacgtttttaggaaggttttttacgtagatcggtcgcgttttgggtgcgttggcggggagttagcggcggttgggtttggaaggtttggcggttgtgttcggtcgcggggggttggtggtcgttatcgcgtttttagggtcggtgtttttagggttcgttagttttcgcgtcgttttcgttttcgtagggcgtttggcgtcgtgtattgtttggtgtttgaataggttggcgcgtcggtcgaaggttttgtcgtagtcgttgtattcgtagggttttttatcgttgtgtacgcgtcggtgttggttgaggttcgaacggttacggaaggttttgtcgtattcgcggtacgcgaagggtcgttcgtcgttgtggttgcgttggtggtggatgagttgcgagacgtttttgaaggttttggcgtattggtcgtaggcgtagggtttttcgtcgcggtgcgtgcgttggtgttcgatgaggttggagttgcggttgaaggttttgtcgtattttgggtacgcgtagggtcgttcgtcgttgtgtacgcgcgcgtgttttaggagcgcgaagttgcggcggaatagtttgtcgtagtcgtcgtaggcgaagggtcgttcgtcgttgtggatgatttggtgtttgatgaggttggagttgcgcgtgaaggttttgttgtattcggggtaggcgtagggtttttcgtcgttgtggatgcgttggtgttttaggagcgcgaagttgcggcgaaatagtttgtcgtattcggggtacgcgtaaggtttttcg

SEQ ID NO: 19672 - DNA, 843 bp, Artificial Sequence
  chemically treated genomic DNA (Homo sapiens) CpG-island No: 19672
cgaaaaaccttacgcgtaccccgaatacgacaaactatttcgccgcaacttcgcgctcctaaaacaccaacgcatccacaacgacgaaaaaccctacgcctaccccgaatacaacaaaaccttcacgcgcaactccaacctcatcaaacaccaaatcatccacaacgacgaacgacccttcgcctacgacgactacgacaaactattccgccgcaacttcgcgctcctaaaacacgcgcgcgtacacaacgacgaacgaccctacgcgtacccaaaatacgacaaaaccttcaaccgcaactccaacctcatcgaacaccaacgcacgcaccgcgacgaaaaaccctacgcctacgaccaatacgccaaaaccttcaaaaacgtctcgcaactcatccaccaccaacgcaaccacaacgacgaacgacccttcgcgtaccgcgaatacgacaaaaccttccgtaaccgttcgaacctcaaccaacaccgacgcgtacacaacgataaaaaaccctacgaatacaacgactacgacaaaaccttcgaccgacgcgccaacctattcaaacaccaaacaatacacgacgccaaacgccctacgaaaacgaaaacgacgcgaaaactaacgaaccctaaaaacaccgaccctaaaaacgcgataacgaccaccaaccccccgcgaccgaacacaaccgccaaaccttccaaacccaaccgccgctaactccccgccaacgcacccaaaacgcgaccgatctacgtaaaaaaccttcctaaaaacgtcgaaactcaacccccttcaaataaaaaaaccgccctcccaaaacctcgattacgaccaca

SEQ ID NO: 19673 - DNA, 945 bp, Artificial Sequence
  chemically treated genomic DNA (Homo sapiens) CpG-island No: 19673
tcgggcgcgtagtttttgagtttcgaggtttttgcgtcgcgtatcgtttttcgcgttcgttttttttttttttttttttttttatttagtttttttttttttttttttttttttttcgcgtttagagttgcggttggagtcgagcgcgtcgcgtcgttcgtcgcgggtgtagagcgtggggagtattcggtcgtagttttcgttcgtcgtagagggtcgcgtttcgcgtcgtcggttaggtcgtttcgtgtttaggtttttttatttttggagcggatcgttgttcgtttgacgttcgttcgtagcgatagcgttcgtcggagtcgaggtcgcggcggcggtcgtgtttatgttcgggtaagtggtgttttgggcgcgcgggcgtcgtcggggtgggcgcgggcgcggcgcgggtataaggcgcgggtggggatgggaggatgattcggtaggtggtgcggcggtaggtagggggatacgggttttcgttcgaggtatttgagtttcgcgtcgggtttgcgtgtttttgcggtattgcggtcgcgcgttatttcggggttttaggtcggcgggtagcgtttcgtattttgtattttgcgtttcgtatcgcgcgcgtacgcgtattcgtgtttgaggaataaggtttttgggggttgcgggtcggggtttagggtgggcgtagtcgggggcgcgggatttgggtcgggagttcgttagtgcgtacgtattttttcggagtttcgggtattttttttttttcgcgtttttatattgtattattttttttttttcgttttttcgtatcgtttttcgtacgtttacgcggttgtttagtagattttatcgcggttatgggtagtgtttacgagaagtcgttcggggtcgtatttaggtaatttttttatttttttaggaacggttgttttttttttttcgtttgtgtga

SEQ ID NO: 19674 - DNA, 945 bp, Artificial Sequence
  chemically treated genomic DNA (Homo sapiens) CpG-island No: 19674
tcacacaaacgaaaaaaaaaaaacaaccgttcctaaaaaaataaaaaaattacctaaatacgaccccgaacgacttctcgtaaacactacccataaccgcgataaaatctactaaacaaccgcgtaaacgtacgaaaaacgatacgaaaaaacgaaaaaaaaaaaataatacaatataaaaacgcgaaaaaaaaaaaatacccgaaactccgaaaaaatacgtacgcactaacgaactcccgacccaaatcccgcgcccccgactacgcccaccctaaaccccgacccgcaacccccaaaaaccttattcctcaaacacgaatacgcgtacgcgcgcgatacgaaacgcaaaatacaaaatacgaaacgctacccgccgacctaaaaccccgaaataacgcgcgaccgcaataccgcaaaaacacgcaaacccgacgcgaaactcaaatacctcgaacgaaaacccgtatccccctacctaccgccgcaccacctaccgaatcatcctcccatccccacccgcgccttatacccgcgccgcgcccgcgcccaccccgacgacgcccgcgcgcccaaaacaccacttacccgaacataaacacgaccgccgccgcgacctcgactccgacgaacgctatcgctacgaacgaacgtcaaacgaacaacgatccgctccaaaaataaaaaaacctaaacacgaaacgacctaaccgacgacgcgaaacgcgaccctctacgacgaacgaaaactacgaccgaatactccccacgctctacacccgcgacgaacgacgcgacgcgctcgactccaaccgcaactctaaacgcgaaaaaaaaaaaaaaaaaaaaaaaaaaactaaataaaaaaaaaaaaaaaaaaaaaaaacgaacgcgaaaaacgatacgcgacgcaaaaacctcgaaactcaaaaactacgcgcccga

SEQ ID NO: 19675 - DNA, 945 bp, Artificial Sequence
  chemically treated genomic DNA (Homo sapiens) CpG-island No: 19675
ttatataggcgaggagggggagatagtcgtttttggagggatggagaagttatttaagtgcggtttcgggcggtttttcgtgggtattgtttatgatcgcggtggggtttgttgggtagtcgcgtgggcgtgcggggaacggtgcgggaaggcgagaggggaaggatgatatagtgtgagggcgcgggggggagggggtgttcgaggtttcgggaaggtgcgtgcgtattggcgggttttcggtttagatttcgcgttttcggttgcgtttattttgagtttcggttcgtagtttttaagggttttgttttttagatacggatgcgcgtgcgcgcgcgatgcggggcgtagggtgtagggtgcggggcgttgttcgtcggtttggggtttcggggtgacgcgcggtcgtagtgtcgtaaggatacgtaggttcggcgcggggtttaggtgtttcgggcggggattcgtgtttttttatttgtcgtcgtattatttgtcgggttatttttttatttttattcgcgttttgtgttcgcgtcgcgttcgcgtttatttcggcggcgttcgcgcgtttagagtattatttattcgggtatgggtacggtcgtcgtcgcggtttcggtttcggcgggcgttgtcgttgcgggcgggcgttaggcgggtaacgattcgttttaaggatggaaaggtttgggtacggggcggtttggtcggcggcgcgggacgcgattttttgcggcgagcgagggttgcggtcgagtgttttttacgttttgtattcgcggcgggcgacgcggcgcgttcggttttaatcgtagttttgagcgcggagggagggaggggggaggggagggagttgggtgaggaggagggagggaggagggagcgggcgcggggggcggtgcgcggcgtaggggtttcggggtttaggagttacgcgttcgg

SEQ ID NO: 19676 - DNA, 945 bp, Artificial Sequence
  chemically treated genomic DNA (Homo sapiens) CpG-island No: 19676
ccgaacgcgtaactcctaaaccccgaaacccctacgccgcgcaccgccccccgcgcccgctccctcctccctccctcctcctcacccaactccctcccctcccccctccctccctccgcgctcaaaactacgattaaaaccgaacgcgccgcgtcgcccgccgcgaatacaaaacgtaaaaaacactcgaccgcaaccctcgctcgccgcaaaaaatcgcgtcccgcgccgccgaccaaaccgccccgtacccaaacctttccatccttaaaacgaatcgttacccgcctaacgcccgcccgcaacgacaacgcccgccgaaaccgaaaccgcgacgacgaccgtacccatacccgaataaataatactctaaacgcgcgaacgccgccgaaataaacgcgaacgcgacgcgaacacaaaacgcgaataaaaataaaaaaataacccgacaaataatacgacgacaaataaaaaaacacgaatccccgcccgaaacacctaaaccccgcgccgaacctacgtatccttacgacactacgaccgcgcgtcaccccgaaaccccaaaccgacgaacaacgccccgcaccctacaccctacgccccgcatcgcgcgcgcacgcgcatccgtatctaaaaaacaaaacccttaaaaactacgaaccgaaactcaaaataaacgcaaccgaaaacgcgaaatctaaaccgaaaacccgccaatacgcacgcaccttcccgaaacctcgaacaccccctcccccccgcgccctcacactatatcatccttcccctctcgccttcccgcaccgttccccgcacgcccacgcgactacccaacaaaccccaccgcgatcataaacaatacccacgaaaaaccgcccgaaaccgcacttaaataacttctccatccctccaaaaacgactatctccccctcctcgcctatataa

SEQ ID NO: 19677 - DNA, 789 bp, Artificial Sequence
  chemically treated genomic DNA (Homo sapiens) CpG-island No: 19677
  unsure (379)
ttatcgtttaagtttttgtagaggtttagggtcgagtttcggatatgcgtatgcgtacgcgtattcggtcggttaggtgagaaggaggcggtcgtttcgtatttgggttttaattttttttagttacgggagtgggcggagtgtacgtagggacggagtcgggggcgagtagcgagagaggtcgggtttgatttttgaggcggggtgggtagcgttcggggagcgcgtcgagtcgtttttagtttggggttcgcgcgcgtcgcggggaggagggggagtgtcgaggggagcgaagtttcgcgagatcgcgcggcggcggcgggagcggcggcggcggcggtcggggaggtgagcggcgggcggtggcggtcgttggggnttgaggtcgggtgagagcggtcgagatcgagggttgggtgggggagcgggtttggtgaatatttcgcgttttaggtagttatttttgttcgttttcgtagtagttgcggcgtcgtttggttcgtatcgttttcgggattcgcgcggggcggggcggtcggggtcgcgggtcggtgttttttttaatcggttttcgcgttcgggcgcgatttcggggtcgttttagtgtttatttcgattgtagagttggttttgttgatagtggtagcggcgtttatggagtttttgttgtgtgtcgggtatttaagttgcgcgtttgtacgtcggggttgtatagagaggtggagcgttcgggttagagttatattgcgaggaggcggtgggaggggatcgggatttttgcgttttttt

SEQ ID NO: 19678 - DNA, 789 bp, Artificial Sequence
  chemically treated genomic DNA (Homo sapiens) CpG-island No: 19678
  unsure (411)
aaaaaaacgcaaaaatcccgatcccctcccaccgcctcctcgcaatataactctaacccgaacgctccacctctctatacaaccccgacgtacaaacgcgcaacttaaatacccgacacacaacaaaaactccataaacgccgctaccactatcaacaaaaccaactctacaatcgaaataaacactaaaacgaccccgaaatcgcgcccgaacgcgaaaaccgattaaaaaaaacaccgacccgcgaccccgaccgccccgccccgcgcgaatcccgaaaacgatacgaaccaaacgacgccgcaactactacgaaaacgaacaaaaataactacctaaaacgcgaaatattcaccaaacccgctcccccacccaaccctcgatctcgaccgctctcacccgacctcaanccccaacgaccgccaccgcccgccgctcacctccccgaccgccgccgccgccgctcccgccgccgccgcgcgatctcgcgaaacttcgctcccctcgacactccccctcctccccgcgacgcgcgcgaaccccaaactaaaaacgactcgacgcgctccccgaacgctacccaccccgcctcaaaaatcaaacccgacctctctcgctactcgcccccgactccgtccctacgtacactccgcccactcccgtaactaaaaaaaattaaaacccaaatacgaaacgaccgcctccttctcacctaaccgaccgaatacgcgtacgcatacgcatatccgaaactcgaccctaaacctctacaaaaacttaaacgataa

SEQ ID NO: 19679 - DNA, 789 bp, Artificial Sequence
  chemically treated genomic DNA (Homo sapiens) CpG-island No: 19679
  unsure (411)
aagggggcgtaggggtttcggtttttttttatcgttttttcgtagtgtggttttggttcgggcgttttatttttttgtgtagtttcggcgtgtaagcgcgtaatttaagtgttcggtatatagtagaggttttataaacgtcgttgttattgttagtagggttaattttgtagtcgagatggatattgaggcggtttcggggtcgcgttcgggcgcgaggatcggttgaaggaggtatcggttcgcggtttcggtcgtttcgtttcgcgcgagtttcggggacggtgcggattaaacggcgtcgtagttgttgcggggacgaatagggatggttgtttgggacgcgggatgtttattaggttcgtttttttatttagttttcggtttcggtcgtttttattcggttttagnttttaacggtcgttatcgttcgtcgtttattttttcggtcgtcgtcgtcgtcgttttcgtcgtcgtcgcgcgatttcgcgagatttcgtttttttcggtattttttttttttttcgcggcgcgcgcggattttaggttagaagcggttcggcgcgtttttcggacgttgtttatttcgttttaagggttaagttcggtttttttcgttgttcgttttcgatttcgtttttgcgtgtatttcgtttattttcgtgattgggaagggttaaagtttaggtgcgaggcggtcgttttttttttatttggtcggtcgggtgcgcgtgcgtatgcgtatgttcggggttcggttttgagtttttgtaaaggtttggacggtgg

SEQ ID NO: 19680 - DNA, 789 bp, Artificial Sequence
  chemically treated genomic DNA (Homo sapiens) CpG-island No: 19680
  unsure (379)
ccaccgtccaaacctttacaaaaactcaaaaccgaaccccgaacatacgcatacgcacgcgcacccgaccgaccaaataaaaaaaaaacgaccgcctcgcacctaaactttaacccttcccaatcacgaaaataaacgaaatacacgcaaaaacgaaatcgaaaacgaacaacgaaaaaaaccgaacttaacccttaaaacgaaataaacaacgtccgaaaaacgcgccgaaccgcttctaacctaaaatccgcgcgcgccgcgaaaaaaaaaaaaaataccgaaaaaaacgaaatctcgcgaaatcgcgcgacgacgacgaaaacgacgacgacgacgaccgaaaaaataaacgacgaacgataacgaccgttaaaanctaaaaccgaataaaaacgaccgaaaccgaaaactaaataaaaaaacgaacctaataaacatcccgcgtcccaaacaaccatccctattcgtccccgcaacaactacgacgccgtttaatccgcaccgtccccgaaactcgcgcgaaacgaaacgaccgaaaccgcgaaccgatacctccttcaaccgatcctcgcgcccgaacgcgaccccgaaaccgcctcaatatccatctcgactacaaaattaaccctactaacaataacaacgacgtttataaaacctctactatataccgaacacttaaattacgcgcttacacgccgaaactacacaaaaaaataaaacgcccgaaccaaaaccacactacgaaaaaacgataaaaaaaaaccgaaacccctacgccccctt

SEQ ID NO: 19681 - DNA, 755 bp, Artificial Sequence
  chemically treated genomic DNA (Homo sapiens) CpG-island No: 19681
gggaattcgcgaattggagtttcgttttttttttggcgttttgttttttttttggagtttttttttaaggatttcgggagtttattttatagtgaggcgggtcgaggtcggcgcgtatcgaggggattcgggattcggttagttcgcggtagggtcggggtaaagcgggcgcggggttcgaggaacgcggggtcgttggggtttcgggagtcgtttttgttttcggggagagggagttgggcgcgaagggttttcgggtttcgggatggagatttatttcgattggaggattaataagatgtttaggaggattggaagaattttggataatattttcgcggagatcggcgcgattatttgcgcggaggtcgcggtttacgttttggtcgtattgagcgcggggcggaggtttttgttgggttttaatttttattttttttattcgtttcgtttcgtttcgcgtttttcgttttaggttcgtttcgatggaaattttcgacgacgtgacggttgttgcggtggggagtcggggaggttcgcgcgggcgcgggaaggaggcgggagttcggttgttgaggtttttcgtttttacgtcgttattgcggcgttgttagatagttaggggcgggggaggcggagggaggaggcggcgagttcgcggcgcggggtttgggcgggggaaattcgcgttttaggttgtggtcggtagggagttgttttagggataagatgtggggttggatgtgtttacgttt

SEQ ID NO: 19682 - DNA, 755 bp, Artificial Sequence
  chemically treated genomic DNA (Homo sapiens) CpG-island No: 19682
aaacgtaaacacatccaaccccacatcttatccctaaaacaactccctaccgaccacaacctaaaacgcgaatttcccccgcccaaaccccgcgccgcgaactcgccgcctcctccctccgcctcccccgcccctaactatctaacaacgccgcaataacgacgtaaaaacgaaaaacctcaacaaccgaactcccgcctccttcccgcgcccgcgcgaacctccccgactccccaccgcaacaaccgtcacgtcgtcgaaaatttccatcgaaacgaacctaaaacgaaaaacgcgaaacgaaacgaaacgaataaaaaaaataaaaattaaaacccaacaaaaacctccgccccgcgctcaatacgaccaaaacgtaaaccgcgacctccgcgcaaataatcgcgccgatctccgcgaaaatattatccaaaattcttccaatcctcctaaacatcttattaatcctccaatcgaaataaatctccatcccgaaacccgaaaacccttcgcgcccaactccctctccccgaaaacaaaaacgactcccgaaaccccaacgaccccgcgttcctcgaaccccgcgcccgctttaccccgaccctaccgcgaactaaccgaatcccgaatcccctcgatacgcgccgacctcgacccgcctcactataaaataaactcccgaaatccttaaaaaaaaactccaaaaaaaaaacaaaacgccaaaaaaaaaacgaaactccaattcgcgaattccc

SEQ ID NO: 19683 - DNA, 755 bp, Artificial Sequence
  chemically treated genomic DNA (Homo sapiens) CpG-island No: 19683
gggcgtgagtatatttagttttatattttgtttttgaagtagttttttgtcggttatagtttggggcgcgagtttttttcgtttaggtttcgcgtcgcgggttcgtcgtttttttttttcgtttttttcgtttttggttgtttggtagcgtcgtagtggcggcgtggggacggggggttttagtaatcgggttttcgtttttttttcgcgttcgcgcgagttttttcggttttttatcgtagtagtcgttacgtcgtcggagatttttatcggggcgggtttggggcggggagcgcgggacggggcggggcgagtgggaggagtgaaagttggagtttagtaaaagttttcgtttcgcgtttagtgcggttagagcgtgagtcgcgattttcgcgtaggtggtcgcgtcggttttcgcggaaatgttgtttaaagtttttttagtttttttaggtattttattgattttttagtcgaggtgagtttttatttcgggattcgggagtttttcgcgtttagtttttttttttcgggagtagggacggttttcgggattttagcggtttcgcgtttttcgagtttcgcgttcgttttgtttcggttttatcgcgggttggtcgagtttcgagttttttcgatgcgcgtcggtttcggttcgttttattgtaggatgggttttcggggtttttgagggggagttttaaaaggaagataggacgttagaaggaagacgggattttagttcgcggattttt

SEQ ID NO: 19684 - DNA, 755 bp, Artificial Sequence
  chemically treated genomic DNA (Homo sapiens) CpG-island No: 19684
aaaaatccgcgaactaaaatcccgtcttccttctaacgtcctatcttccttttaaaactccccctcaaaaaccccgaaaacccatcctacaataaaacgaaccgaaaccgacgcgcatcgaaaaaactcgaaactcgaccaacccgcgataaaaccgaaacaaaacgaacgcgaaactcgaaaaacgcgaaaccgctaaaatcccgaaaaccgtccctactcccgaaaaaaaaaaactaaacgcgaaaaactcccgaatcccgaaataaaaactcacctcgactaaaaaatcaataaaatacctaaaaaaactaaaaaaactttaaacaacatttccgcgaaaaccgacgcgaccacctacgcgaaaatcgcgactcacgctctaaccgcactaaacgcgaaacgaaaacttttactaaactccaactttcactcctcccactcgccccgccccgtcccgcgctccccgccccaaacccgccccgataaaaatctccgacgacgtaacgactactacgataaaaaaccgaaaaaactcgcgcgaacgcgaaaaaaaaacgaaaacccgattactaaaaccccccgtccccacgccgccactacgacgctaccaaacaaccaaaaacgaaaaaaacgaaaaaaaaaaacgacgaacccgcgacgcgaaacctaaacgaaaaaaactcgcgccccaaactataaccgacaaaaaactacttcaaaaacaaaatataaaactaaatatactcacgccc

SEQ ID NO: 19685 - DNA, 916 bp, Artificial Sequence
  chemically treated genomic DNA (Homo sapiens) CpG-island No: 19685
ttagcggggacgttgtaaggacgggcgttgcgtgtgtgatttcggttatattggcgaggattgtggtacgcggagttgtttttgggattgtggcgagggcgggcgttgcgtggacggtcgttgcgtgtgttggttcgggtatataggcgaggattgtagtacgcggatatgttcgagggattgtcggggtcgcgggcgttgcgaggacggcgaatgtatttgcgatacgggttatagcggggacgattgcggcgtgcgtagttgttttggcgattgtaattaaaggggtcgttgcgaggacggtcgttgcgtgtgttggtcggggtatattggaatcgattgcggttcgcgcgtttgtttacgcgattgtagaggtcgcgggcgttgcgagaacggcgtgtgtgtttgtaatgcgggttatagcggcgaggattgcggtgtgcgtagttgttttggggattgtcgtggtcggggtcgttgtgagagtggtcgttgtatgtgttggtcggggtatataggtcgggattgcggtacgcgcgtttgttttggcgattgtcgcgggcgcgggcgttgcgtggatggtcgttgcgtgtgtaattcgggttttatcggtgaggattgtgggagtcgtcgttgtttcggggattgtcgtgggtacggtttttgcgaggatggcgtgtgcgtgtgtgacgtaggttatttaggggaagattgtagtacgcgtagttgtttcgggggttgtcgaggtcgcggttagtgtttagatgggcggtgtgtgtgcgaggacggttattttggcgaggattgcggtgtgaggtagtgttcgaatgattgtagttagtacggcgtgtgttaggacggtgtgtgtatttgttgggaaggttacgtgagtgaggattgtagtattcgtatttgt

SEQ ID NO: 19686 - DNA, 916 bp, Artificial Sequence
  chemically treated genomic DNA (Homo sapiens) CpG-island No: 19686
acaaatacgaatactacaatcctcactcacgtaaccttcccaacaaatacacacaccgtcctaacacacgccgtactaactacaatcattcgaacactacctcacaccgcaatcctcgccaaaataaccgtcctcgcacacacaccgcccatctaaacactaaccgcgacctcgacaacccccgaaacaactacgcgtactacaatcttcccctaaataacctacgtcacacacgcacacgccatcctcgcaaaaaccgtacccacgacaatccccgaaacaacgacgactcccacaatcctcaccgataaaacccgaattacacacgcaacgaccatccacgcaacgcccgcgcccgcgacaatcgccaaaacaaacgcgcgtaccgcaatcccgacctatataccccgaccaacacatacaacgaccactctcacaacgaccccgaccacgacaatccccaaaacaactacgcacaccgcaatcctcgccgctataacccgcattacaaacacacacgccgttctcgcaacgcccgcgacctctacaatcgcgtaaacaaacgcgcgaaccgcaatcgattccaatataccccgaccaacacacgcaacgaccgtcctcgcaacgacccctttaattacaatcgccaaaacaactacgcacgccgcaatcgtccccgctataacccgtatcgcaaatacattcgccgtcctcgcaacgcccgcgaccccgacaatccctcgaacatatccgcgtactacaatcctcgcctatatacccgaaccaacacacgcaacgaccgtccacgcaacgcccgccctcgccacaatcccaaaaacaactccgcgtaccacaatcctcgccaatataaccgaaatcacacacgcaacgcccgtccttacaacgtccccgctaa

SEQ ID NO: 19687 - DNA, 916 bp, Artificial Sequence
  chemically treated genomic DNA (Homo sapiens) CpG-island No: 19687
gtaggtgcggatgttgtagtttttatttacgtagtttttttaatagatgtatatatcgttttggtatacgtcgtgttggttgtagttattcgggtattgttttatatcgtaattttcgttagagtagtcgttttcgtatatatatcgtttatttaggtattggtcgcggtttcggtagttttcggggtagttgcgcgtgttgtagtttttttttgagtagtttgcgttatatacgtatacgttattttcgtaaaggtcgtgtttacggtagttttcgggatagcgacggtttttatagtttttatcggtgaagttcgggttgtatacgtagcggttatttacgtagcgttcgcgttcgcgatagtcgttaggataggcgcgcgtgtcgtagtttcggtttgtgtatttcggttaatatatgtagcggttatttttatagcggtttcggttacgatagtttttaggatagttgcgtatatcgtagttttcgtcgttgtagttcgtattgtaaatatatacgtcgttttcgtagcgttcgcgatttttatagtcgcgtgggtaggcgcgcgagtcgtaatcggttttagtgtatttcggttagtatacgtagcggtcgttttcgtagcggtttttttggttgtagtcgttagggtagttgcgtacgtcgtagtcgttttcgttgtagttcgtgtcgtaaatgtattcgtcgttttcgtagcgttcgcggtttcggtagtttttcggatatgttcgcgtgttgtagttttcgtttgtgtattcgggttagtatacgtagcggtcgtttacgtagcgttcgttttcgttatagttttaggggtagtttcgcgtattatagttttcgttagtgtagtcggggttatatacgtagcgttcgtttttgtagcgttttcgttgg

SEQ ID NO: 19688 - DNA, 916 bp, Artificial Sequence
  chemically treated genomic DNA (Homo sapiens) CpG-island No: 19688
ccaacgaaaacgctacaaaaacgaacgctacgtatataaccccgactacactaacgaaaactataatacgcgaaactacccctaaaactataacgaaaacgaacgctacgtaaacgaccgctacgtatactaacccgaatacacaaacgaaaactacaacacgcgaacatatccgaaaaactaccgaaaccgcgaacgctacgaaaacgacgaatacatttacgacacgaactacaacgaaaacgactacgacgtacgcaactaccctaacgactacaaccaaaaaaaccgctacgaaaacgaccgctacgtatactaaccgaaatacactaaaaccgattacgactcgcgcgcctacccacgcgactataaaaatcgcgaacgctacgaaaacgacgtatatatttacaatacgaactacaacgacgaaaactacgatatacgcaactatcctaaaaactatcgtaaccgaaaccgctataaaaataaccgctacatatattaaccgaaatacacaaaccgaaactacgacacgcgcgcctatcctaacgactatcgcgaacgcgaacgctacgtaaataaccgctacgtatacaacccgaacttcaccgataaaaactataaaaaccgtcgctatcccgaaaactaccgtaaacacgacctttacgaaaataacgtatacgtatataacgcaaactactcaaaaaaaaactacaacacgcgcaactaccccgaaaactaccgaaaccgcgaccaatacctaaataaacgatatatatacgaaaacgactactctaacgaaaattacgatataaaacaatacccgaataactacaaccaacacgacgtataccaaaacgatatatacatctattaaaaaaactacgtaaataaaaactacaacatccgcacctac

SEQ ID NO: 19689 - DNA, 1282 bp, Artificial Sequence
  chemically treated genomic DNA (Homo sapiens) CpG-island No: 19689
ggagtcggagtcgttttcggttgcgttttgtttttgaatttcgattttcgtcggttttcgggaaaatcgtagcggggtagcgcgggcgttgtcggaatttgtagttttatttttcgtcgcgttaaatagtcggaaacgggggcggttagaatagagaattatcgaggcgaaggtacgggtggcggcgaggggttaattcgcgtcgggggtggggttggttgtgaggtcgtcggaggtggttgggtgggaggagattcgtttatatatacgaggaggagggttgagttgtcgtcgtcgtcgtttttgtcgtcgtcgcgagtgtggagtcgggattggagttgttgtcgcggcgacgtcggggatttttgtcgttagttttcggtttttttgtttcgtcgtttttttttagttagcgttgtttattttttttcggtcgggcgtttttgtttttatttttcgttttttgtttattatatatacggttttttcgattatggattcgggtagtggcggcggcggcggcggcggcggcggcggcgggagtagtagcggtagtagtagtagcgattcggcgtttgattgttgggattaggcggatatggaagttttcgggtcgggtttttgcggcggcggcggttttttggcggcggcggtcgaggtttagcgggagaattttagcgcggtttttagtcggtaatttaacgttaacgttaagtttttcgtgtttaacgtttacgtcgtcgagttcgtgtcgttttttttgcggggttcggtagcgtcgttatttttagttggcggcgtttttaataattacggagtcggtagcggcgcgggaggtcgtgcgggtaaaggttcgggacgcgggaggaagttcggtcgggcgtcggagtttatatggcgtaggggtgcggttcgggggcgcgcggttttggggttcggtcggtacgtggggcgttgatagtggcgtcgtttgtttgggtggggcgtttcgagttcgggagtcggttttcgcggggcggttcgcggcggtggtcgggcggggagcggatagcgggtagcgcgtttaaagattcggattcgagtgtcgttttttcgcgtttttgttttgttttggagttcgtagttatttatttgagatgggaatcgtatggaacggagtgggggtcgcggcggatttttgttacgaggcgtagaatgaggatagatggagttaggagttatttgggtgggcgtttagagattttaggagttggggaggacgaatggtcgagtttttttttta

SEQ ID NO: 19690 - DNA, 1282 bp, Artificial Sequence
  chemically treated genomic DNA (Homo sapiens) CpG-island No: 19690
taaaaaaaaaactcgaccattcgtcctccccaactcctaaaatctctaaacgcccacccaaataactcctaactccatctatcctcattctacgcctcgtaacaaaaatccgccgcgacccccactccgttccatacgattcccatctcaaataaataactacgaactccaaaacaaaacaaaaacgcgaaaaaacgacactcgaatccgaatctttaaacgcgctacccgctatccgctccccgcccgaccaccgccgcgaaccgccccgcgaaaaccgactcccgaactcgaaacgccccacccaaacaaacgacgccactatcaacgccccacgtaccgaccgaaccccaaaaccgcgcgcccccgaaccgcacccctacgccatataaactccgacgcccgaccgaacttcctcccgcgtcccgaacctttacccgcacgacctcccgcgccgctaccgactccgtaattattaaaaacgccgccaactaaaaataacgacgctaccgaaccccgcaaaaaaaacgacacgaactcgacgacgtaaacgttaaacacgaaaaacttaacgttaacgttaaattaccgactaaaaaccgcgctaaaattctcccgctaaacctcgaccgccgccgccaaaaaaccgccgccgccgcaaaaacccgacccgaaaacttccatatccgcctaatcccaacaatcaaacgccgaatcgctactactactaccgctactactcccgccgccgccgccgccgccgccgccgccgccactacccgaatccataatcgaaaaaaccgtatatataataaacaaaaaacgaaaaataaaaacaaaaacgcccgaccgaaaaaaaataaacaacgctaactaaaaaaaaacgacgaaacaaaaaaaccgaaaactaacgacaaaaatccccgacgtcgccgcgacaacaactccaatcccgactccacactcgcgacgacgacaaaaacgacgacgacgacaactcaaccctcctcctcgtatatataaacgaatctcctcccacccaaccacctccgacgacctcacaaccaaccccacccccgacgcgaattaacccctcgccgccacccgtaccttcgcctcgataattctctattctaaccgcccccgtttccgactatttaacgcgacgaaaaataaaactacaaattccgacaacgcccgcgctaccccgctacgattttcccgaaaaccgacgaaaatcgaaattcaaaaacaaaacgcaaccgaaaacgactccgactcc

SEQ ID NO: 19691 - DNA, 1282 bp, Artificial Sequence
  chemically treated genomic DNA (Homo sapiens) CpG-island No: 19691
tgaaaggaaaattcggttattcgttttttttaatttttgggatttttaaacgtttatttaaatgatttttggttttatttgtttttattttgcgtttcgtggtagggattcgtcgcggtttttatttcgttttatacggtttttattttaagtgggtaattgcggattttagagtagggtaggggcgcggaggggcggtattcgggttcgggtttttgggcgcgttgttcgttgttcgtttttcgttcggttatcgtcgcgggtcgtttcgcgaaggtcggttttcgggttcggggcgttttatttaggtagacggcgttattgttagcgttttacgtgtcgatcgggttttagggtcgcgcgttttcggatcgtatttttacgttatgtgggtttcggcgttcggtcggattttttttcgcgtttcgggtttttattcgtacggtttttcgcgtcgttgtcggtttcgtggttattgggggcgtcgttagttgggggtggcggcgttgtcgggtttcgtaggaaggacggtacgaattcggcggcgtggacgttgggtacgaagggtttggcgttgacgttgagttgtcggttgaaggtcgcgttgaggttttttcgttgggtttcggtcgtcgtcgttagggagtcgtcgtcgtcgtaagggttcggttcgggggtttttatgttcgtttggttttagtagttaggcgtcgagtcgttgttgttgttgtcgttgttgttttcgtcgtcgtcgtcgtcgtcgtcgtcgtcgttattgttcggatttatgatcgggggggtcgtgtgtgtggtggatagagagcgggaaatggaggtaggggcgttcggtcggagaggagtgggtaacgttgattgagggaaggcggcggggtagaagggtcgggagttagcgataaagattttcggcgtcgtcgcggtagtagttttagtttcgattttatattcgcgacgacgatagaggcggcggcggcggtagtttaattttttttttcgtgtgtgtgagcggatttttttttatttaattattttcgacggttttatagttaattttattttcggcgcggattgatttttcgtcgttattcgtattttcgtttcggtagttttttgttttggtcgttttcgttttcggttatttagcgcggcgggaggtggaattataagtttcggtagcgttcgcgttatttcgttgcggttttttcgggggtcgacgggagtcgaagtttagggatagggcgtaatcggaagcggtttcggtttt

SEQ ID NO: 19692 - DNA, 1282 bp, Artificial Sequence
  chemically treated genomic DNA (Homo sapiens) CpG-island No: 19692
aaaaccgaaaccgcttccgattacgccctatccctaaacttcgactcccgtcgacccccgaaaaaaccgcaacgaaataacgcgaacgctaccgaaacttataattccacctcccgccgcgctaaataaccgaaaacgaaaacgaccaaaacaaaaaactaccgaaacgaaaatacgaataacgacgaaaaatcaatccgcgccgaaaataaaattaactataaaaccgtcgaaaataattaaataaaaaaaaatccgctcacacacacgaaaaaaaaaattaaactaccgccgccgccgcctctatcgtcgtcgcgaatataaaatcgaaactaaaactactaccgcgacgacgccgaaaatctttatcgctaactcccgacccttctaccccgccgccttccctcaatcaacgttacccactcctctccgaccgaacgcccctacctccatttcccgctctctatccaccacacacacgacccccccgatcataaatccgaacaataacgacgacgacgacgacgacgacgacgacgaaaacaacaacgacaacaacaacaacgactcgacgcctaactactaaaaccaaacgaacataaaaacccccgaaccgaacccttacgacgacgacgactccctaacgacgacgaccgaaacccaacgaaaaaacctcaacgcgaccttcaaccgacaactcaacgtcaacgccaaacccttcgtacccaacgtccacgccgccgaattcgtaccgtccttcctacgaaacccgacaacgccgccacccccaactaacgacgcccccaataaccacgaaaccgacaacgacgcgaaaaaccgtacgaataaaaacccgaaacgcgaaaaaaaatccgaccgaacgccgaaacccacataacgtaaaaatacgatccgaaaacgcgcgaccctaaaacccgatcgacacgtaaaacgctaacaataacgccgtctacctaaataaaacgccccgaacccgaaaaccgaccttcgcgaaacgacccgcgacgataaccgaacgaaaaacgaacaacgaacaacgcgcccaaaaacccgaacccgaataccgcccctccgcgcccctaccctactctaaaatccgcaattacccacttaaaataaaaaccgtataaaacgaaataaaaaccgcgacgaatccctaccacgaaacgcaaaataaaaacaaataaaaccaaaaatcatttaaataaacgtttaaaaatcccaaaaattaaaaaaaacgaataaccgaattttcctttca

SEQ ID NO: 19693 - DNA, 800 bp, Artificial Sequence
  chemically treated genomic DNA (Homo sapiens) CpG-island No: 19693
gttcggaggttgtatgtttttcgtcgtcgggtagtagtagttttttcggggtacggcggattcggtttttttcgtcgcgtttttagcgttcggggttagtttcggtatttttttatgagttttttcgggcgcggttttcgtttttcgggtttacgcgcggttagtagttttatcggtttttagtttagggattcgtcgtcgtcgtcgtcgtcgtttgcgcgaaagtcggcgttttagaagtcgttttggttgtcggtcgttcgttttttaggtcgcgtttgattcgtcgttttttttgtcggtcggtagttattttcgataggcgattgcggaatttgtcgaagggcgtcgcgtcggaaatggtcgaagtcggcgttcgcgagcgggggcgcggacgcgggcgcgcgttcgttattttttcgatcgcgttcgaagatcgtcgaggtttttcgtagtttcgcggtgatattcgggttaggggcgcggggtcgggcgtcggggattgtgggaggcgcgggggggcgcgtcggtcgttttcggagttttttaattcgcgttttgtaaaggtcgtcgggttttgtcgagaagattcgatcgtagatggcggggaggatgttttcggcggcgtgggaatcgggtttgattttcgagttatcgtcgttttcgtaggggcgtcggtttcgggaaagttaagttataaatttttgaatttaaaattttatttttagagaaaaggtttttaaggacgggcgtcgtgcgcggtaattgtttgtagttttgaagttttttgattattttat

SEQ ID NO: 19694 - DNA, 800 bp, Artificial Sequence
  chemically treated genomic DNA (Homo sapiens) CpG-island No: 19694
ataaaataatcaaaaaacttcaaaactacaaacaattaccgcgcacgacgcccgtccttaaaaaccttttctctaaaaataaaattttaaattcaaaaatttataacttaactttcccgaaaccgacgcccctacgaaaacgacgataactcgaaaatcaaacccgattcccacgccgccgaaaacatcctccccgccatctacgatcgaatcttctcgacaaaacccgacgacctttacaaaacgcgaattaaaaaactccgaaaacgaccgacgcgcccccccgcgcctcccacaatccccgacgcccgaccccgcgcccctaacccgaatatcaccgcgaaactacgaaaaacctcgacgatcttcgaacgcgatcgaaaaaataacgaacgcgcgcccgcgtccgcgcccccgctcgcgaacgccgacttcgaccatttccgacgcgacgcccttcgacaaattccgcaatcgcctatcgaaaataactaccgaccgacaaaaaaaacgacgaatcaaacgcgacctaaaaaacgaacgaccgacaaccaaaacgacttctaaaacgccgactttcgcgcaaacgacgacgacgacgacgacgaatccctaaactaaaaaccgataaaactactaaccgcgcgtaaacccgaaaaacgaaaaccgcgcccgaaaaaactcataaaaaaataccgaaactaaccccgaacgctaaaaacgcgacgaaaaaaaccgaatccgccgtaccccgaaaaaactactactacccgacgacgaaaaacatacaacctccgaac

SEQ ID NO: 19695 - DNA, 800 bp, Artificial Sequence
  chemically treated genomic DNA (Homo sapiens) CpG-island No: 19695
atgaaatagttaaagggttttaaaattgtaggtagttgtcgcgtacggcgttcgtttttggaggttttttttttgagaatggagttttagatttagggatttatgatttgattttttcggggtcggcgtttttgcggaagcggcggtggttcgggagttagattcggtttttacgtcgtcgggagtatttttttcgttatttgcggtcgggttttttcgatagggttcggcggtttttgtaggacgcgagttggggggtttcgaaggcggtcggcgcgttttttcgcgttttttataattttcggcgttcggtttcgcgtttttgattcgggtgttatcgcggagttgcgggaggtttcggcggttttcggacgcggtcgggaaagtggcgagcgcgcgttcgcgttcgcgttttcgttcgcgaacgtcggtttcggttattttcggcgcggcgtttttcggtaagtttcgtagtcgtttgtcggaaatggttgtcggtcggtagggggagcggcggattaggcgcggtttggaaggcgggcggtcggtagttagaacggtttttgggacgtcgattttcgcgtaggcggcggcggcggcggcggcgggtttttgagttggaagtcggtaggattgttggtcgcgcgtgagttcgaggagcgggggtcgcgttcggaagggtttatgggagggtgtcggggttggtttcgagcgttggggacgcggcgggagggatcgggttcgtcgtgtttcggggaggttgttgttgttcggcggcgggaggtatgtagttttcgagt

SEQ ID NO: 19696 - DNA, 800 bp, Artificial Sequence
  chemically treated genomic DNA (Homo sapiens) CpG-island No: 19696
actcgaaaactacatacctcccgccgccgaacaacaacaacctccccgaaacacgacgaacccgatccctcccgccgcgtccccaacgctcgaaaccaaccccgacaccctcccataaacccttccgaacgcgacccccgctcctcgaactcacgcgcgaccaacaatcctaccgacttccaactcaaaaacccgccgccgccgccgccgccgcctacgcgaaaatcgacgtcccaaaaaccgttctaactaccgaccgcccgccttccaaaccgcgcctaatccgccgctccccctaccgaccgacaaccatttccgacaaacgactacgaaacttaccgaaaaacgccgcgccgaaaataaccgaaaccgacgttcgcgaacgaaaacgcgaacgcgaacgcgcgctcgccactttcccgaccgcgtccgaaaaccgccgaaacctcccgcaactccgcgataacacccgaatcaaaaacgcgaaaccgaacgccgaaaattataaaaaacgcgaaaaaacgcgccgaccgccttcgaaaccccccaactcgcgtcctacaaaaaccgccgaaccctatcgaaaaaacccgaccgcaaataacgaaaaaaatactcccgacgacgtaaaaaccgaatctaactcccgaaccaccgccgcttccgcaaaaacgccgaccccgaaaaaatcaaatcataaatccctaaatctaaaactccattctcaaaaaaaaaacctccaaaaacgaacgccgtacgcgacaactacctacaattttaaaaccctttaactatttcat

SEQ ID NO: 19697 - DNA, 1187 bp, Artificial Sequence
  chemically treated genomic DNA (Homo sapiens) CpG-island No: 19697
acgttcgggggaagtttcggaggcggcggaacgtttacggatggaattttgtttttggggaaaaggattatatttgttagtagagttcgttagacgtgagaagggtgggagcggcggattgtgaacgttggtagggtttcggcgtttcgagaaagttttagtttcgcggtcgtttttttttattacgttttcggttttcggtgttatagttgtgggattcggaagtaaaaatataagtttcgttttcgagaattcgggaagtcggcgagaagtgtgaggtcgcggtagggtcgtatttcgtttcggagagaagtttgagttcgttaggttttgtaggttcgcggaagttcggtaatgataagtacgtcggttattttgtagggcgttatcgtttatacgttttttcgtttttcggacggcggcgtttagtttcggggcgttcggtcgtttcgtttttttcgggggaggaattaagaagagattgtttaatagggtcggtttgattcgcgaataggcgagggttttcgggggagtggcgcggtagaaggtttcgtttaggagtcgagggatagtttagaggaggcgtggttacgttgtcggcggaagtggagtttttcgcgagcgcgcgaggtcgtcggggtaggcggggaaatcggatagtaggggcggggtcgggtcggcgatggggatgcgggagtattacgcggagttgtattcgtgttcgtcggaattggggatgtagagtagcggtagcgggtatggtaggtagtcggcgggtcggtttttagcgtaggtgttcgagaggtaggggttggtttgggatgcgcgcgtatttgttttcgtttcgtttcgttcgtacgaggggtggtggtcgaggtttcgtttcgtacgtttcgtttgaggcgggttcgtttagtttaggcgttcgttttcgttttcgtcgattaaatgggtcggcggggtttagttttcggaaacggtcgtatatttcggggttgcgagcgcggagggcgacgacgacgaagcgtaggtaatcggtcgggcgggcgtcgcgtaggcggaggagcgtattgtttcgcgttgcgtcgcgcggcggtaaaatatacgttgtttgttgtgtttgagaatcgagtagaatcgagagggttttaattaatttttttatatttcgtatttttttttttgag

SEQ ID NO: 19698 - DNA, 1187 bp, Artificial Sequence
  chemically treated genomic DNA (Homo sapiens) CpG-island No: 19698
ctcaaaaaaaaaaatacgaaatataaaaaaattaattaaaaccctctcgattctactcgattctcaaacacaacaaacaacgtatattttaccgccgcgcgacgcaacgcgaaacaatacgctcctccgcctacgcgacgcccgcccgaccgattacctacgcttcgtcgtcgtcgccctccgcgctcgcaaccccgaaatatacgaccgtttccgaaaactaaaccccgccgacccatttaatcgacgaaaacgaaaacgaacgcctaaactaaacgaacccgcctcaaacgaaacgtacgaaacgaaacctcgaccaccacccctcgtacgaacgaaacgaaacgaaaacaaatacgcgcgcatcccaaaccaacccctacctctcgaacacctacgctaaaaaccgacccgccgactacctaccatacccgctaccgctactctacatccccaattccgacgaacacgaatacaactccgcgtaatactcccgcatccccatcgccgacccgaccccgcccctactatccgatttccccgcctaccccgacgacctcgcgcgctcgcgaaaaactccacttccgccgacaacgtaaccacgcctcctctaaactatccctcgactcctaaacgaaaccttctaccgcgccactcccccgaaaaccctcgcctattcgcgaatcaaaccgaccctattaaacaatctcttcttaattcctcccccgaaaaaaacgaaacgaccgaacgccccgaaactaaacgccgccgtccgaaaaacgaaaaaacgtataaacgataacgccctacaaaataaccgacgtacttatcattaccgaacttccgcgaacctacaaaacctaacgaactcaaacttctctccgaaacgaaatacgaccctaccgcgacctcacacttctcgccgacttcccgaattctcgaaaacgaaacttatatttttacttccgaatcccacaactataacaccgaaaaccgaaaacgtaataaaaaaaaacgaccgcgaaactaaaactttctcgaaacgccgaaaccctaccaacgttcacaatccgccgctcccacccttctcacgtctaacgaactctactaacaaatataatccttttccccaaaaacaaaattccatccgtaaacgttccgccgcctccgaaacttcccccgaacgt

SEQ ID NO: 19699 - DNA, 1187 bp, Artificial Sequence
  chemically treated genomic DNA (Homo sapiens) CpG-island No: 19699
tttaagagaggaggtgcggggtataaagggattggttaagattttttcgattttgttcggtttttaagtataataaatagcgtgtattttatcgtcgcgcggcgtagcgcgggatagtacgttttttcgtttgcgcggcgttcgttcggtcggttatttgcgtttcgtcgtcgtcgtttttcgcgttcgtagtttcgaagtgtacgatcgttttcgggggttgagtttcgtcggtttatttaatcggcgggggcgggggcgggcgtttgggttgagcggattcgttttaggcgaggcgtgcggggcggggtttcggttattatttttcgtgcgggcggggcggggcgagggtaggtgcgcgcgtattttaggttagtttttgtttttcgggtatttgcgttggaggtcggttcgtcggttgtttgttatattcgttgtcgttgttttgtatttttaatttcggcgggtacgggtgtagtttcgcgtagtgttttcgtatttttatcgtcggttcggtttcgtttttattgttcggttttttcgtttgtttcggcggtttcgcgcgttcgcggagggttttattttcgtcggtagcgtggttacgttttttttgggttgtttttcggtttttgggcggggttttttgtcgcgttattttttcgggaattttcgtttgttcgcgggttaagtcggttttattgggtagtttttttttgatttttttttcggagagggcggggcggtcgagcgtttcgaggttagacgtcgtcgttcgagagacgagggggcgtgtaggcggtgacgttttgtaaagtggtcggcgtgtttattattatcgagttttcgcgggtttgtagagtttggcggatttagattttttttcggagcgggatgcggttttatcgcggttttatatttttcgtcggtttttcgagttttcgggggcggggtttgtgtttttattttcggattttatagttatgatatcggaagtcggaagcgtggtagggaagggcgatcgcgaaattgggattttttcggagcgtcggggttttattagcgtttatagttcgtcgtttttattttttttacgtttgacggattttgttgataggtgtggtttttttttttaaagatagggttttattcgtgggcgtttcgtcgttttcgaaatttttttcggacgt

SEQ ID NO: 19700 - DNA, 1187 bp, Artificial Sequence
  chemically treated genomic DNA (Homo sapiens) CpG-island No: 19700
acgtccgaaaaaaatttcgaaaacgacgaaacgcccacgaataaaaccctatctttaaaaaaaaaaaccacacctatcaacaaaatccgtcaaacgtaaaaaaaataaaaacgacgaactataaacgctaataaaaccccgacgctccgaaaaaatcccaatttcgcgatcgcccttccctaccacgcttccgacttccgatatcataactataaaatccgaaaataaaaacacaaaccccgcccccgaaaactcgaaaaaccgacgaaaaatataaaaccgcgataaaaccgcatcccgctccgaaaaaaaatctaaatccgccaaactctacaaacccgcgaaaactcgataataataaacacgccgaccactttacaaaacgtcaccgcctacacgccccctcgtctctcgaacgacgacgtctaacctcgaaacgctcgaccgccccgccctctccgaaaaaaaaatcaaaaaaaaactacccaataaaaccgacttaacccgcgaacaaacgaaaattcccgaaaaaataacgcgacaaaaaaccccgcccaaaaaccgaaaaacaacccaaaaaaaacgtaaccacgctaccgacgaaaataaaaccctccgcgaacgcgcgaaaccgccgaaacaaacgaaaaaaccgaacaataaaaacgaaaccgaaccgacgataaaaatacgaaaacactacgcgaaactacacccgtacccgccgaaattaaaaatacaaaacaacgacaacgaatataacaaacaaccgacgaaccgacctccaacgcaaatacccgaaaaacaaaaactaacctaaaatacgcgcgcacctaccctcgccccgccccgcccgcacgaaaaataataaccgaaaccccgccccgcacgcctcgcctaaaacgaatccgctcaacccaaacgcccgcccccgcccccgccgattaaataaaccgacgaaactcaacccccgaaaacgatcgtacacttcgaaactacgaacgcgaaaaacgacgacgacgaaacgcaaataaccgaccgaacgaacgccgcgcaaacgaaaaaacgtactatcccgcgctacgccgcgcgacgataaaatacacgctatttattatacttaaaaaccgaacaaaatcgaaaaaatcttaaccaatccctttataccccgcacctcctctcttaaa

SEQ ID NO: 19701 - DNA, 592 bp, Artificial Sequence
  chemically treated genomic DNA (Homo sapiens) CpG-island No: 19701
gatttttcggagattttttcgagattttcgagattcgtcgagatttgtcgggatttcgagattttttcgagattttcgagattcgtcgagaatttttagatagttaaggttcgtcgagttttttttagacgcggagatcgttttttcgcgagattttcgagattcgtcgagattcgtcgtcgaggtttattcgtcgagcgtttttttggttcgcgggttttgggtcgaggcggcggtttgattcggtcgttaggcgttttcgttcgcgggattcgtcgtcgtcgtagtttcgtttcgttcgcgttcgtttagttcgttttttttttggtttcgtttcggtttcgttttttttcggcgggtttcgtaattttggaggttcgagttgggcgtggggcggggtcggtattttagggtgggcggggaattgtacgtggttttcgcggtttcgggacgaggtttttggggggcgaagattggcgttgtcgcgggtttagacgtcgggtttatagtaggtgtttagttttcgttcgtgagtgaggtagcgtgtttgttttttttgcgtgttttttttagtgatattttagtgtttagt

SEQ ID NO: 19702 - DNA, 592 bp, Artificial Sequence
  chemically treated genomic DNA (Homo sapiens) CpG-island No: 19702
actaaacactaaaatatcactaaaaaaaacacgcaaaaaaaacaaacacgctacctcactcacgaacgaaaactaaacacctactataaacccgacgtctaaacccgcgacaacgccaatcttcgccccccaaaaacctcgtcccgaaaccgcgaaaaccacgtacaattccccgcccaccctaaaataccgaccccgccccacgcccaactcgaacctccaaaattacgaaacccgccgaaaaaaaacgaaaccgaaacgaaaccaaaaaaaaaacgaactaaacgaacgcgaacgaaacgaaactacgacgacgacgaatcccgcgaacgaaaacgcctaacgaccgaatcaaaccgccgcctcgacccaaaacccgcgaaccaaaaaaacgctcgacgaataaacctcgacgacgaatctcgacgaatctcgaaaatctcgcgaaaaaacgatctccgcgtctaaaaaaaactcgacgaaccttaactatctaaaaattctcgacgaatctcgaaaatctcgaaaaaatctcgaaatcccgacaaatctcgacgaatctcgaaaatctcgaaaaaatctccgaaaaatc

SEQ ID NO: 19703 - DNA, 592 bp, Artificial Sequence
  chemically treated genomic DNA (Homo sapiens) CpG-island No: 19703
gttgggtattggggtgttattgggagggatacgtaggagggatagatacgttattttatttacgggcgagaattaagtatttattgtggattcggcgtttaggttcgcgataacgttagttttcgttttttaggggtttcgtttcggggtcgcggaggttacgtgtagtttttcgtttattttgaggtatcggtttcgttttacgtttagttcggatttttaggattgcgggattcgtcggggaggggcggggtcggggcggggttaggaggagggcggattgggcgggcgcgggcgggacggagttgcggcggcggcgggtttcgcgggcgggagcgtttggcggtcgagttaagtcgtcgtttcgatttagggttcgcgggttaggagagcgttcggcgggtaagtttcggcggcgggtttcggcgggtttcgggggtttcgcgggggggcggttttcgcgtttggaaggggttcggcgggttttggttgtttgggggttttcggcgggtttcgggggtttcgggggagtttcggggtttcgataggtttcggcgggtttcgggggtttcgggggagttttcggggagtt

SEQ ID NO: 19704 - DNA, 592 bp, Artificial Sequence
  chemically treated genomic DNA (Homo sapiens) CpG-island No: 19704
aactccccgaaaactcccccgaaacccccgaaacccgccgaaacctatcgaaaccccgaaactcccccgaaacccccgaaacccgccgaaaacccccaaacaaccaaaacccgccgaaccccttccaaacgcgaaaaccgcccccccgcgaaacccccgaaacccgccgaaacccgccgccgaaacttacccgccgaacgctctcctaacccgcgaaccctaaatcgaaacgacgacttaactcgaccgccaaacgctcccgcccgcgaaacccgccgccgccgcaactccgtcccgcccgcgcccgcccaatccgccctcctcctaaccccgccccgaccccgcccctccccgacgaatcccgcaatcctaaaaatccgaactaaacgtaaaacgaaaccgatacctcaaaataaacgaaaaactacacgtaacctccgcgaccccgaaacgaaacccctaaaaaacgaaaactaacgttatcgcgaacctaaacgccgaatccacaataaatacttaattctcgcccgtaaataaaataacgtatctatccctcctacgtatccctcccaataacaccccaatacccaac

SEQ ID NO: 19705 - DNA, 816 bp, Artificial Sequence
  chemically treated genomic DNA (Homo sapiens) CpG-island No: 19705
tttcgggcgaagagtttcgtttttcggagttgttttttaggtcgattcggcgtattttttttgttttttgtttcgttacgtgatgtagtttcgttaatcggtacggggaggcgggtagcgggcggtggtcgggggcgggtaggtcgtggggggcggattttagagggggcggagtagggttcggtagtcgagtagtttggtaacggcggtggcgttcggagttcgaggtgggtgcgcgtttacggttggtttggttcggagtcgggtattgcggggattcgtggtgaggggatcgggaggaggaagttgggattttttgggttagcgggtcgcgcggggttttgtcgtatcgttagggttgggtgggggtttcgtttaagcgtcgtcgttgttttcgcggggtagggttgaggttagggagtagtaggtaggtattttcggttttttttcgtttttttcgtttaaggtggtcggtcggcggcgggcgaaggtcgggacgggggtaggggttggttggtcgtggagttgggggcggacgttttagttattgtttggattttgttttttcgtttcggggcggtgagtgggtcgggcgttcgttttgttttttcggcgacgtttcgcggttggttttcgttttggtttttcgtacggagcgggcgttcgtcgtattttcggtgggttttgcggagcggtcgtagttcggtattggtcgcgaagtttcgatggtcgttttcggttagtgtttttgtgttatatacgagaggtttatttgtttttgtaatagttgagggaagattttagagggaacggtta

SEQ ID NO: 19706 - DNA, 816 bp, Artificial Sequence
  chemically treated genomic DNA (Homo sapiens) CpG-island No: 19706
taaccgttccctctaaaatcttccctcaactattacaaaaacaaataaacctctcgtatataacacaaaaacactaaccgaaaacgaccatcgaaacttcgcgaccaataccgaactacgaccgctccgcaaaacccaccgaaaatacgacgaacgcccgctccgtacgaaaaaccaaaacgaaaaccaaccgcgaaacgtcgccgaaaaaacaaaacgaacgcccgacccactcaccgccccgaaacgaaaaaacaaaatccaaacaataactaaaacgtccgcccccaactccacgaccaaccaacccctacccccgtcccgaccttcgcccgccgccgaccgaccaccttaaacgaaaaaaacgaaaaaaaaccgaaaatacctacctactactccctaacctcaaccctaccccgcgaaaacaacgacgacgcttaaacgaaacccccacccaaccctaacgatacgacaaaaccccgcgcgacccgctaacccaaaaaatcccaacttcctcctcccgatcccctcaccacgaatccccgcaatacccgactccgaaccaaaccaaccgtaaacgcgcacccacctcgaactccgaacgccaccgccgttaccaaactactcgactaccgaaccctactccgccccctctaaaatccgccccccacgacctacccgcccccgaccaccgcccgctacccgcctccccgtaccgattaacgaaactacatcacgtaacgaaacaaaaaacaaaaaaaatacgccgaatcgacctaaaaaacaactccgaaaaacgaaactcttcgcccgaaa

SEQ ID NO: 19707 - DNA, 816 bp, Artificial Sequence
  chemically treated genomic DNA (Homo sapiens) CpG-island No: 19707
taatcgttttttttaagatttttttttaattgttgtaaaagtagataaatttttcgtgtatgatatagaaatattggtcgagagcggttatcgaggtttcgcggttagtgtcgggttgcggtcgtttcgtagggtttatcggggatgcgacggacgttcgtttcgtgcggagggttaaggcgaggattagtcgcggagcgtcgtcggggaggtagggcggacgttcggtttatttatcgtttcgggacggggaagtaaagtttaggtagtggttgagacgttcgtttttagttttacggttagttaatttttattttcgtttcgattttcgttcgtcgtcggtcggttattttgggcggggagaacgggaggaagtcggaggtatttgtttgttgttttttggttttagttttgtttcgcggggatagcgacggcgtttggacgaaatttttatttaattttgacggtgcggtaaggtttcgcgcgattcgttggtttaaggagttttaatttttttttttcgatttttttattacgggttttcgtagtgttcggtttcgagttaggttagtcgtgagcgcgtatttatttcgggtttcgggcgttatcgtcgttgttaggttgttcggttgtcgggttttgtttcgttttttttggggttcgttttttacggtttgttcgttttcggttatcgttcgttgttcgttttttcgtgtcggttggcgggattgtattacgtgacggggtagggggtaggaagagtgcgtcgggtcgatttggggagtagtttcgaagggcggggtttttcgttcgaga

SEQ ID NO: 19708 - DNA, 816 bp, Artificial Sequence
  chemically treated genomic DNA (Homo sapiens) CpG-island No: 19708
tctcgaacgaaaaaccccgcccttcgaaactactccccaaatcgacccgacgcactcttcctaccccctaccccgtcacgtaatacaatcccgccaaccgacacgaaaaaacgaacaacgaacgataaccgaaaacgaacaaaccgtaaaaaacgaaccccaaaaaaaacgaaacaaaacccgacaaccgaacaacctaacaacgacgataacgcccgaaacccgaaataaatacgcgctcacgactaacctaactcgaaaccgaacactacgaaaacccgtaataaaaaaatcgaaaaaaaaaaattaaaactccttaaaccaacgaatcgcgcgaaaccttaccgcaccgtcaaaattaaataaaaatttcgtccaaacgccgtcgctatccccgcgaaacaaaactaaaaccaaaaaacaacaaacaaatacctccgacttcctcccgttctccccgcccaaaataaccgaccgacgacgaacgaaaatcgaaacgaaaataaaaattaactaaccgtaaaactaaaaacgaacgtctcaaccactacctaaactttacttccccgtcccgaaacgataaataaaccgaacgtccgccctacctccccgacgacgctccgcgactaatcctcgccttaaccctccgcacgaaacgaacgtccgtcgcatccccgataaaccctacgaaacgaccgcaacccgacactaaccgcgaaacctcgataaccgctctcgaccaatatttctatatcatacacgaaaaatttatctacttttacaacaattaaaaaaaaatcttaaaaaaaacgatta

SEQ ID NO: 19709 - DNA, 991 bp, Artificial Sequence
  chemically treated genomic DNA (Homo sapiens) CpG-island No: 19709
tcgcggttgaggcgattttaggtcgttgtagtgcgtttggagttcgggtttcggaaggtagtttttgttttaataaagcggtcgttcgtggagttcgacgagggaatttttttagcgttttcgggcgtatttcgttcgcgggattttttgttcggcgtcgttttcgcgggtttcgttaagggttcgggcgggttttatagcgcggggttttaggaggtcgcgtattcgttcggtcggaggttttataggttcgcgtttcgcgtcgttcgatttcgttttcgtttcgtttcgtttcgcgtcgggttcgggattaggagtttgagttaggtcggcgaataaaaggtagggcgggcgggcggcgatttcgaggggacgggcgtcgcgtagggttggtcgggatcggtcgggaggcggagggcgcgggcgcgcgtttcggagacgaaagaaagagcggaggcggcgcgttttgttttcgtttcggttcggtttcgtatatttatcgggtcgcgtcgttcgttttcgtttcgggcgtttcggttcgcgttatcgttcgcgcgcgtaacggtcgtttcggtagttatcgtttttcggggtcgaggcgagggcggggtcgaggtcggaggaggggcggggacggagaggggcggggcgaatttggtgaggcggggttaagggggtggggttggggcggggcgatgcgggggcggggtacggggcggggcgagggttttcgcgtcgggatagcgtggtaacgggattgttagggaagtagggatgagaagaagcgagggacggggtttttacggtcgggggcgggattttcgttgggggcgcggcggcgttggtgcgtacggtgtgtattcgtattggttcggttttggtgttgggagcgattgcgttttcgtaagttggttttttttgttttcgttggttcgggatattttgcgaagggtaggtcggtgtggtcgggaggagtcgtttttgtttgggt

SEQ ID NO: 19710 - DNA, 991 bp, Artificial Sequence
  chemically treated genomic DNA (Homo sapiens) CpG-island No: 19710
acccaaacaaaaacgactcctcccgaccacaccgacctacccttcgcaaaatatcccgaaccaacgaaaacaaaaaaaaccaacttacgaaaacgcaatcgctcccaacaccaaaaccgaaccaatacgaatacacaccgtacgcaccaacgccgccgcgcccccaacgaaaatcccgcccccgaccgtaaaaaccccgtccctcgcttcttctcatccctacttccctaacaatcccgttaccacgctatcccgacgcgaaaaccctcgccccgccccgtaccccgcccccgcatcgccccgccccaaccccacccccttaaccccgcctcaccaaattcgccccgcccctctccgtccccgcccctcctccgacctcgaccccgccctcgcctcgaccccgaaaaacgataactaccgaaacgaccgttacgcgcgcgaacgataacgcgaaccgaaacgcccgaaacgaaaacgaacgacgcgacccgataaatatacgaaaccgaaccgaaacgaaaacaaaacgcgccgcctccgctctttctttcgtctccgaaacgcgcgcccgcgccctccgcctcccgaccgatcccgaccaaccctacgcgacgcccgtcccctcgaaatcgccgcccgcccgccctaccttttattcgccgacctaactcaaactcctaatcccgaacccgacgcgaaacgaaacgaaacgaaaacgaaatcgaacgacgcgaaacgcgaacctataaaacctccgaccgaacgaatacgcgacctcctaaaaccccgcgctataaaacccgcccgaacccttaacgaaacccgcgaaaacgacgccgaacaaaaaatcccgcgaacgaaatacgcccgaaaacgctaaaaaaattccctcgtcgaactccacgaacgaccgctttattaaaacaaaaactaccttccgaaacccgaactccaaacgcactacaacgacctaaaatcgcctcaaccgcga

SEQ ID NO: 19711 - DNA, 991 bp, Artificial Sequence
  chemically treated genomic DNA (Homo sapiens) CpG-island No: 19711
gtttaggtaggggcggtttttttcggttatatcgatttgtttttcgtagggtgtttcgggttagcggaggtagagaaaattagtttgcgggaacgtagtcgtttttagtattagggtcgggttagtgcgggtatatatcgtgcgtattagcgtcgtcgcgtttttaacggaagtttcgttttcggtcgtggaggtttcgtttttcgtttttttttatttttgtttttttggtagtttcgttattacgttgtttcgacgcgaaggttttcgtttcgtttcgtgtttcgttttcgtatcgtttcgttttaattttatttttttggtttcgttttattaggttcgtttcgttttttttcgttttcgtttttttttcggtttcggtttcgttttcgtttcgatttcggggggcggtggttgtcgaggcgatcgttgcgcgcgcgggcggtggcgcgggtcgaagcgttcggagcgggagcgagcggcgcggttcggtaggtgtgcggggtcgggtcggggcgggggtagggcgcgtcgttttcgttttttttttcgttttcggggcgcgcgttcgcgtttttcgtttttcggtcgatttcggttagttttgcgcggcgttcgttttttcggggtcgtcgttcgttcgttttgttttttgttcgtcggtttgatttaggtttttggtttcgggttcggcgcggggcggggcggggcgggggcggggtcgggcggcgcggggcgcgggtttgtggggttttcggtcgggcgggtgcgcggttttttggggtttcgcgttgtgaggttcgttcgggtttttggcgggattcgcgggggcggcgtcgggtagggggtttcgcgggcgagatgcgttcgggagcgttgggagggttttttcgtcggattttacgagcggtcgttttgttagggtagaagttgtttttcgagattcgaattttagacgtattgtagcgatttggggtcgttttagtcgcgg

SEQ ID NO: 19712 - DNA, 991 bp, Artificial Sequence
  chemically treated genomic DNA (Homo sapiens) CpG-island No: 19712
ccgcgactaaaacgaccccaaatcgctacaatacgtctaaaattcgaatctcgaaaaacaacttctaccctaacaaaacgaccgctcgtaaaatccgacgaaaaaaccctcccaacgctcccgaacgcatctcgcccgcgaaaccccctacccgacgccgcccccgcgaatcccgccaaaaacccgaacgaacctcacaacgcgaaaccccaaaaaaccgcgcacccgcccgaccgaaaaccccacaaacccgcgccccgcgccgcccgaccccgcccccgccccgccccgccccgcgccgaacccgaaaccaaaaacctaaatcaaaccgacgaacaaaaaacaaaacgaacgaacgacgaccccgaaaaaacgaacgccgcgcaaaactaaccgaaatcgaccgaaaaacgaaaaacgcgaacgcgcgccccgaaaacgaaaaaaaaaacgaaaacgacgcgccctacccccgccccgacccgaccccgcacacctaccgaaccgcgccgctcgctcccgctccgaacgcttcgacccgcgccaccgcccgcgcgcgcaacgatcgcctcgacaaccaccgccccccgaaatcgaaacgaaaacgaaaccgaaaccgaaaaaaaaacgaaaacgaaaaaaaacgaaacgaacctaataaaacgaaaccaaaaaaataaaattaaaacgaaacgatacgaaaacgaaacacgaaacgaaacgaaaaccttcgcgtcgaaacaacgtaataacgaaactaccaaaaaaacaaaaataaaaaaaaacgaaaaacgaaacctccacgaccgaaaacgaaacttccgttaaaaacgcgacgacgctaatacgcacgatatatacccgcactaacccgaccctaatactaaaaacgactacgttcccgcaaactaattttctctacctccgctaacccgaaacaccctacgaaaaacaaatcgatataaccgaaaaaaaccgcccctacctaaac

SEQ ID NO: 19713 - DNA, 512 bp, Artificial Sequence
  chemically treated genomic DNA (Homo sapiens) CpG-island No: 19713
tcgggggcggcgtgagttttcgcggcgaagttacggggatagttaggaaaggtcgtttttttcgggtttcgggacgttcgcgaaggcggcgcggtgattgcggcgtttagcgggtttgtttttttcggagcgcgggtagtagcgagggcgggatcggaggtatcgttggtacgagaggaggagttgttcggtttcggtttgcgtttttggttttgttttagtcgtcgtttttattttttaggtcggagtttttttttcgtttttttcgtgtttttttttttcggcgttgggtttttttgtttttttttttttgttttttttttattttttttcgtcgcgtttttttttcgagacgtattcgtcgttgttgtttacgttttagttttgtcgttcgtttagggattcggtttttttcgggtttgttttttttttgttatttgttttgatgggtttaaaacgtttttttttcgttttcgttatcgttttatggttttttggtagttttttattat

SEQ ID NO: 19714 - DNA, 512 bp, Artificial Sequence
  chemically treated genomic DNA (Homo sapiens) CpG-island No: 19714
ataataaaaaactaccaaaaaaccataaaacgataacgaaaacgaaaaaaaaacgttttaaacccatcaaaacaaataacaaaaaaaaaacaaacccgaaaaaaaccgaatccctaaacgaacgacaaaactaaaacgtaaacaacaacgacgaatacgtctcgaaaaaaaaacgcgacgaaaaaaaataaaaaaaaaacaaaaaaaaaaaaacaaaaaaacccaacgccgaaaaaaaaaaacacgaaaaaaacgaaaaaaaaactccgacctaaaaaataaaaacgacgactaaaacaaaaccaaaaacgcaaaccgaaaccgaacaactcctcctctcgtaccaacgatacctccgatcccgccctcgctactacccgcgctccgaaaaaaacaaacccgctaaacgccgcaatcaccgcgccgccttcgcgaacgtcccgaaacccgaaaaaaacgacctttcctaactatccccgtaacttcgccgcgaaaactcacgccgcccccga

SEQ ID NO: 19715 - DNA, 512 bp, Artificial Sequence
  chemically treated genomic DNA (Homo sapiens) CpG-island No: 19715
atgatggagagttgttaagaaattatggggcggtggcggggacggaggggaagcgttttgagtttattaaggtaggtgataggaaagaagtaaattcgagaggggtcgagtttttgggcgggcggtagggttggagcgtgaatagtagcgacggatgcgtttcgagggaaaaacgcggcgggagagaatgaggggaaggtaggaaggaaggggtagggagatttagcgtcggggaaggaagatacgaagagggcgaggaaggaatttcggtttaaagggtgaaggcggcggttgggatagggttagaggcgtaggtcggggtcgggtagttttttttttcgtgttagcggtgttttcggtttcgttttcgttgttgttcgcgtttcgggaggggtagattcgttggacgtcgtagttatcgcgtcgttttcgcgggcgtttcggggttcggagggaacggttttttttggttgttttcgtggtttcgtcgcgggaatttacgtcgttttcga

SEQ ID NO: 19716 - DNA, 512 bp, Artificial Sequence
  chemically treated genomic DNA (Homo sapiens) CpG-island No: 19716
tcgaaaacgacgtaaattcccgcgacgaaaccacgaaaacaaccaaaaaaaaccgttccctccgaaccccgaaacgcccgcgaaaacgacgcgataactacgacgtccaacgaatctacccctcccgaaacgcgaacaacaacgaaaacgaaaccgaaaacaccgctaacacgaaaaaaaaaactacccgaccccgacctacgcctctaaccctatcccaaccgccgccttcaccctttaaaccgaaattccttcctcgccctcttcgtatcttccttccccgacgctaaatctccctaccccttccttcctaccttcccctcattctctcccgccgcgtttttccctcgaaacgcatccgtcgctactattcacgctccaaccctaccgcccgcccaaaaactcgacccctctcgaatttacttctttcctatcacctaccttaataaactcaaaacgcttcccctccgtccccgccaccgccccataatttcttaacaactctccatcat

SEQ ID NO: 19717 - DNA, 548 bp, Artificial Sequence
  chemically treated genomic DNA (Homo sapiens) CpG-island No: 19717
ttcgcgtagagtacgcgagagttttggaaattaatttatatagagtacgcgagagtttcgtatattcgcgtagagtacgcgagagttttggaaatcgatttatagagtacgtgagagtttcggaaattcgcgtagagtacgcgagagtttcggaaattaatttatatagagtatgcgagagtttcgtatattcgcgtagagtacgcgagagttttggaaatcgatttacgtcgagtaagcgagagtttcggaaacggattaacgcggagtaagtgagagtttcggaaatcgattaacgtagagtacgcgggagttttaggaaatcgatttgcgtagagtacgttagagttttcgaaattcgcgtagagtacgcggtagttttggaaatcgattcgcgtagagtacgcgagagtttcggaaatcgattaacgcggagtacgcgagagtttcggaaatcgattcgtacgaagtacgcgggagttatcgttttattttacgtattatttatttgttgggcgtttttagagttttaaaaatttaagaaagaa

SEQ ID NO: 19718 - DNA, 548 bp, Artificial Sequence
  chemically treated genomic DNA (Homo sapiens) CpG-island No: 19718
ttctttcttaaatttttaaaactctaaaaacgcccaacaaataaataatacgtaaaataaaacgataactcccgcgtacttcgtacgaatcgatttccgaaactctcgcgtactccgcgttaatcgatttccgaaactctcgcgtactctacgcgaatcgatttccaaaactaccgcgtactctacgcgaatttcgaaaactctaacgtactctacgcaaatcgatttcctaaaactcccgcgtactctacgttaatcgatttccgaaactctcacttactccgcgttaatccgtttccgaaactctcgcttactcgacgtaaatcgatttccaaaactctcgcgtactctacgcgaatatacgaaactctcgcatactctatataaattaatttccgaaactctcgcgtactctacgcgaatttccgaaactctcacgtactctataaatcgatttccaaaactctcgcgtactctacgcgaatatacgaaactctcgcgtactctatataaattaatttccaaaactctcgcgtactctacgcgaa

SEQ ID NO: 19719 - DNA, 548 bp, Artificial Sequence
  chemically treated genomic DNA (Homo sapiens) CpG-island No: 19719
tttttttttgggtttttagaattttgaagacgtttagtaagtgggtggtgcgtggaatgaagcggtggttttcgcgtgtttcgtgcgggtcggttttcggggttttcgcgtgtttcgcgttggtcggttttcggggttttcgcgtgttttgcgcgggtcggtttttaggattatcgcgtgttttgcgcgggtttcggggattttggcgtgttttgcgtaggtcggttttttgggattttcgcgtgttttgcgttggtcgattttcggggtttttatttgtttcgcgttggttcgttttcggggttttcgtttgttcggcgtgggtcggtttttaggattttcgcgtgttttgcgcgggtgtgcggggttttcgtatgttttgtgtgggttggttttcgggattttcgcgtgttttgcgcgggttttcggggtttttacgtgttttgtgagtcggtttttaggattttcgcgtgttttgcgcgggtgtgcggggttttcgcgtgttttgtgtgggttggtttttaggattttcgcgtgttttgcgcggg

SEQ ID NO: 19720 - DNA, 548 bp, Artificial Sequence
  chemically treated genomic DNA (Homo sapiens) CpG-island No: 19720
cccgcgcaaaacacgcgaaaatcctaaaaaccaacccacacaaaacacgcgaaaaccccgcacacccgcgcaaaacacgcgaaaatcctaaaaaccgactcacaaaacacgtaaaaaccccgaaaacccgcgcaaaacacgcgaaaatcccgaaaaccaacccacacaaaacatacgaaaaccccgcacacccgcgcaaaacacgcgaaaatcctaaaaaccgacccacgccgaacaaacgaaaaccccgaaaacgaaccaacgcgaaacaaataaaaaccccgaaaatcgaccaacgcaaaacacgcgaaaatcccaaaaaaccgacctacgcaaaacacgccaaaatccccgaaacccgcgcaaaacacgcgataatcctaaaaaccgacccgcgcaaaacacgcgaaaaccccgaaaaccgaccaacgcgaaacacgcgaaaaccccgaaaaccgacccgcacgaaacacgcgaaaaccaccgcttcattccacgcaccacccacttactaaacgtcttcaaaattctaaaaacccaaaaaaaaa

SEQ ID NO: 19721 - DNA, 545 bp, Artificial Sequence
  chemically treated genomic DNA (Homo sapiens) CpG-island No: 19721
gttggtcggggtacgggttgcgggacggggaggggttgggcggggcgttcgcgttcgttttttgtttgaggtttggtttggggtcgcgggtttatatcgttttttcgtggatattcgtcgcgagggttcgcgtcgttcggaggttgggtttgagtttacgggaaatgaatacggattttataagattcgagtttttattattgggttattagacggttttgggcgcgtgttcggggtttattttgaatatgcgttgatggggtcgttgggtacggtggcggtgtggtcgtaagatttcgcggggtcgcgtttattcggagggttttatattagtttttttttcgcgtttaggttttggtttttttcgttgtattttcgttgttcgtagttttgagcgcgtttcgttttcgttggcgggatagtagcgttttgttaaggtcgcggcgtcgtatagttcgaatatttttttacgaaattttagagattttttttgtattcgttgtgtttttcggtttgttagtagtttatggttattttagggtttt

SEQ ID NO: 19722 - DNA, 545 bp, Artificial Sequence
  chemically treated genomic DNA (Homo sapiens) CpG-island No: 19722
aaaaccctaaaataaccataaactactaacaaaccgaaaaacacaacgaatacaaaaaaaatctctaaaatttcgtaaaaaaatattcgaactatacgacgccgcgaccttaacaaaacgctactatcccgccaacgaaaacgaaacgcgctcaaaactacgaacaacgaaaatacaacgaaaaaaaccaaaacctaaacgcgaaaaaaaaactaatataaaaccctccgaataaacgcgaccccgcgaaatcttacgaccacaccgccaccgtacccaacgaccccatcaacgcatattcaaaataaaccccgaacacgcgcccaaaaccgtctaataacccaataataaaaactcgaatcttataaaatccgtattcatttcccgtaaactcaaacccaacctccgaacgacgcgaaccctcgcgacgaatatccacgaaaaaacgatataaacccgcgaccccaaaccaaacctcaaacaaaaaacgaacgcgaacgccccgcccaacccctccccgtcccgcaacccgtaccccgaccaac

SEQ ID NO: 19723 - DNA, 545 bp, Artificial Sequence
  chemically treated genomic DNA (Homo sapiens) CpG-island No: 19723
gggattttgaggtaattatgagttattggtaggtcgggggatatagcgggtatagaaggggtttttggagtttcgtgaggaagtattcgggttgtgcggcgtcgcgattttggtaggacgttgttgtttcgttagcggaagcggggcgcgtttagggttgcgggtagcgggggtgtagcggggagagttagggtttgggcgcggaggaggggttggtatgggatttttcgggtgggcgcggtttcgcggggttttgcggttatatcgttatcgtgtttagcggttttattagcgtatatttaggatgaatttcggatacgcgtttagaatcgtttggtgatttagtgatgaaagttcgaattttataggattcgtatttatttttcgtgggtttaagtttagttttcgggcggcgcgggttttcgcggcgagtgtttacgaggaggcggtgtggattcgcggttttagattaggttttaggtagaaggcgagcgcgagcgtttcgtttagttttttttcgtttcgtaattcgtgtttcgattagt

SEQ ID NO: 19724 - DNA, 545 bp, Artificial Sequence
  chemically treated genomic DNA (Homo sapiens) CpG-island No: 19724
actaatcgaaacacgaattacgaaacgaaaaaaaactaaacgaaacgctcgcgctcgccttctacctaaaacctaatctaaaaccgcgaatccacaccgcctcctcgtaaacactcgccgcgaaaacccgcgccgcccgaaaactaaacttaaacccacgaaaaataaatacgaatcctataaaattcgaactttcatcactaaatcaccaaacgattctaaacgcgtatccgaaattcatcctaaatatacgctaataaaaccgctaaacacgataacgatataaccgcaaaaccccgcgaaaccgcgcccacccgaaaaatcccataccaacccctcctccgcgcccaaaccctaactctccccgctacacccccgctacccgcaaccctaaacgcgccccgcttccgctaacgaaacaacaacgtcctaccaaaatcgcgacgccgcacaacccgaatacttcctcacgaaactccaaaaaccccttctatacccgctatatcccccgacctaccaataactcataattacctcaaaatccc

SEQ ID NO: 19725 - DNA, 641 bp, Artificial Sequence
  chemically treated genomic DNA (Homo sapiens) CpG-island No: 19725
ggtggggtcgggcgagaaggggttgggcgggttgtcgtcgggcggggttgcgcggggaagggcggcgttgcgcggggggcggggttgcgtgggggagggcggggtcgggttgttgtgggtgggcggggcgtatcggggaaagtttcgggaagggcggtagtcggcggggttcgggcgcggaagttgtcggcggtcgcgcggtttttcgggcgggtttatagttatgtttcgggattcggggtcgggcggttgggaggaggtttcgcgcgtagttgtcgcgttttgtattttgtattacgaggtcggatagcggttgcgtcgtttgtaggattagttcgttgttcgcgacgtttttatcgttcgttttcgcgttcgtttggtcgcgttggagggggacgtcgcgtcgtttttagtggacgcgttgttggagtaggttgcgcgttttcgggagtagttgcgaaggtaggagggcggcgtcgtcgaggtttagatgcgttaggtacgagggcgggtattagaggagttgcgggagcgagagtgcgtgtggcggtcgtcgggttttgggtgggtgaacgagcgggtttcgggttttgaggggttgagggggtattgggttttggggttgagttggtttcgggttt

SEQ ID NO: 19726 - DNA, 641 bp, Artificial Sequence
  chemically treated genomic DNA (Homo sapiens) CpG-island No: 19726
aaacccgaaaccaactcaaccccaaaacccaataccccctcaacccctcaaaacccgaaacccgctcgttcacccacccaaaacccgacgaccgccacacgcactctcgctcccgcaactcctctaatacccgccctcgtacctaacgcatctaaacctcgacgacgccgccctcctaccttcgcaactactcccgaaaacgcgcaacctactccaacaacgcgtccactaaaaacgacgcgacgtccccctccaacgcgaccaaacgaacgcgaaaacgaacgataaaaacgtcgcgaacaacgaactaatcctacaaacgacgcaaccgctatccgacctcgtaatacaaaatacaaaacgcgacaactacgcgcgaaacctcctcccaaccgcccgaccccgaatcccgaaacataactataaacccgcccgaaaaaccgcgcgaccgccgacaacttccgcgcccgaaccccgccgactaccgcccttcccgaaactttccccgatacgccccgcccacccacaacaacccgaccccgccctcccccacgcaaccccgccccccgcgcaacgccgcccttccccgcgcaaccccgcccgacgacaacccgcccaaccccttctcgcccgaccccacc

SEQ ID NO: 19727 - DNA, 641 bp, Artificial Sequence
  chemically treated genomic DNA (Homo sapiens) CpG-island No: 19727
ggattcgaggttaatttaattttaggatttagtatttttttaattttttaggattcggggttcgttcgtttatttatttaggattcggcggtcgttatacgtattttcgttttcgtagtttttttggtattcgttttcgtatttggcgtatttgggtttcggcggcgtcgtttttttgttttcgtagttgttttcggaagcgcgtaatttgttttagtagcgcgtttattagggacggcgcggcgtttttttttagcgcggttaggcgggcgcggaggcgagcgatgagggcgtcgcgggtagcgagttggttttgtaggcggcgtagtcgttgttcggtttcgtggtatagggtgtagagcgcggtagttgcgcgcggggtttttttttagtcgttcgatttcgggtttcgggatatggttgtaggttcgttcgggaggtcgcgcggtcgtcggtaattttcgcgttcgggtttcgtcggttgtcgtttttttcggaatttttttcggtgcgtttcgtttatttataatagttcggtttcgtttttttttacgtagtttcgtttttcgcgtagcgtcgttttttttcgcgtagtttcgttcgacggtagttcgtttagttttttttcgttcggttttatt

SEQ ID NO: 19728 - DNA, 641 bp, Artificial Sequence
  chemically treated genomic DNA (Homo sapiens) CpG-island No: 19728
aataaaaccgaacgaaaaaaaactaaacgaactaccgtcgaacgaaactacgcgaaaaaaaacgacgctacgcgaaaaacgaaactacgtaaaaaaaaacgaaaccgaactattataaataaacgaaacgcaccgaaaaaaattccgaaaaaaacgacaaccgacgaaacccgaacgcgaaaattaccgacgaccgcgcgacctcccgaacgaacctacaaccatatcccgaaacccgaaatcgaacgactaaaaaaaaaccccgcgcgcaactaccgcgctctacaccctataccacgaaaccgaacaacgactacgccgcctacaaaaccaactcgctacccgcgacgccctcatcgctcgcctccgcgcccgcctaaccgcgctaaaaaaaaacgccgcgccgtccctaataaacgcgctactaaaacaaattacgcgcttccgaaaacaactacgaaaacaaaaaaacgacgccgccgaaacccaaatacgccaaatacgaaaacgaataccaaaaaaactacgaaaacgaaaatacgtataacgaccgccgaatcctaaataaataaacgaacgaaccccgaatcctaaaaaattaaaaaaatactaaatcctaaaattaaattaacctcgaatcc

SEQ ID NO: 19729 - DNA, 568 bp, Artificial Sequence
  chemically treated genomic DNA (Homo sapiens) CpG-island No: 19729
gggcggaggtcgtttttgtcgcggttcggcgtttcgggaaaggttcgaggtataggagagtatcgtttttgggatcggaatcgatgggtagggttatagggttaagcgtttgagatcgcgttttaaaatttagcgtaagttttcgatcgtcggggttcggttgtagtaggttatttcgggggattcggtgtttcgaggcgagaagaaagcgggacgggtaatagcggcggtttacggtgttcgggaagggggtagtggtgggaaacgagagcgcgtcgggtttcgcgtggttttttcgcgtgtttttttttttaaatttttaagattaatcgtgcgtattaggtattcgattatgtttaagtttgttcgtttcgtcgcggtatggattttttttaattttgaaatagggcggcgggtggggtggcggtttcgggtcggtagatagtaatttttgttcgggagggtggtttcgggagaggcgttgggttttcgggaattgcgtcgcggtagttattcgtttgttgttggtgtttacgttttcgcgggggttgtattcgtatacgtcgcg

SEQ ID NO: 19730 - DNA, 568 bp, Artificial Sequence
  chemically treated genomic DNA (Homo sapiens) CpG-island No: 19730
cgcgacgtatacgaatacaacccccgcgaaaacgtaaacaccaacaacaaacgaataactaccgcgacgcaattcccgaaaacccaacgcctctcccgaaaccaccctcccgaacaaaaattactatctaccgacccgaaaccgccaccccacccgccgccctatttcaaaattaaaaaaaatccataccgcgacgaaacgaacaaacttaaacataatcgaatacctaatacgcacgattaatcttaaaaatttaaaaaaaaaaacacgcgaaaaaaccacgcgaaacccgacgcgctctcgtttcccaccactacccccttcccgaacaccgtaaaccgccgctattacccgtcccgctttcttctcgcctcgaaacaccgaatcccccgaaataacctactacaaccgaaccccgacgatcgaaaacttacgctaaattttaaaacgcgatctcaaacgcttaaccctataaccctacccatcgattccgatcccaaaaacgatactctcctatacctcgaacctttcccgaaacgccgaaccgcgacaaaaacgacctccgccc

SEQ ID NO: 19731 - DNA, 568 bp, Artificial Sequence
  chemically treated genomic DNA (Homo sapiens) CpG-island No: 19731
cgcggcgtgtgcgagtgtagttttcgcggggacgtgggtattaatagtaggcgagtgattatcgcggcgtagttttcgaggatttagcgtttttttcgaggttattttttcgggtaggaattattgtttgtcggttcgaagtcgttattttattcgtcgttttgttttaaagttggggagagtttatgtcgcgacggagcgagtagatttggatatggtcgagtgtttggtgcgtacgattggttttaagagtttagggaaaaaagtacgcggggaaattacgcggggttcggcgcgttttcgttttttattattgtttttttttcgggtatcgtgggtcgtcgttgttgttcgtttcgtttttttttcgtttcggagtatcgggtttttcggagtgatttattgtagtcgagtttcggcggtcgggggtttgcgttgggttttgggacgcggttttagacgtttggttttgtggttttatttatcggtttcggttttaagaacggtgtttttttgtgtttcgggtttttttcggggcgtcgggtcgcggtaggagcgattttcgttt

SEQ ID NO: 19732 - DNA, 568 bp, Artificial Sequence
  chemically treated genomic DNA (Homo sapiens) CpG-island No: 19732
aaacgaaaatcgctcctaccgcgacccgacgccccgaaaaaaacccgaaacacaaaaaaacaccgttcttaaaaccgaaaccgataaataaaaccacaaaaccaaacgtctaaaaccgcgtcccaaaacccaacgcaaacccccgaccgccgaaactcgactacaataaatcactccgaaaaacccgatactccgaaacgaaaaaaaaacgaaacgaacaacaacgacgacccacgatacccgaaaaaaaaacaataataaaaaacgaaaacgcgccgaaccccgcgtaatttccccgcgtacttttttccctaaactcttaaaaccaatcgtacgcaccaaacactcgaccatatccaaatctactcgctccgtcgcgacataaactctccccaactttaaaacaaaacgacgaataaaataacgacttcgaaccgacaaacaataattcctacccgaaaaaataacctcgaaaaaaacgctaaatcctcgaaaactacgccgcgataatcactcgcctactattaatacccacgtccccgcgaaaactacactcgcacacgccgcg

SEQ ID NO: 19733 - DNA, 657 bp, Artificial Sequence
  chemically treated genomic DNA (Homo sapiens) CpG-island No: 19733
atcgcgttcggttcgaaggagtttcgtagtggggatggaggagggagtttcgtgtttagttcgttcgcggggagttgttcgtagatcgataagtttcgtgtcggtttgagttttttattcgttcgtcgggacggtttacgttcgtttttgtttttttaagaagcgcgtgggcgattagtagcgttcggggttcgcggtttggtttaggggttcggggtgcggggtttagagtcggaagttcgcggttcgggtttcggggttcgggggtcggggttcggtatttacggcgtttacgcggcgggtatggtcggttttttcggggcgatttacgttcgttttttttgcgagtatcggtacggtttcgggtcgcgtttttcggtcgtcgtcgtttcgtttcgggcgttcgtttttcgtcggttttagtttcgcggcgcggttcggagttcgttatgttcgtcggttttggtttggtagtcgtcggttttttttttttcggcgggggattgggcgggtaggtgaggatttcggcgcgtttttttcggtttcgttttttgtcgcgttatcgtgcgcgggaggtacgtgagttttttgcgggttttagtttttttacgttgtaaggaggttggtgggcgtttgggataggaggtttatatttgt

SEQ ID NO: 19734 - DNA, 657 bp, Artificial Sequence
  chemically treated genomic DNA (Homo sapiens) CpG-island No: 19734
acaaatataaacctcctatcccaaacgcccaccaacctccttacaacgtaaaaaaactaaaacccgcaaaaaactcacgtacctcccgcgcacgataacgcgacaaaaaacgaaaccgaaaaaaacgcgccgaaatcctcacctacccgcccaatcccccgccgaaaaaaaaaaaaccgacgactaccaaaccaaaaccgacgaacataacgaactccgaaccgcgccgcgaaactaaaaccgacgaaaaacgaacgcccgaaacgaaacgacgacgaccgaaaaacgcgacccgaaaccgtaccgatactcgcaaaaaaaacgaacgtaaatcgccccgaaaaaaccgaccatacccgccgcgtaaacgccgtaaataccgaaccccgacccccgaaccccgaaacccgaaccgcgaacttccgactctaaaccccgcaccccgaacccctaaaccaaaccgcgaaccccgaacgctactaatcgcccacgcgcttcttaaaaaaacaaaaacgaacgtaaaccgtcccgacgaacgaataaaaaactcaaaccgacacgaaacttatcgatctacgaacaactccccgcgaacgaactaaacacgaaactccctcctccatccccactacgaaactccttcgaaccgaacgcgat

SEQ ID NO: 19735 - DNA, 657 bp, Artificial Sequence
  chemically treated genomic DNA (Homo sapiens) CpG-island No: 19735
atagatgtgggttttttgttttaagcgtttattaatttttttgtagcgtggggaaattgaggttcgtagggggtttacgtgtttttcgcgtacggtgacgcggtagggggcggggtcgggaggggcgcgtcgggatttttatttgttcgtttagtttttcgtcgagaggggaggagtcggcggttgttaggttagggtcggcgggtatggcgggtttcgggtcgcgtcgcggagttggggtcggcgggaggcgggcgttcgggacgaggcggcggcggtcgggggacgcggttcggggtcgtgtcggtgttcgtaggggaggcgggcgtggatcgtttcggggaagtcggttatgttcgtcgcgtggacgtcgtgagtatcgagtttcggttttcgagtttcgggattcgggtcgcgagttttcggttttggatttcgtatttcgagtttttggattaggtcgcgagtttcgggcgttgttggtcgtttacgcgttttttgggggaataaaggcgggcgtggatcgtttcggcgggcggatgggggatttaggtcggtacggggtttgtcgatttgcgggtagtttttcgcgggcggattgggtacggggtttttttttttatttttattgcggggttttttcgggtcgggcgcggt

SEQ ID NO: 19736 - DNA, 657 bp, Artificial Sequence
  chemically treated genomic DNA (Homo sapiens) CpG-island No: 19736
accgcgcccgacccgaaaaaaccccgcaataaaaataaaaaaaaaaaccccgtacccaatccgcccgcgaaaaactacccgcaaatcgacaaaccccgtaccgacctaaatcccccatccgcccgccgaaacgatccacgcccgcctttattcccccaaaaaacgcgtaaacgaccaacaacgcccgaaactcgcgacctaatccaaaaactcgaaatacgaaatccaaaaccgaaaactcgcgacccgaatcccgaaactcgaaaaccgaaactcgatactcacgacgtccacgcgacgaacataaccgacttccccgaaacgatccacgcccgcctcccctacgaacaccgacacgaccccgaaccgcgtcccccgaccgccgccgcctcgtcccgaacgcccgcctcccgccgaccccaactccgcgacgcgacccgaaacccgccatacccgccgaccctaacctaacaaccgccgactcctcccctctcgacgaaaaactaaacgaacaaataaaaatcccgacgcgcccctcccgaccccgccccctaccgcgtcaccgtacgcgaaaaacacgtaaaccccctacgaacctcaatttccccacgctacaaaaaaattaataaacgcttaaaacaaaaaacccacatctat

SEQ ID NO: 19737 - DNA, 1426 bp, Artificial Sequence
  chemically treated genomic DNA (Homo sapiens) CpG-island No: 19737
attttgcgttcggcggggaggggagtcgtttacggttttacgtaagattttcgggtagagcgcgaggtttcgtttttttacgtagttattgttttcgtcgcgtttagattcggcggttcggttcggttcggcgtacgtttcggagcgttttgtttcgttttcgtagcggagacgtttttgcgttttaacgggtttttaggacggcgggcggttttcgcgcgttgcgttttttttcggtaacgcgttcggttgcggcgtttttattggtcgcgcgtttcgttatcggttattggttcgtagtgtttgttttatataggtcgttttggttaatcggcgcgcggcgtttatttaatatgtacggcggtcgttagttagttagcgcgggggtcgggttattacgtgttgttgttaagttcgggtttttaaattgttattagcgcggtcggtttattttagtttagttttgtatttgttaatattttcggttcggttcgaggcgttcgattcgtttttattggttttagttcggttcggcgttcgttttcggggcgcgaacgtcgttttttattggttttgcgggtcgtcgtttttttttatgtgttaatttgagggtttgaggcggagggtggcggtcgagcgtcggagttcgcggagtttggaagtgcggcggtcgggcgcgcggggtgggcggcgagcggagtcggtcggagcgggtcgggtagcggtcgtcgtcgtttcggggcggacgggcgcgggcgggaggatggagttgaattttttgttgattttgttggaggcggtcgagtatttggagcgtagggatcgaggtagcgttcgtattttattgtgcgttcgcggcggtgggcgggcggcggggcgtgtcgggcgggggtcgttgatcgcgtcgtgtgttcgtagaggtcgagtacggttacgtttcggtgttgtttttcgacggcgatttcgttagggagaaaataaaggcggtcggtttggtgcgtaaggtttcgaataataggtatcgtttttcgttttcgatttcgttcggttcggttcgaattttcgtcgtcgttcggagcgtgtttttcgggtttcgattttcggttcgcggtttttagcgtcgtcgtcgcgcgtttcggcggttagtttggaggaggaggcgcgtaggtcgcggtcgtagtttcgttcggtcggtttcgttttcgtcgtcgttattttttcgcggtcgcgtttttcgggtcgttcgcgtaaatagtgttacgcgtatagcgttcgtcgtcggggttcgttttcgcgttcgtttttcgttttcgagttgttttggatttttttaggcggtagaaaagttgttagcgggcgttggtcggtgtttcgtgggtttggggaaataggtttagttagggtttgcgggggttgtcggttttaa

SEQ ID NO: 19738 - DNA, 1426 bp, Artificial Sequence
  chemically treated genomic DNA (Homo sapiens) CpG-island No: 19738
ttaaaaccgacaacccccgcaaaccctaactaaacctatttccccaaacccacgaaacaccgaccaacgcccgctaacaacttttctaccgcctaaaaaaatccaaaacaactcgaaaacgaaaaacgaacgcgaaaacgaaccccgacgacgaacgctatacgcgtaacactatttacgcgaacgacccgaaaaacgcgaccgcgaaaaaataacgacgacgaaaacgaaaccgaccgaacgaaactacgaccgcgacctacgcgcctcctcctccaaactaaccgccgaaacgcgcgacgacgacgctaaaaaccgcgaaccgaaaatcgaaacccgaaaaacacgctccgaacgacgacgaaaattcgaaccgaaccgaacgaaatcgaaaacgaaaaacgatacctattattcgaaaccttacgcaccaaaccgaccgcctttattttctccctaacgaaatcgccgtcgaaaaacaacaccgaaacgtaaccgtactcgacctctacgaacacacgacgcgatcaacgacccccgcccgacacgccccgccgcccgcccaccgccgcgaacgcacaataaaatacgaacgctacctcgatccctacgctccaaatactcgaccgcctccaacaaaatcaacaaaaaattcaactccatcctcccgcccgcgcccgtccgccccgaaacgacgacgaccgctacccgacccgctccgaccgactccgctcgccgcccaccccgcgcgcccgaccgccgcacttccaaactccgcgaactccgacgctcgaccgccaccctccgcctcaaaccctcaaattaacacataaaaaaaaacgacgacccgcaaaaccaataaaaaacgacgttcgcgccccgaaaacgaacgccgaaccgaactaaaaccaataaaaacgaatcgaacgcctcgaaccgaaccgaaaatattaacaaatacaaaactaaactaaaataaaccgaccgcgctaataacaatttaaaaacccgaacttaacaacaacacgtaataacccgacccccgcgctaactaactaacgaccgccgtacatattaaataaacgccgcgcgccgattaaccaaaacgacctatataaaacaaacactacgaaccaataaccgataacgaaacgcgcgaccaataaaaacgccgcaaccgaacgcgttaccgaaaaaaaacgcaacgcgcgaaaaccgcccgccgtcctaaaaacccgttaaaacgcaaaaacgtctccgctacgaaaacgaaacaaaacgctccgaaacgtacgccgaaccgaaccgaaccgccgaatctaaacgcgacgaaaacaataactacgtaaaaaaacgaaacctcgcgctctacccgaaaatcttacgtaaaaccgtaaacgactcccctccccgccgaacgcaaaat

SEQ ID NO: 19739 - DNA, 1426 bp, Artificial Sequence
  chemically treated genomic DNA (Homo sapiens) CpG-island No: 19739
ttagggtcggtagttttcgtagattttggttgagtttgtttttttagatttacggggtatcggttagcgttcgttgataatttttttatcgtttggaaaagtttagaataattcgggggcggggagcgggcgcgggagcggatttcggcggcgggcgttgtacgcgtggtattgtttacgcgagcggttcgggaggcgcggtcgcgggaagatggcgacggcgagggcggggtcggtcgggcggggttgcggtcgcggtttgcgcgtttttttttttaggttggtcgtcggggcgcgcggcggcggcgttgagggtcgcgggtcgggaatcggggttcggagagtacgtttcgggcggcggcgggggttcggatcgggtcgggcggggtcgggagcggggggcggtatttgttgttcggggttttgcgtattaggtcggtcgtttttgttttttttttggcgaagtcgtcgtcgaagggtagtatcgaggcgtagtcgtgttcggtttttgcggatatacggcgcggttagcggttttcgttcggtacgtttcgtcgttcgtttatcgtcgcgggcgtataatggggtgcgagcgttatttcgatttttgcgttttaggtattcggtcgtttttagtaggattagtagggagtttagttttattttttcgttcgcgttcgttcgtttcgggacggcggcggtcgttgttcggttcgtttcggtcggtttcgttcgtcgtttatttcgcgcgttcggtcgtcgtatttttagatttcgcggatttcggcgttcggtcgttatttttcgttttaggtttttaaattgatatataagggagagcggcggttcgtagagttaatgggaggcggcgttcgcgtttcgggggcgggcgtcgggtcgggttggggttaatggggacgggtcgagcgtttcgggtcgggtcgagaatgttgatagatgtagagttgggttgggataggtcggtcgcgttagtaataatttagaagttcgagtttagtaatagtacgtggtggttcggttttcgcgttagttgattggcggtcgtcgtgtatgttaagtaggcgtcgcgcgtcgattggttagagcggtttatgtaaaataggtattgcgagttaatggtcggtggcggggcgcgcggttaatgagggcgtcgtagtcggacgcgttgtcgagaggaagcgtagcgcgcggggatcgttcgtcgttttgggggttcgttaggacgtaggagcgttttcgttacgagagcgaagtagggcgtttcggggcgtgcgtcgggtcgggtcgggtcgtcgggtttgagcgcgacgaaagtagtggttgcgtggggggacgaggtttcgcgttttgttcgggggttttgcgtggggtcgtgaacgattttttttttcgtcgggcgtagagt

SEQ ID NO: 19740 - DNA, 1426 bp, Artificial Sequence
  chemically treated genomic DNA (Homo sapiens) CpG-island No: 19740
actctacgcccgacgaaaaaaaaaatcgttcacgaccccacgcaaaacccccgaacaaaacgcgaaacctcgtccccccacgcaaccactactttcgtcgcgctcaaacccgacgacccgacccgacccgacgcacgccccgaaacgccctacttcgctctcgtaacgaaaacgctcctacgtcctaacgaacccccaaaacgacgaacgatccccgcgcgctacgcttcctctcgacaacgcgtccgactacgacgccctcattaaccgcgcgccccgccaccgaccattaactcgcaatacctattttacataaaccgctctaaccaatcgacgcgcgacgcctacttaacatacacgacgaccgccaatcaactaacgcgaaaaccgaaccaccacgtactattactaaactcgaacttctaaattattactaacgcgaccgacctatcccaacccaactctacatctatcaacattctcgacccgacccgaaacgctcgacccgtccccattaaccccaacccgacccgacgcccgcccccgaaacgcgaacgccgcctcccattaactctacgaaccgccgctctcccttatatatcaatttaaaaacctaaaacgaaaaataacgaccgaacgccgaaatccgcgaaatctaaaaatacgacgaccgaacgcgcgaaataaacgacgaacgaaaccgaccgaaacgaaccgaacaacgaccgccgccgtcccgaaacgaacgaacgcgaacgaaaaaataaaactaaactccctactaatcctactaaaaacgaccgaatacctaaaacgcaaaaatcgaaataacgctcgcaccccattatacgcccgcgacgataaacgaacgacgaaacgtaccgaacgaaaaccgctaaccgcgccgtatatccgcaaaaaccgaacacgactacgcctcgatactacccttcgacgacgacttcgccaaaaaaaaaacaaaaacgaccgacctaatacgcaaaaccccgaacaacaaataccgccccccgctcccgaccccgcccgacccgatccgaacccccgccgccgcccgaaacgtactctccgaaccccgattcccgacccgcgaccctcaacgccgccgccgcgcgccccgacgaccaacctaaaaaaaaaaacgcgcaaaccgcgaccgcaaccccgcccgaccgaccccgccctcgccgtcgccatcttcccgcgaccgcgcctcccgaaccgctcgcgtaaacaataccacgcgtacaacgcccgccgccgaaatccgctcccgcgcccgctccccgcccccgaattattctaaacttttccaaacgataaaaaaattatcaacgaacgctaaccgataccccgtaaatctaaaaaaacaaactcaaccaaaatctacgaaaactaccgaccctaa

SEQ ID NO: 19741 - DNA, 834 bp, Artificial Sequence
  chemically treated genomic DNA (Homo sapiens) CpG-island No: 19741
tgcggaggtaggggggtcggggtcgaggggggttcggttaaggaagaggaggcgcgtatcgcgggtcgtattttttattggggcggcgggtgtagggggtggttcgtaagcgggtggggcgcgttcggttcggtttaggcggtttttaggcggcgcgcgggttcgggttttgagtttttttgttgtagcgtttgtagtttgcgttcgcggtttcgttttagttttagttagtgttgcgtttttagttgcgtttgtaggtcggggaacgcgtcggcgcgggtagggacgtttttatcgtttttcgcgttcgtcgttgcgtatttttcggtcgcggatcggattcgattttttcgttattttcgtttcgggacgtcggtttttgcgcgtcgcgttcgttatttttattcggtttcggtttttagtcgttcgggttttttttattaattcggatttattcggggtttggggcgcgcggttcgcggcgtcgatacgtgtagtaaggtcgtttgtttgttgcgttcggtcgtttttttcgagattttgcgtcgtagttgttgtacgcgttcgttttgcgagggcgtcgtcggggtcgtcgtaagggtttttttttttttttatttggcgggcgacgcggcgggtttaggagtaggtcggcgggaggtttaggttagatttaggatgttattcgtgtttaagcgacgcgggggtaaggagttacgtagtcggagaggtttatcggaatgatttaggatagatagcgaggtttaggggtcgcggcgcgtttttagatagtattatcgtttaggggttggaggggttgggggagtttttagt

SEQ ID NO: 19742 - DNA, 834 bp, Artificial Sequence
  chemically treated genomic DNA (Homo sapiens) CpG-island No: 19742
actaaaaactcccccaacccctccaacccctaaacgataatactatctaaaaacgcgccgcgacccctaaacctcgctatctatcctaaatcattccgataaacctctccgactacgtaactccttacccccgcgtcgcttaaacacgaataacatcctaaatctaacctaaacctcccgccgacctactcctaaacccgccgcgtcgcccgccaaataaaaaaaaaaaaaaacccttacgacgaccccgacgacgccctcgcaaaacgaacgcgtacaacaactacgacgcaaaatctcgaaaaaaacgaccgaacgcaacaaacaaacgaccttactacacgtatcgacgccgcgaaccgcgcgccccaaaccccgaataaatccgaattaataaaaaaaacccgaacgactaaaaaccgaaaccgaataaaaataacgaacgcgacgcgcaaaaaccgacgtcccgaaacgaaaataacgaaaaaatcgaatccgatccgcgaccgaaaaatacgcaacgacgaacgcgaaaaacgataaaaacgtccctacccgcgccgacgcgttccccgacctacaaacgcaactaaaaacgcaacactaactaaaactaaaacgaaaccgcgaacgcaaactacaaacgctacaacaaaaaaactcaaaacccgaacccgcgcgccgcctaaaaaccgcctaaaccgaaccgaacgcgccccacccgcttacgaaccaccccctacacccgccgccccaataaaaaatacgacccgcgatacgcgcctcctcttccttaaccgaacccccctcgaccccgacccccctacctccgca

SEQ ID NO: 19743 - DNA, 834 bp, Artificial Sequence
  chemically treated genomic DNA (Homo sapiens) CpG-island No: 19743
gttggagatttttttaatttttttagtttttgagcggtggtattgtttaggagcgcgtcgcggtttttgggtttcgttgtttgttttaaattatttcggtgaattttttcggttgcgtagttttttgttttcgcgtcgtttggatacgggtggtattttgggtttggtttgggtttttcgtcggtttgtttttgagttcgtcgcgtcgttcgttaggtgggaggagaagaaggtttttgcggcggtttcggcggcgttttcgtaggacgagcgcgtgtagtagttgcggcgtaggatttcggagagggcggtcgagcgtagtaggtaggcggttttgttgtacgtgtcggcgtcgcggatcgcgcgttttaagtttcgggtgagttcggattggtgggaggagttcgggcgattgaaagtcggggtcgggtggggatggcgggcgcggcgcgtagggatcggcgtttcggggcggggatggcggggagatcgggttcggttcgcggtcgggagatacgtagcggcgggcgcgggaggcggtgggggcgtttttgttcgcgtcgacgcgtttttcggtttgtaggcgtagttagaggcgtagtattggttggagttggagcggagtcgcgagcgtaggttgtaggcgttgtagtagggaggtttaggattcgggttcgcgcgtcgtttggaggtcgtttgagtcgggtcgagcgcgttttattcgtttgcgggttattttttatattcgtcgttttaataaagagtgcggttcgcggtgcgcgtttttttttttttggtcgggtttttttcggtttcggtttttttgttttcgta

SEQ ID NO: 19744 - DNA, 834 bp, Artificial Sequence
  chemically treated genomic DNA (Homo sapiens) CpG-island No: 19744
tacgaaaacaaaaaaaccgaaaccgaaaaaaacccgaccaaaaaaaaaaaaacgcgcaccgcgaaccgcactctttattaaaacgacgaatataaaaaataacccgcaaacgaataaaacgcgctcgacccgactcaaacgacctccaaacgacgcgcgaacccgaatcctaaacctccctactacaacgcctacaacctacgctcgcgactccgctccaactccaaccaatactacgcctctaactacgcctacaaaccgaaaaacgcgtcgacgcgaacaaaaacgcccccaccgcctcccgcgcccgccgctacgtatctcccgaccgcgaaccgaacccgatctccccgccatccccgccccgaaacgccgatccctacgcgccgcgcccgccatccccacccgaccccgactttcaatcgcccgaactcctcccaccaatccgaactcacccgaaacttaaaacgcgcgatccgcgacgccgacacgtacaacaaaaccgcctacctactacgctcgaccgccctctccgaaatcctacgccgcaactactacacgcgctcgtcctacgaaaacgccgccgaaaccgccgcaaaaaccttcttctcctcccacctaacgaacgacgcgacgaactcaaaaacaaaccgacgaaaaacccaaaccaaacccaaaataccacccgtatccaaacgacgcgaaaacaaaaaactacgcaaccgaaaaaattcaccgaaataatttaaaacaaacaacgaaacccaaaaaccgcgacgcgctcctaaacaataccaccgctcaaaaactaaaaaaattaaaaaaatctccaac

SEQ ID NO: 19745 - DNA, 507 bp, Artificial Sequence
  chemically treated genomic DNA (Homo sapiens) CpG-island No: 19745
tttttcgtcgtcgttatagtggagtcgttaaagtcgtcgtcgtcgtcgtcgttatagttatcggtaggcgggtaggtaggggcggaggtggcggaggaggtaggaataattattgtcgtcgtcgtcgtcgtcgtcgtcgttgtcgcgtaggcggtgtaggaggaggaggaggcggtagagacggtagttttttgaggggaagatttcgtcgttagcggggtgattgtgttcggcgtcgtcgttatcgtagcgaggcgcgcggataattgtatttgcgtttcgatttcgttaagtttttttagtttcgtttttcgttagttttattttttttgtttttttttttaacgttttagttcgagtttcgttttcgttttttagtttattaatcggagagttttaagttcgtcggtcgttttttttttttttattgttttgcgttattttatttttttttggaggggaagtaacgacggttaagggtaaagggtaaaaagcgcgggatgtgaa

SEQ ID NO: 19746 - DNA, 507 bp, Artificial Sequence
  chemically treated genomic DNA (Homo sapiens) CpG-island No: 19746
ttcacatcccgcgctttttaccctttacccttaaccgtcgttacttcccctccaaaaaaaaataaaataacgcaaaacaataaaaaaaaaaaaaacgaccgacgaacttaaaactctccgattaataaactaaaaaacgaaaacgaaactcgaactaaaacgttaaaaaaaaaaacaaaaaaaataaaactaacgaaaaacgaaactaaaaaaacttaacgaaatcgaaacgcaaatacaattatccgcgcgcctcgctacgataacgacgacgccgaacacaatcaccccgctaacgacgaaatcttcccctcaaaaaactaccgtctctaccgcctcctcctcctcctacaccgcctacgcgacaacgacgacgacgacgacgacgacgacaataattattcctacctcctccgccacctccgcccctacctacccgcctaccgataactataacgacgacgacgacgacgactttaacgactccactataacgacgacgaaaaa

SEQ ID NO: 19747 - DNA, 507 bp, Artificial Sequence
  chemically treated genomic DNA (Homo sapiens) CpG-island No: 19747
tttatatttcgcgttttttgttttttgtttttggtcgtcgttgttttttttttaaagggaggtggggtgacgtaaggtagtgggggagggggaaacggtcggcgggtttaaagtttttcgattggtggattgaggagcgagaacgaggttcgagttgaagcgttaaaaagaggaataaagggggtggggttaacggaaggcggggttaaaggagtttaacggaatcgagacgtaagtgtaattgttcgcgcgtttcgttgcgatggcggcggcgtcgagtatagttatttcgttggcggcggagttttttttttaggaagttatcgtttttgtcgtttttttttttttttatatcgtttgcgcggtagcggcggcggcggcggcggcggcggtagtaattgtttttgtttttttcgttattttcgtttttgtttgttcgtttgtcggtggttgtggcgacggcggcggcggcggttttggcggttttattatggcggcggcggggag

SEQ ID NO: 19748 - DNA, 507 bp, Artificial Sequence
  chemically treated genomic DNA (Homo sapiens) CpG-island No: 19748
ctccccgccgccgccataataaaaccgccaaaaccgccgccgccgccgtcgccacaaccaccgacaaacgaacaaacaaaaacgaaaataacgaaaaaaacaaaaacaattactaccgccgccgccgccgccgccgccgctaccgcgcaaacgatataaaaaaaaaaaaaaacgacaaaaacgataacttcctaaaaaaaaaactccgccgccaacgaaataactatactcgacgccgccgccatcgcaacgaaacgcgcgaacaattacacttacgtctcgattccgttaaactcctttaaccccgccttccgttaaccccaccccctttattcctctttttaacgcttcaactcgaacctcgttctcgctcctcaatccaccaatcgaaaaactttaaacccgccgaccgtttccccctcccccactaccttacgtcaccccacctccctttaaaaaaaaaacaacgacgaccaaaaacaaaaaacaaaaaacgcgaaatataaa

SEQ ID NO: 19749 - DNA, 1096 bp, Artificial Sequence
  chemically treated genomic DNA (Homo sapiens) CpG-island No: 19749
aatcggtcggtaggttatgaaaatcggcggcgcgtcgtttcgtatttgtttcgttttcgtatttggcgggcgttcggggtagtcgagtttttttgtcgtcgttatttgttatcgtagtagttttttgggttagttggggttaaggtgttggtagtcgtcgttcgttagttttcggtaggtaggacgtcgcggttgtttggcgtcgttatttagtaatcggcggtacgtttcgtcgttatcgggtggattataatttttataatatatagcgtcgcggcgcggttcgggacgttaagttttgggcgttattttttcgttatgtttttcgggatttgtagttttttggatattcgggcgcggcgggtcgtttcgtcggtagggagcgcgtttcgggcggggtgcggcgttcgcgtagggattgggtcgttttcgtttcgttcgtttcgttcgtagcgcgcggtgggttcggggttcgcggcgttttaggcgtatgtgcggcgcggggcggtcgtgattagcggagcgttgggtgttagtgagtagcgaggagtcgcgcgttttcgtattcgcgtttgttcgtgcgttcgagcgtttattttcgggtttgaggtttgttcggcgcgtcgtttgtagagtatatttagggtcgcgtatttgtttcgcgtatttgttcgtcgttcgttcggcgtttcgggtttcgttagttagtttttttgcgatagcgcgggggtttcggtcgtgttttcgcgttcgtttcgcgttttagtcgggttcgggcgtagcgttgcggagggcgagggtcgttcggagttcggttagggtcggcgcggcgatgatgaataggtttcgaaagtggttttataaatttaaggtgagcggtttcgttcgggtcggacgtttttcgcgtcgcggttttttttttttttaggatcgttcgttcgttttataagacggattttttttttttgttcgtggacgatttttttttttatcgtcgatatttttttttttattttaagatttggatagatttttatcgttttgtttttgaggcggattcgaatttttttttcggttttttaagttcgggtttagg

SEQ ID NO: 19750 - DNA, 1096 bp, Artificial Sequence
  chemically treated genomic DNA (Homo sapiens) CpG-island No: 19750
cctaaacccgaacttaaaaaaccgaaaaaaaaattcgaatccgcctcaaaaacaaaacgataaaaatctatccaaatcttaaaataaaaaaaaaaatatcgacgataaaaaaaaaaatcgtccacgaacaaaaaaaaaaaatccgtcttataaaacgaacgaacgatcctaaaaaaaaaaaaaaccgcgacgcgaaaaacgtccgacccgaacgaaaccgctcaccttaaatttataaaaccactttcgaaacctattcatcatcgccgcgccgaccctaaccgaactccgaacgaccctcgccctccgcaacgctacgcccgaacccgactaaaacgcgaaacgaacgcgaaaacacgaccgaaacccccgcgctatcgcaaaaaaactaactaacgaaacccgaaacgccgaacgaacgacgaacaaatacgcgaaacaaatacgcgaccctaaatatactctacaaacgacgcgccgaacaaacctcaaacccgaaaataaacgctcgaacgcacgaacaaacgcgaatacgaaaacgcgcgactcctcgctactcactaacacccaacgctccgctaatcacgaccgccccgcgccgcacatacgcctaaaacgccgcgaaccccgaacccaccgcgcgctacgaacgaaacgaacgaaacgaaaacgacccaatccctacgcgaacgccgcaccccgcccgaaacgcgctccctaccgacgaaacgacccgccgcgcccgaatatccaaaaaactacaaatcccgaaaaacataacgaaaaaataacgcccaaaacttaacgtcccgaaccgcgccgcgacgctatatattataaaaattataatccacccgataacgacgaaacgtaccgccgattactaaataacgacgccaaacaaccgcgacgtcctacctaccgaaaactaacgaacgacgactaccaacaccttaaccccaactaacccaaaaaactactacgataacaaataacgacgacaaaaaaactcgactaccccgaacgcccgccaaatacgaaaacgaaacaaatacgaaacgacgcgccgccgattttcataacctaccgaccgatt

SEQ ID NO: 19751 - DNA, 1096 bp, Artificial Sequence
  chemically treated genomic DNA (Homo sapiens) CpG-island No: 19751
tttggattcgggtttaggaagtcgggagggaggttcggattcgttttagagatagggcgatgaagatttgtttaagttttggagtggagggaaggatgtcggcggtgggggaagaggtcgtttacggatagggaaagggagttcgttttgtagggcggacgggcggttttggggaagggagaggtcgcgacgcggggggcgttcggttcgagcggggtcgtttattttgggtttgtagagttattttcggaatttgtttattatcgtcgcgtcggttttggtcggatttcgggcggttttcgtttttcgtagcgttgcgttcgggttcggttgaggcgcggggcggacgcggaggtacggtcggagttttcgcgttgtcgtagggaggttggttagcgaagttcggagcgtcgagcgggcggcgggtaggtgcgcggggtaggtgcgcggttttgagtatgttttgtaagcggcgcgtcgggtagattttagattcgggagtgggcgttcgggcgtacggatagacgcgggtacgggggcgcgcggtttttcgttgtttattgatatttagcgtttcgttggttacggtcgtttcgcgtcgtatatgcgtttagggcgtcgcgagtttcgggtttatcgcgcgttgcgggcggggcgggcggggcggaggcggtttaatttttgcgcgggcgtcgtatttcgttcgaggcgcgttttttgtcggcggggcgattcgtcgcgttcgggtatttaagaaattataagtttcgaaaggtatggcggggaggtggcgtttagggtttggcgtttcgggtcgcgtcgcggcgttgtgtattgtgggagttgtagtttattcgatggcggcggagcgtgtcgtcggttgttaggtgacgacgttaaatagtcgcggcgttttgtttatcgggagttgacggacgacgattgttaatattttagttttagttggtttaggaaattgttgcggtggtaggtggcggcggtaggagggttcggttgtttcgagcgttcgttaggtacgggggcgggataggtgcggggcgacgcgtcgtcgatttttatgatttgtcggtcggtt

SEQ ID NO: 19752 - DNA, 1096 bp, Artificial Sequence
  chemically treated genomic DNA (Homo sapiens) CpG-island No: 19752
aaccgaccgacaaatcataaaaatcgacgacgcgtcgccccgcacctatcccgcccccgtacctaacgaacgctcgaaacaaccgaaccctcctaccgccgccacctaccaccgcaacaatttcctaaaccaactaaaactaaaatattaacaatcgtcgtccgtcaactcccgataaacaaaacgccgcgactatttaacgtcgtcacctaacaaccgacgacacgctccgccgccatcgaataaactacaactcccacaatacacaacgccgcgacgcgacccgaaacgccaaaccctaaacgccacctccccgccatacctttcgaaacttataatttcttaaatacccgaacgcgacgaatcgccccgccgacaaaaaacgcgcctcgaacgaaatacgacgcccgcgcaaaaattaaaccgcctccgccccgcccgccccgcccgcaacgcgcgataaacccgaaactcgcgacgccctaaacgcatatacgacgcgaaacgaccgtaaccaacgaaacgctaaatatcaataaacaacgaaaaaccgcgcgcccccgtacccgcgtctatccgtacgcccgaacgcccactcccgaatctaaaatctacccgacgcgccgcttacaaaacatactcaaaaccgcgcacctaccccgcgcacctacccgccgcccgctcgacgctccgaacttcgctaaccaacctccctacgacaacgcgaaaactccgaccgtacctccgcgtccgccccgcgcctcaaccgaacccgaacgcaacgctacgaaaaacgaaaaccgcccgaaatccgaccaaaaccgacgcgacgataataaacaaattccgaaaataactctacaaacccaaaataaacgaccccgctcgaaccgaacgccccccgcgtcgcgacctctcccttccccaaaaccgcccgtccgccctacaaaacgaactccctttccctatccgtaaacgacctcttcccccaccgccgacatccttccctccactccaaaacttaaacaaatcttcatcgccctatctctaaaacgaatccgaacctccctcccgacttcctaaacccgaatccaaa

SEQ ID NO: 19753 - DNA, 819 bp, Artificial Sequence
  chemically treated genomic DNA (Homo sapiens) CpG-island No: 19753
ttttttatttacgttttttggaattcgggataggtttttcgttcggtttttggggcgagcgcgttcgtggttagtagtttcggcggggcgggaggtgcggttttttagtcggcgttcgcgttttttttagcgtcgcggggtcggggttcgggcggcgcgtttcgtgttttagcggttgcgttagtcgtattgcgggcgttgcgttttcgtcgttcgtttggggttcgtgttcgttgtagtcggagtagggtcgggcgcgttcggcgcgggatgaaggcgcggcggtgtttaggatttcggcgtagggtttagggcgtatttgggcgttcgagggtggtattttggggtcggcgtagcggggaggttcgggttttgagattttgggggaggttacggttcgggtggggttatcgcggcgattaagggcgggagtggggttagcgtttcgttcgggtagttcggacgttcgaggttatcgcgttgtcgatttattttttttttttttattggtcgttttttttcgtttagcgttttaggttttcgtttttatcgtgggtgagttgttacggtagaggttttttgaaattcgtgtttcgcgtgcgtttattttaggaaggcgggaggtgggtttggaagatcggtacggaggtttgagggtttatttagggttcgaagggcgcgtgttttacggtttttgaggtcggggaattttgtttgtcgttgtcggagtgttgggttgagggtttacggtatatggggcgttttttgttcggttttggtttgattgggaggggattcggggggatttagggtttttgt

SEQ ID NO: 19754 - DNA, 819 bp, Artificial Sequence
  chemically treated genomic DNA (Homo sapiens) CpG-island No: 19754
acaaaaaccctaaatccccccgaatcccctcccaatcaaaccaaaaccgaacaaaaaacgccccatataccgtaaaccctcaacccaacactccgacaacgacaaacaaaattccccgacctcaaaaaccgtaaaacacgcgcccttcgaaccctaaataaaccctcaaacctccgtaccgatcttccaaacccacctcccgccttcctaaaataaacgcacgcgaaacacgaatttcaaaaaacctctaccgtaacaactcacccacgataaaaacgaaaacctaaaacgctaaacgaaaaaaaacgaccaataaaaaaaaaaaaaataaatcgacaacgcgataacctcgaacgtccgaactacccgaacgaaacgctaaccccactcccgcccttaatcgccgcgataaccccacccgaaccgtaacctcccccaaaatctcaaaacccgaacctccccgctacgccgaccccaaaataccaccctcgaacgcccaaatacgccctaaaccctacgccgaaatcctaaacaccgccgcgccttcatcccgcgccgaacgcgcccgaccctactccgactacaacgaacacgaaccccaaacgaacgacgaaaacgcaacgcccgcaatacgactaacgcaaccgctaaaacacgaaacgcgccgcccgaaccccgaccccgcgacgctaaaaaaaacgcgaacgccgactaaaaaaccgcacctcccgccccgccgaaactactaaccacgaacgcgctcgccccaaaaaccgaacgaaaaacctatcccgaattccaaaaaacgtaaataaaaaa

SEQ ID NO: 19755 - DNA, 819 bp, Artificial Sequence
  chemically treated genomic DNA (Homo sapiens) CpG-island No: 19755
ataggaattttgaattttttcgagtttttttttaattaagttaaggtcgagtaaggggcgttttatgtatcgtaagtttttaatttaatatttcggtaacgataaatagaatttttcgattttaaaggtcgtgaagtacgcgtttttcgggttttgagtgagtttttaaattttcgtgtcgattttttaaatttatttttcgtttttttggaatgggcgtacgcgaggtacggattttaggaaatttttgtcgtgatagtttatttacggtggaggcggaggtttgggacgttggacggagaaaggcggttagtggagggaggaggggtaggtcggtaacgcggtggtttcggacgttcgagttgttcggacgaagcgttggttttattttcgtttttggtcgtcgcggtgattttattcgagtcgtgattttttttaagattttagggttcgggttttttcgttgcgtcggttttagggtgttattttcggacgtttagatgcgttttggattttgcgtcgggattttgaatatcgtcgcgtttttatttcgcgtcgagcgcgttcggttttgtttcggttgtagcgggtacgagttttaggcgggcggcggggacgtagcgttcgtagtgcgattggcgtagtcgttgaggtacggggcgcgtcgttcggatttcgatttcgcggcgttaggagaggcgcgggcgtcggttggagagtcgtatttttcgtttcgtcgaggttgttggttacgggcgcgttcgttttaagggtcgggcggaggatttgtttcggattttagaggacgtgggtggggaa

SEQ ID NO: 19756 - DNA, 819 bp, Artificial Sequence
  chemically treated genomic DNA (Homo sapiens) CpG-island No: 19756
ttccccacccacgtcctctaaaatccgaaacaaatcctccgcccgacccttaaaacgaacgcgcccgtaaccaacaacctcgacgaaacgaaaaatacgactctccaaccgacgcccgcgcctctcctaacgccgcgaaatcgaaatccgaacgacgcgccccgtacctcaacgactacgccaatcgcactacgaacgctacgtccccgccgcccgcctaaaactcgtacccgctacaaccgaaacaaaaccgaacgcgctcgacgcgaaataaaaacgcgacgatattcaaaatcccgacgcaaaatccaaaacgcatctaaacgtccgaaaataacaccctaaaaccgacgcaacgaaaaaacccgaaccctaaaatcttaaaaaaaatcacgactcgaataaaatcaccgcgacgaccaaaaacgaaaataaaaccaacgcttcgtccgaacaactcgaacgtccgaaaccaccgcgttaccgacctacccctcctccctccactaaccgcctttctccgtccaacgtcccaaacctccgcctccaccgtaaataaactatcacgacaaaaatttcctaaaatccgtacctcgcgtacgcccattccaaaaaaacgaaaaataaatttaaaaaatcgacacgaaaatttaaaaactcactcaaaacccgaaaaacgcgtacttcacgacctttaaaatcgaaaaattctatttatcgttaccgaaatattaaattaaaaacttacgatacataaaacgccccttactcgaccttaacttaattaaaaaaaaactcgaaaaaattcaaaattcctat

SEQ ID NO: 19757 - DNA, 1228 bp, Artificial Sequence
  chemically treated genomic DNA (Homo sapiens) CpG-island No: 19757
gggggtcgggggcgtttgtcgcgtatttattttgacgcgtttttagtagtagcgagttggttacgatgttttcgagttttatgttttggcgtcgtcgtcgtcggcggattttgcgagatcgaggagattgaggaggcggaataggaggagacgtcgtcgttttcgtgtatagttcgtcgggtattatttttttttcgagtttcggatacgatttcgggaggttgtttcgtcgttattattgttattaagggcgtcgtcgtcgtcgttttcgtaggtttttattagtaggggagcggtcggggcgaggggagggggtagttcgatcgcggcgggttttagttgttatcgttgtcgcgttatcgtttcggttttttttggttttatcgttttcgtttcgcgcgcgtaattttttttttagtgttttgttttcgggtagtttcgagttaatgtcgtggtttatttcggataggggtttattggtaggggcgttcgtcgcggtcggcgattcgttttcgggcgggttcggcgttaacggtttagttgaagagggagcgtttttcgtcgtcgcggtcggggtattatagtttttagaaggttttgcgttaagagtatacggcgggtcgcggcgcgtggtttgttgggagttgtagtcgttgagtttatcggcgagtaagtcgagtttgcgggcgcggtgtttatttttcgcgagtcggaggtgttgcgttgttttcgcgagacgaggaagcggtttcgcggttcggtacgtgttttagggtagcgcgcgtttgttttttttcgggtttcgggtttttgggcgtagcggggcgcgcgttatggcgaaggcgaagaaggtcggggcgcgaaggaaggttttcggggcgtcggcgggagcgcgagggggttcggcgaaggttaattttaattcgttcgaggtgaaagttaataggtagaagttttagattttgggtcggaagacgcgttacgacgtgggattgttcggggtgtttcgcgtacgggtttttaggaaggtaagcggggggcgtacggggagtcggaaggtaggatttggattttacgttgttttcggtcggttgcgtttttttcggtgcgtcggttttttcgttgagcggtataggtcgtgataggtatacggtattgatttgatagttcgaaagtttttgttgttttttgagttggagtgatttggaaattttcgtcgttttggaga

SEQ ID NO: 19758 - DNA, 1228 bp, Artificial Sequence
  chemically treated genomic DNA (Homo sapiens) CpG-island No: 19758
tctccaaaacgacgaaaatttccaaatcactccaactcaaaaaacaacaaaaactttcgaactatcaaatcaataccgtatacctatcacgacctataccgctcaacgaaaaaaccgacgcaccgaaaaaaacgcaaccgaccgaaaacaacgtaaaatccaaatcctaccttccgactccccgtacgccccccgcttaccttcctaaaaacccgtacgcgaaacaccccgaacaatcccacgtcgtaacgcgtcttccgacccaaaatctaaaacttctacctattaactttcacctcgaacgaattaaaattaaccttcgccgaaccccctcgcgctcccgccgacgccccgaaaaccttccttcgcgccccgaccttcttcgccttcgccataacgcgcgccccgctacgcccaaaaacccgaaacccgaaaaaaaacaaacgcgcgctaccctaaaacacgtaccgaaccgcgaaaccgcttcctcgtctcgcgaaaacaacgcaacacctccgactcgcgaaaaataaacaccgcgcccgcaaactcgacttactcgccgataaactcaacgactacaactcccaacaaaccacgcgccgcgacccgccgtatactcttaacgcaaaaccttctaaaaactataataccccgaccgcgacgacgaaaaacgctccctcttcaactaaaccgttaacgccgaacccgcccgaaaacgaatcgccgaccgcgacgaacgcccctaccaataaacccctatccgaaataaaccacgacattaactcgaaactacccgaaaacaaaacactaaaaaaaaaattacgcgcgcgaaacgaaaacgataaaaccaaaaaaaaccgaaacgataacgcgacaacgataacaactaaaacccgccgcgatcgaactaccccctcccctcgccccgaccgctcccctactaataaaaacctacgaaaacgacgacgacgacgcccttaataacaataataacgacgaaacaacctcccgaaatcgtatccgaaactcgaaaaaaaaataatacccgacgaactatacacgaaaacgacgacgtctcctcctattccgcctcctcaatctcctcgatctcgcaaaatccgccgacgacgacgacgccaaaacataaaactcgaaaacatcgtaaccaactcgctactactaaaaacgcgtcaaaataaatacgcgacaaacgcccccgaccccc

SEQ ID NO: 19759 - DNA, 1228 bp, Artificial Sequence
  chemically treated genomic DNA (Homo sapiens) CpG-island No: 19759
tttttaagacggcgagagtttttaggttattttagtttagagaatagtagaggttttcggattattaagttagtgtcgtgtgtttgttacggtttgtgtcgtttaacgaggaaatcgacgtatcgagaaggacgtagtcggtcgagagtagcgtggggtttagattttgtttttcggtttttcgtgcgtttttcgtttatttttttgagggttcgtgcgcgagatatttcgggtagttttacgtcgtggcgcgtttttcggtttaggatttggaatttttgtttgttaatttttatttcgaacggattggagttggttttcgtcgggttttttcgcgttttcgtcggcgtttcggaggttttttttcgcgtttcgatttttttcgttttcgttatggcgcgcgtttcgttgcgtttaagggttcgagattcgaagagagataggcgcgcgttattttaagatacgtgtcgggtcgcggaatcgttttttcgtttcgcgagaatagcgtagtattttcgattcgcgagaagtaaatatcgcgttcgtaggttcggtttattcgtcgataggtttagcgattataatttttagtaggttacgcgtcgcggttcgtcgtgtatttttggcgtagggttttttgggagttgtagtgtttcggtcgcggcggcgaggggcgttttttttttagttaagtcgttagcgtcgagttcgttcgggagcgggtcgtcggtcgcggcgggcgtttttgttagtgagtttttgttcgaagtgagttacggtattgattcggggttgttcgggggtagggtattgaggagggagttgcgcgcgcgaggcgagggcgatggggttaagaagaatcggggcgatagcgcggtagcggtgatagttgggattcgtcgcggtcgggttgtttttttttttcgtttcgatcgtttttttgttggtgagggtttgcggaggcggcggcggcggcgtttttggtggtagtggtggcggcggagtagtttttcgggatcgtgttcggagttcgaggagagggtggtgttcggcgagttatgtacgggggcggcggcgtttttttttgtttcgtttttttagttttttcggtttcgtagaattcgtcggcggcggcggcgttaggatatggagttcgagaatatcgtggttaattcgttgttgttgaaagcgcgttaaggtgggtgcgcggtaggcgttttcgattttt

SEQ ID NO: 19760 - DNA, 1228 bp, Artificial Sequence
  chemically treated genomic DNA (Homo sapiens) CpG-island No: 19760
aaaaatcgaaaacgcctaccgcgcacccaccttaacgcgctttcaacaacaacgaattaaccacgatattctcgaactccatatcctaacgccgccgccgccgacgaattctacgaaaccgaaaaaactaaaaaaacgaaacaaaaaaaaacgccgccgcccccgtacataactcgccgaacaccaccctctcctcgaactccgaacacgatcccgaaaaactactccgccgccaccactaccaccaaaaacgccgccgccgccgcctccgcaaaccctcaccaacaaaaaaacgatcgaaacgaaaaaaaaaaacaacccgaccgcgacgaatcccaactatcaccgctaccgcgctatcgccccgattcttcttaaccccatcgccctcgcctcgcgcgcgcaactccctcctcaataccctacccccgaacaaccccgaatcaataccgtaactcacttcgaacaaaaactcactaacaaaaacgcccgccgcgaccgacgacccgctcccgaacgaactcgacgctaacgacttaactaaaaaaaaaacgcccctcgccgccgcgaccgaaacactacaactcccaaaaaaccctacgccaaaaatacacgacgaaccgcgacgcgtaacctactaaaaattataatcgctaaacctatcgacgaataaaccgaacctacgaacgcgatatttacttctcgcgaatcgaaaatactacgctattctcgcgaaacgaaaaaacgattccgcgacccgacacgtatcttaaaataacgcgcgcctatctctcttcgaatctcgaacccttaaacgcaacgaaacgcgcgccataacgaaaacgaaaaaaatcgaaacgcgaaaaaaaacctccgaaacgccgacgaaaacgcgaaaaaacccgacgaaaaccaactccaatccgttcgaaataaaaattaacaaacaaaaattccaaatcctaaaccgaaaaacgcgccacgacgtaaaactacccgaaatatctcgcgcacgaaccctcaaaaaaataaacgaaaaacgcacgaaaaaccgaaaaacaaaatctaaaccccacgctactctcgaccgactacgtccttctcgatacgtcgatttcctcgttaaacgacacaaaccgtaacaaacacacgacactaacttaataatccgaaaacctctactattctctaaactaaaataacctaaaaactctcgccgtcttaaaaa

SEQ ID NO: 19761 - DNA, 502 bp, Artificial Sequence
  chemically treated genomic DNA (Homo sapiens) CpG-island No: 19761
gataatcgtaggatgttgaaaaggggaaatttaatataaacgttaagtgagcgtttgaaagtaggtcgcgtcgggcggcgggtaggcgggtaaaggcggatagggcggtcgggggggcgggcgggcgagcggcggcggttatttttcgcgtagttgtaggcggtagcggtggtagcggatttggaagaagaggcgtttagttagcgagagggttatgttcggtagtacgtagtggttattggcgtttatgtgtttgaagtttagcgattcgtagagtttgtgggcggttattttgacggtcgtcgtgtttagtattatcgcggagtagttgtgtattacggcgaattttagtatttttcggtttagcgttttggcgatgtttttgtttcggaaacgtgagtttatagatattcgtagtagttttatcgtgttgtttttttcgtgggttcgtgtagttataatgtttattacgttgttatttagtacggttatttagaagtag

SEQ ID NO: 19762 - DNA, 502 bp, Artificial Sequence
  chemically treated genomic DNA (Homo sapiens) CpG-island No: 19762
ctacttctaaataaccgtactaaataacaacgtaataaacattataactacacgaacccacgaaaaaaacaacacgataaaactactacgaatatctataaactcacgtttccgaaacaaaaacatcgccaaaacgctaaaccgaaaaatactaaaattcgccgtaatacacaactactccgcgataatactaaacacgacgaccgtcaaaataaccgcccacaaactctacgaatcgctaaacttcaaacacataaacgccaataaccactacgtactaccgaacataaccctctcgctaactaaacgcctcttcttccaaatccgctaccaccgctaccgcctacaactacgcgaaaaataaccgccgccgctcgcccgcccgcccccccgaccgccctatccgcctttacccgcctacccgccgcccgacgcgacctactttcaaacgctcacttaacgtttatattaaatttccccttttcaacatcctacgattatc

SEQ ID NO: 19763 - DNA, 502 bp, Artificial Sequence
  chemically treated genomic DNA (Homo sapiens) CpG-island No: 19763
ttgtttttgggtggtcgtgttggatggtaacgtggtgggtattgtggttgtacgggtttacgaggaggataatacggtggagttgttgcggatgtttgtggatttacgttttcgaggtaagggtatcgttaaggcgttgggtcggaaggtgttggagttcgtcgtggtgtataattatttcgcggtggtgttgggtacgacggtcgttaaggtggtcgtttataagttttacgagtcgttgggttttagatatatgggcgttagtgattattacgtgttgtcgggtatgattttttcgttggttgagcgtttttttttttaggttcgttattatcgttatcgtttgtagttgcgcgaggagtgatcgtcgtcgttcgttcgttcgttttttcggtcgttttgttcgtttttgttcgtttgttcgtcgttcggcgcggtttgtttttagacgtttatttggcgtttgtgttgggttttttttttttaatattttgcggttgtt

SEQ ID NO: 19764 - DNA, 502 bp, Artificial Sequence
  chemically treated genomic DNA (Homo sapiens) CpG-island No: 19764
aacaaccgcaaaatattaaaaaaaaaaaacccaacacaaacgccaaataaacgtctaaaaacaaaccgcgccgaacgacgaacaaacgaacaaaaacgaacaaaacgaccgaaaaaacgaacgaacgaacgacgacgatcactcctcgcgcaactacaaacgataacgataataacgaacctaaaaaaaaaaacgctcaaccaacgaaaaaatcatacccgacaacacgtaataatcactaacgcccatatatctaaaacccaacgactcgtaaaacttataaacgaccaccttaacgaccgtcgtacccaacaccaccgcgaaataattatacaccacgacgaactccaacaccttccgacccaacgccttaacgatacccttacctcgaaaacgtaaatccacaaacatccgcaacaactccaccgtattatcctcctcgtaaacccgtacaaccacaatacccaccacgttaccatccaacacgaccacccaaaaacaa

SEQ ID NO: 19765 - DNA, 1289 bp, Artificial Sequence
  chemically treated genomic DNA (Homo sapiens) CpG-island No: 19765
acggatacggagggaatagcgatacggggggaatagcgatacggggggaatagcgatacggggggaatagcgatacggggggaatagcgatacggggggaatagcgatacggggggaatagcgatacggggggaatagcgatacggggggaatagcgatacggggggaatagcgatacggggggaatagcgatacggggggaatagcgatacggggggaatagcgatacggggggaatagcgatacggggggaatagcgatacggggggaatagcgatacggggggaatagcgatacggggggaatagcgatacggggggaatagcgatacggggggaatagcgatacggggggaatagcgatacggggggaatagcgatacggggggaatagcgatacggggggaatagcgatacggggggaatagcgatacggggggaatagcgatacggggggaatagcgatacggggggaatagcgatacggggggaatagcgatacggggggaatagcgatacggggggaatagcgatacggggggaatagcgatacggggggaatagcgatacggggggaatagcgatacggggggaatagcgatacggggggaatagcgatacggggggaatagcgatacggggggaatagcgatacggggggaatagcgatacggggggaatagcgatacggggggaatagcgatacggggggaatagcgatacggggggaatagcgatacggggggaatagcgatacggggggaatagcgatacggggggaatagcgatacggggggaatagcgatacggggggaatagcgatacggggggaatagcgatacggggggaatagcgatacggggggaatagcgatacggggggaatagcgatacggggggaatagcgatacggggggaatagcgatacggggggaatagcgatacggggggaatagcgatacggggggaatagcgatacggggggaatagcgatacggggggaatagcgatacggggggaatagcgatacggggggaatagcgatacggggggaatagcgatacggggggaatagcgatacggggggaatagcgatacggggggaatagcgatacggggggaatagcgatacggggggaatagcgatacggggggaatagcgatacggggggaatagcgatacggggggaatagcgatacggggggaatattaatacgggaggaatagtaatacgtagggaatatcgatatgggtgatgtttgtaaagtatagtattaattttaagtgatt

SEQ ID NO: 19766 - DNA, 1289 bp, Artificial Sequence
  chemically treated genomic DNA (Homo sapiens) CpG-island No: 19766
aatcacttaaaattaatactatactttacaaacatcacccatatcgatattccctacgtattactattcctcccgtattaatattccccccgtatcgctattccccccgtatcgctattccccccgtatcgctattccccccgtatcgctattccccccgtatcgctattccccccgtatcgctattccccccgtatcgctattccccccgtatcgctattccccccgtatcgctattccccccgtatcgctattccccccgtatcgctattccccccgtatcgctattccccccgtatcgctattccccccgtatcgctattccccccgtatcgctattccccccgtatcgctattccccccgtatcgctattccccccgtatcgctattccccccgtatcgctattccccccgtatcgctattccccccgtatcgctattccccccgtatcgctattccccccgtatcgctattccccccgtatcgctattccccccgtatcgctattccccccgtatcgctattccccccgtatcgctattccccccgtatcgctattccccccgtatcgctattccccccgtatcgctattccccccgtatcgctattccccccgtatcgctattccccccgtatcgctattccccccgtatcgctattccccccgtatcgctattccccccgtatcgctattccccccgtatcgctattccccccgtatcgctattccccccgtatcgctattccccccgtatcgctattccccccgtatcgctattccccccgtatcgctattccccccgtatcgctattccccccgtatcgctattccccccgtatcgctattccccccgtatcgctattccccccgtatcgctattccccccgtatcgctattccccccgtatcgctattccccccgtatcgctattccccccgtatcgctattccccccgtatcgctattccccccgtatcgctattccccccgtatcgctattccccccgtatcgctattccccccgtatcgctattccccccgtatcgctattccccccgtatcgctattccccccgtatcgctattccccccgtatcgctattccccccgtatcgctattccccccgtatcgctattccccccgtatcgctattccccccgtatcgctattccccccgtatcgctattccccccgtatcgctattccccccgtatcgctattccccccgtatcgctattccccccgtatcgctattccccccgtatcgctattccctccgtatccgt

SEQ ID NO: 19767 - DNA, 1289 bp, Artificial Sequence
  chemically treated genomic DNA (Homo sapiens) CpG-island No: 19767
agttatttgggattgatgttgtgttttgtaggtattatttatgtcgatattttttgcgtgttgttgtttttttcgtgttggtatttttttcgtgtcgttgtttttttcgtgtcgttgtttttttcgtgtcgttgtttttttcgtgtcgttgtttttttcgtgtcgttgtttttttcgtgtcgttgtttttttcgtgtcgttgtttttttcgtgtcgttgtttttttcgtgtcgttgtttttttcgtgtcgttgtttttttcgtgtcgttgtttttttcgtgtcgttgtttttttcgtgtcgttgtttttttcgtgtcgttgtttttttcgtgtcgttgtttttttcgtgtcgttgtttttttcgtgtcgttgtttttttcgtgtcgttgtttttttcgtgtcgttgtttttttcgtgtcgttgtttttttcgtgtcgttgtttttttcgtgtcgttgtttttttcgtgtcgttgtttttttcgtgtcgttgtttttttcgtgtcgttgtttttttcgtgtcgttgtttttttcgtgtcgttgtttttttcgtgtcgttgtttttttcgtgtcgttgtttttttcgtgtcgttgtttttttcgtgtcgttgtttttttcgtgtcgttgtttttttcgtgtcgttgtttttttcgtgtcgttgtttttttcgtgtcgttgtttttttcgtgtcgttgtttttttcgtgtcgttgtttttttcgtgtcgttgtttttttcgtgtcgttgtttttttcgtgtcgttgtttttttcgtgtcgttgtttttttcgtgtcgttgtttttttcgtgtcgttgtttttttcgtgtcgttgtttttttcgtgtcgttgtttttttcgtgtcgttgtttttttcgtgtcgttgtttttttcgtgtcgttgtttttttcgtgtcgttgtttttttcgtgtcgttgtttttttcgtgtcgttgtttttttcgtgtcgttgtttttttcgtgtcgttgtttttttcgtgtcgttgtttttttcgtgtcgttgtttttttcgtgtcgttgtttttttcgtgtcgttgtttttttcgtgtcgttgtttttttcgtgtcgttgtttttttcgtgtcgttgtttttttcgtgtcgttgtttttttcgtgtcgttgtttttttcgtgtcgttgtttttttcgtgtcgttgtttttttcgtgtcgttgtttttttcgtgtcgttgtttttttcgtgtcgttgtttttttcgtgtcgttgtttttttcgtgtcgttgtttttttcgtgtcgttgtttttttcgtgttcgt

SEQ ID NO: 19768 - DNA, 1289 bp, Artificial Sequence
  chemically treated genomic DNA (Homo sapiens) CpG-island No: 19768
acgaacacgaaaaaaacaacgacacgaaaaaaacaacgacacgaaaaaaacaacgacacgaaaaaaacaacgacacgaaaaaaacaacgacacgaaaaaaacaacgacacgaaaaaaacaacgacacgaaaaaaacaacgacacgaaaaaaacaacgacacgaaaaaaacaacgacacgaaaaaaacaacgacacgaaaaaaacaacgacacgaaaaaaacaacgacacgaaaaaaacaacgacacgaaaaaaacaacgacacgaaaaaaacaacgacacgaaaaaaacaacgacacgaaaaaaacaacgacacgaaaaaaacaacgacacgaaaaaaacaacgacacgaaaaaaacaacgacacgaaaaaaacaacgacacgaaaaaaacaacgacacgaaaaaaacaacgacacgaaaaaaacaacgacacgaaaaaaacaacgacacgaaaaaaacaacgacacgaaaaaaacaacgacacgaaaaaaacaacgacacgaaaaaaacaacgacacgaaaaaaacaacgacacgaaaaaaacaacgacacgaaaaaaacaacgacacgaaaaaaacaacgacacgaaaaaaacaacgacacgaaaaaaacaacgacacgaaaaaaacaacgacacgaaaaaaacaacgacacgaaaaaaacaacgacacgaaaaaaacaacgacacgaaaaaaacaacgacacgaaaaaaacaacgacacgaaaaaaacaacgacacgaaaaaaacaacgacacgaaaaaaacaacgacacgaaaaaaacaacgacacgaaaaaaacaacgacacgaaaaaaacaacgacacgaaaaaaacaacgacacgaaaaaaacaacgacacgaaaaaaacaacgacacgaaaaaaacaacgacacgaaaaaaacaacgacacgaaaaaaacaacgacacgaaaaaaacaacgacacgaaaaaaacaacgacacgaaaaaaacaacgacacgaaaaaaacaacgacacgaaaaaaacaacgacacgaaaaaaacaacgacacgaaaaaaacaacgacacgaaaaaaacaacgacacgaaaaaaacaacgacacgaaaaaaacaacgacacgaaaaaaacaacgacacgaaaaaaacaacgacacgaaaaaaacaacgacacgaaaaaaacaacgacacgaaaaaaacaacgacacgaaaaaaacaacgacacgaaaaaaataccaacacgaaaaaaacaacaacacgcaaaaaatatcgacataaataatacctacaaaacacaacatcaatcccaaataact

SEQ ID NO: 19769 - DNA, 522 bp, Artificial Sequence
  chemically treated genomic DNA (Homo sapiens) CpG-island No: 19769
attacggttttcgtttttaggtttcgttttatcgatcgcgggtcgcgtttattcgttgggtttttttttatagttggtttaatttttttatgcggaattttttttcggattcgcgtttcggggacggtttgggttggtttttttttcgcgagtatttgtcgtcgtggttcgtagcgggttagggttcgaggaagagtagtagtagtagtagcgtcgggagttcgcgtagaaacgatttgatttttcgcggcgttatttttttttgcgattggcgttgcgcggagaaaatttagtttgtcgatgtttcgtttattatttcgtttttatttatcgcgcggttttttgggaattgtagttttttcgtgagcggtcggtagcggcgaggtcgtcggcggattttagcgtttaggaagttttgcgtaggcgtaagcgttttttaggtaattacgtcgcggttcgaggttgtagattttggtaggggatataattggagaatgagggtggtcgggtgggagtagggat

SEQ ID NO: 19770 - DNA, 522 bp, Artificial Sequence
  chemically treated genomic DNA (Homo sapiens) CpG-island No: 19770
atccctactcccacccgaccaccctcattctccaattatatcccctaccaaaatctacaacctcgaaccgcgacgtaattacctaaaaaacgcttacgcctacgcaaaacttcctaaacgctaaaatccgccgacgacctcgccgctaccgaccgctcacgaaaaaactacaattcccaaaaaaccgcgcgataaataaaaacgaaataataaacgaaacatcgacaaactaaattttctccgcgcaacgccaatcgcaaaaaaaaataacgccgcgaaaaatcaaatcgtttctacgcgaactcccgacgctactactactactactcttcctcgaaccctaacccgctacgaaccacgacgacaaatactcgcgaaaaaaaaaccaacccaaaccgtccccgaaacgcgaatccgaaaaaaaattccgcataaaaaaattaaaccaactataaaaaaaaacccaacgaataaacgcgacccgcgatcgataaaacgaaacctaaaaacgaaaaccgtaat

SEQ ID NO: 19771 - DNA, 522 bp, Artificial Sequence
  chemically treated genomic DNA (Homo sapiens) CpG-island No: 19771
atttttgtttttattcggttatttttattttttagttgtattttttgttagagtttgtagtttcgggtcgcggcgtggttgtttgggaaacgtttgcgtttgcgtagggttttttaggcgttggagttcgtcggcggtttcgtcgttgtcggtcgtttacggaggaattataatttttaggagatcgcgcggtgggtgggggcggggtagtgggcggggtatcggtaggttaggtttttttcgcgtagcgttagtcgtagaggaagatggcgtcgcggagggttaggtcgtttttgcgcgggttttcggcgttgttattgttgttgttttttttcgggttttggttcgttgcgagttacggcggtaagtattcgcgggagaagaattagtttaagtcgttttcgaaacgcgagttcggagaggagtttcgtatggagaagttgaattagttgtgggagaaggtttagcgagtgagcgcggttcgcggtcggtggagcggggtttgggggcgggggtcgtggt

SEQ ID NO: 19772 - DNA, 522 bp, Artificial Sequence
  chemically treated genomic DNA (Homo sapiens) CpG-island No: 19772
accacgacccccgcccccaaaccccgctccaccgaccgcgaaccgcgctcactcgctaaaccttctcccacaactaattcaacttctccatacgaaactcctctccgaactcgcgtttcgaaaacgacttaaactaattcttctcccgcgaatacttaccgccgtaactcgcaacgaaccaaaacccgaaaaaaaacaacaacaataacaacgccgaaaacccgcgcaaaaacgacctaaccctccgcgacgccatcttcctctacgactaacgctacgcgaaaaaaacctaacctaccgataccccgcccactaccccgcccccacccaccgcgcgatctcctaaaaattataattcctccgtaaacgaccgacaacgacgaaaccgccgacgaactccaacgcctaaaaaaccctacgcaaacgcaaacgtttcccaaacaaccacgccgcgacccgaaactacaaactctaacaaaaaatacaactaaaaaataaaaataaccgaataaaaacaaaaat

SEQ ID NO: 19773 - DNA, 543 bp, Artificial Sequence
  chemically treated genomic DNA (Homo sapiens) CpG-island No: 19773
gcgcgtaaggacggcgggatgtgttaggaacgagggcgaaggattattttgtcgagtttatttgaggtttgaagagcgaatatcgggtagacgaaggcgggagtttcgggcggggaaacgtatcgagtatttttttttcgaggtttgtacgtagttcgatttgtcgttgcgtacgtagtaggcggagtgtttttcgcgttcgcgcgtcgagcgaatgaagttgtgtatttgcgggttttggcgtatgtagggcgaaaatttggcgtttaggtggatgagggttttttgcgggcgagggagacgagcggtcgtagttcggggttttttgttttcgtcgggtatttttaggtttcgttttcgtcggtttcgtttttagtttcgtttttatcgagttgggttcgatttagaagtttttttgttgtacgtatttgacgttttcgtagatttcgcggtttcgtagtatttgggaggttggggagcgggattagacgggtttcgattttggttttttttttttagagcgggtcgggagggggtttagtg

SEQ ID NO: 19774 - DNA, 543 bp, Artificial Sequence
  chemically treated genomic DNA (Homo sapiens) CpG-island No: 19774
cactaaaccccctcccgacccgctctaaaaaaaaaaaaccaaaatcgaaacccgtctaatcccgctccccaacctcccaaatactacgaaaccgcgaaatctacgaaaacgtcaaatacgtacaacaaaaaaacttctaaatcgaacccaactcgataaaaacgaaactaaaaacgaaaccgacgaaaacgaaacctaaaaatacccgacgaaaacaaaaaaccccgaactacgaccgctcgtctccctcgcccgcaaaaaaccctcatccacctaaacgccaaattttcgccctacatacgccaaaacccgcaaatacacaacttcattcgctcgacgcgcgaacgcgaaaaacactccgcctactacgtacgcaacgacaaatcgaactacgtacaaacctcgaaaaaaaaatactcgatacgtttccccgcccgaaactcccgccttcgtctacccgatattcgctcttcaaacctcaaataaactcgacaaaataatccttcgccctcgttcctaacacatcccgccgtccttacgcgc

SEQ ID NO: 19775 - DNA, 543 bp, Artificial Sequence
  chemically treated genomic DNA (Homo sapiens) CpG-island No: 19775
tattggattttttttcgattcgttttgggaggagagggttagagtcggggttcgtttgatttcgttttttaattttttaggtgttgcggaatcgcggggtttacgagaacgttaagtacgtgtagtaggagaatttttggatcgggtttagttcggtgaggacggggttgggggcggggtcggcgggggcgggatttggaggtgttcggcgggggtaggaggtttcggattgcggtcgttcgtttttttcgttcgtaggaggtttttatttatttgggcgttaagttttcgttttgtatgcgttaggattcgtaggtgtatagttttattcgttcggcgcgcgagcgcgagaagtatttcgtttgttgcgtgcgtaacgataggtcgggttgcgtgtagatttcggaggaggagtgttcggtgcgttttttcgttcgggattttcgttttcgtttgttcggtgttcgttttttagattttagatagattcggtagagtgatttttcgttttcgtttttggtatatttcgtcgtttttacgcgt

SEQ ID NO: 19776 - DNA, 543 bp, Artificial Sequence
  chemically treated genomic DNA (Homo sapiens) CpG-island No: 19776
acgcgtaaaaacgacgaaatataccaaaaacgaaaacgaaaaatcactctaccgaatctatctaaaatctaaaaaacgaacaccgaacaaacgaaaacgaaaatcccgaacgaaaaaacgcaccgaacactcctcctccgaaatctacacgcaacccgacctatcgttacgcacgcaacaaacgaaatacttctcgcgctcgcgcgccgaacgaataaaactatacacctacgaatcctaacgcatacaaaacgaaaacttaacgcccaaataaataaaaacctcctacgaacgaaaaaaacgaacgaccgcaatccgaaacctcctacccccgccgaacacctccaaatcccgcccccgccgaccccgcccccaaccccgtcctcaccgaactaaacccgatccaaaaattctcctactacacgtacttaacgttctcgtaaaccccgcgattccgcaacacctaaaaaattaaaaaacgaaatcaaacgaaccccgactctaaccctctcctcccaaaacgaatcgaaaaaaaatccaata

SEQ ID NO: 19777 - DNA, 670 bp, Artificial Sequence
  chemically treated genomic DNA (Homo sapiens) CpG-island No: 19777
ttcggttgttagcgatttggagtttacgttgattttagtttttcgtcgattttatagttcgcggaggggtacggagtcgcggcgttcgtcggggaggaagtagtaggacggtatataggaaggaggttgaagttttatttatggcgtagatttcgagagaggagttcgatttggatttacggtcgttttagagacgtatcggtttagataaaggttcggcgtttgcggtcggagcgcgggggaggaggagcgatgtttcgcgtaggcgtaggcgtagacgatcgcggttttcgttttaggtcgttcggcggtttcgttttatttttattttagattttcgtttggttggtcgttttgatttatcgtttcgagtcgtgtttatgagttggtttagtagggttcgtatttgcgtttgggcggatatggtagtcggcggaggcgacggggtcggtcgcgacgattttttttaggtaggcggtggtagcggcgtcgataaacgatggtcgcgtcggtttcgagtttattcggttttttttcgtcgcgggggacgtcgggaggaagtacgacggcgtcggcgtacgttttgttgggaaatgtagtttttggggtgggtgtttagggaggttgaggttttgagtggtcgtaagttgtttaacggcggaattaaaat

SEQ ID NO: 19778 - DNA, 670 bp, Artificial Sequence
  chemically treated genomic DNA (Homo sapiens) CpG-island No: 19778
attttaattccgccgttaaacaacttacgaccactcaaaacctcaacctccctaaacacccaccccaaaaactacatttcccaacaaaacgtacgccgacgccgtcgtacttcctcccgacgtcccccgcgacgaaaaaaaaccgaataaactcgaaaccgacgcgaccatcgtttatcgacgccgctaccaccgcctacctaaaaaaaatcgtcgcgaccgaccccgtcgcctccgccgactaccatatccgcccaaacgcaaatacgaaccctactaaaccaactcataaacacgactcgaaacgataaatcaaaacgaccaaccaaacgaaaatctaaaataaaaataaaacgaaaccgccgaacgacctaaaacgaaaaccgcgatcgtctacgcctacgcctacgcgaaacatcgctcctcctcccccgcgctccgaccgcaaacgccgaacctttatctaaaccgatacgtctctaaaacgaccgtaaatccaaatcgaactcctctctcgaaatctacgccataaataaaacttcaacctccttcctatataccgtcctactacttcctccccgacgaacgccgcgactccgtacccctccgcgaactataaaatcgacgaaaaactaaaatcaacgtaaactccaaatcgctaacaaccgaa

SEQ ID NO: 19779 - DNA, 670 bp, Artificial Sequence
  chemically treated genomic DNA (Homo sapiens) CpG-island No: 19779
attttggtttcgtcgttggataatttgcgattatttagagttttagtttttttaagtatttattttagaaattatattttttagtagggcgtgcgtcggcgtcgtcgtattttttttcggcgtttttcgcggcgggaaagagtcgagtgggttcgaggtcgacgcgattatcgtttgtcgacgtcgttgttatcgtttgtttgagagaagtcgtcgcggtcgatttcgtcgttttcgtcggttattatgttcgtttaggcgtagatgcgggttttgttggattagtttatgggtacggttcgggacggtgagttagagcggttaattaggcgagggtttggggtgggagtgaggcgaggtcgtcgggcggtttgaggcgggggtcgcgatcgtttgcgtttgcgtttgcgcggggtatcgttttttttttttcgcgtttcgatcgtaggcgtcgggtttttgtttaagtcggtgcgtttttgaggcggtcgtgggtttaggtcgggtttttttttcggagtttgcgttatggatggggttttagttttttttttatgtatcgttttgttatttttttttcggcgggcgtcgcggtttcgtgttttttcgcgaattgtggagtcggcggagggttggaattagcgtgggttttaggtcgttggtagtcggg

SEQ ID NO: 19780 - DNA, 670 bp, Artificial Sequence
  chemically treated genomic DNA (Homo sapiens) CpG-island No: 19780
cccgactaccaacgacctaaaacccacgctaattccaaccctccgccgactccacaattcgcgaaaaaacacgaaaccgcgacgcccgccgaaaaaaaaataacaaaacgatacataaaaaaaaaactaaaaccccatccataacgcaaactccgaaaaaaaaacccgacctaaacccacgaccgcctcaaaaacgcaccgacttaaacaaaaacccgacgcctacgatcgaaacgcgaaaaaaaaaaaacgataccccgcgcaaacgcaaacgcaaacgatcgcgacccccgcctcaaaccgcccgacgacctcgcctcactcccaccccaaaccctcgcctaattaaccgctctaactcaccgtcccgaaccgtacccataaactaatccaacaaaacccgcatctacgcctaaacgaacataataaccgacgaaaacgacgaaatcgaccgcgacgacttctctcaaacaaacgataacaacgacgtcgacaaacgataatcgcgtcgacctcgaacccactcgactctttcccgccgcgaaaaacgccgaaaaaaaatacgacgacgccgacgcacgccctactaaaaaatataatttctaaaataaatacttaaaaaaactaaaactctaaataatcgcaaattatccaacgacgaaaccaaaat

SEQ ID NO: 19781 - DNA, 556 bp, Artificial Sequence
  chemically treated genomic DNA (Homo sapiens) CpG-island No: 19781
gttatttttgcggcgcgtcgggttaggaattcggggttgggtcgttttcgcgggcgattcgggaaattttaggaagaaaagttcggtcgtttcgggggggtttcgtcgcgattttttttcggtttcggtttcggtttcgatacggtttcggtcgttttgagtagtttcggtttcgggtgttgaggattcgtttcgtttttcggacgtagtttcggaattcgttcgttttcggagttttgcgttttcggtcgcgtttatttattgtcgtcgtcgggggttttggggggttttgagggcgtcggggaggaggttgtcgtcgttggtcgggagggttcgcgtcgagttttcgttcgttcgtcggttcggttcgttcgggaatgttttggagcgaggggcgtgcgttcgggggcgggttcggtcggagcggggcggtcgcgttgatttagagtttaggaatgcgcgtcgttcgtttgttcggtttaagttattttttttcggaaggtcgtcgggtttttttttttttagggttcgtttgcggggatatttggggttgggg

SEQ ID NO: 19782 - DNA, 556 bp, Artificial Sequence
  chemically treated genomic DNA (Homo sapiens) CpG-island No: 19782
ccccaaccccaaatatccccgcaaacgaaccctaaaaaaaaaaaaacccgacgaccttccgaaaaaaaataacttaaaccgaacaaacgaacgacgcgcattcctaaactctaaatcaacgcgaccgccccgctccgaccgaacccgcccccgaacgcacgcccctcgctccaaaacattcccgaacgaaccgaaccgacgaacgaacgaaaactcgacgcgaaccctcccgaccaacgacgacaacctcctccccgacgccctcaaaaccccccaaaacccccgacgacgacaataaataaacgcgaccgaaaacgcaaaactccgaaaacgaacgaattccgaaactacgtccgaaaaacgaaacgaatcctcaacacccgaaaccgaaactactcaaaacgaccgaaaccgtatcgaaaccgaaaccgaaaccgaaaaaaaatcgcgacgaaacccccccgaaacgaccgaacttttcttcctaaaatttcccgaatcgcccgcgaaaacgacccaaccccgaattcctaacccgacgcgccgcaaaaataac

SEQ ID NO: 19783 - DNA, 556 bp, Artificial Sequence
  chemically treated genomic DNA (Homo sapiens) CpG-island No: 19783
ttttagttttaggtgttttcgtaggcggattttggggagaagggagttcggcggtttttcgggaggaggtgatttgggtcgggtaggcgggcggcgcgtatttttgagttttgagttagcgcgatcgtttcgtttcggtcgggttcgttttcgggcgtacgtttttcgttttagggtattttcgggcgggtcggatcggcgggcgggcggggattcggcgcgggttttttcggttagcggcggtagtttttttttcggcgtttttaggattttttagagttttcggcggcggtagtgagtgagcgcggtcgggagcgtagggtttcgggggcgggcgggtttcggggttgcgttcggagggcggggcgagtttttagtattcggggtcggagttgtttagagcggtcggggtcgtgtcggggtcggggtcggggtcggggaggggtcgcggcgaggttttttcggggcggtcgggtttttttttttggagtttttcgagtcgttcgcggaggcggtttagtttcggatttttagttcggcgcgtcgtaaaaatagt

SEQ ID NO: 19784 - DNA, 556 bp, Artificial Sequence
  chemically treated genomic DNA (Homo sapiens) CpG-island No: 19784
actatttttacgacgcgccgaactaaaaatccgaaactaaaccgcctccgcgaacgactcgaaaaactccaaaaaaaaaaacccgaccgccccgaaaaaacctcgccgcgacccctccccgaccccgaccccgaccccgacacgaccccgaccgctctaaacaactccgaccccgaatactaaaaactcgccccgccctccgaacgcaaccccgaaacccgcccgcccccgaaaccctacgctcccgaccgcgctcactcactaccgccgccgaaaactctaaaaaatcctaaaaacgccgaaaaaaaaactaccgccgctaaccgaaaaaacccgcgccgaatccccgcccgcccgccgatccgacccgcccgaaaataccctaaaacgaaaaacgtacgcccgaaaacgaacccgaccgaaacgaaacgatcgcgctaactcaaaactcaaaaatacgcgccgcccgcctacccgacccaaatcacctcctcccgaaaaaccgccgaactcccttctccccaaaatccgcctacgaaaacacctaaaactaaaa

SEQ ID NO: 19785 - DNA, 657 bp, Artificial Sequence
  chemically treated genomic DNA (Homo sapiens) CpG-island No: 19785
tcgttttcgtttcgtaggtatcgtatcgggttcgggaatcggttcggatttggcggtgggcgttgggaagaggatttatttttacgtggttcgtttcgtttcgggggcgtagttagttttcggcgtttattgttttttttttttcggttttcgtttttttttgcgtaggcgtcgtttcgtttcggttttaggggtgttttcgtggtcggcggttgttgggtttcgcgtcggggttcgagttttacgaagtttcggttcgagtcgtcggatgttcgcgcgtagcggggtttaggtgagcgcgcgtttcggtcgtttcgcggaatagacgcgtttatttttaggcgtagtagcgagcgcggtcgcgggagcgggagtgtcggggacgggcgtagcgtttatcgtttcgagggttcggggtagagttagagtataggttaagggttaagttcgggtcgagagtagtggtcgtagcgttcgggggttgaatttacggcgcgttggtagcgcgggtcgagttgcggagacggttacgttagcgttcgttttaggtcgattggtagttttcgttttatattaacgttagtattttcgttaaaaataatgtattttttttatgttaggaggatttaggtgttgttaaagattagtttttcgggt

SEQ ID NO: 19786 - DNA, 657 bp, Artificial Sequence
  chemically treated genomic DNA (Homo sapiens) CpG-island No: 19786
acccgaaaaactaatctttaacaacacctaaatcctcctaacataaaaaaaatacattatttttaacgaaaatactaacgttaatataaaacgaaaactaccaatcgacctaaaacgaacgctaacgtaaccgtctccgcaactcgacccgcgctaccaacgcgccgtaaattcaacccccgaacgctacgaccactactctcgacccgaacttaacccttaacctatactctaactctaccccgaaccctcgaaacgataaacgctacgcccgtccccgacactcccgctcccgcgaccgcgctcgctactacgcctaaaaataaacgcgtctattccgcgaaacgaccgaaacgcgcgctcacctaaaccccgctacgcgcgaacatccgacgactcgaaccgaaacttcgtaaaactcgaaccccgacgcgaaacccaacaaccgccgaccacgaaaacacccctaaaaccgaaacgaaacgacgcctacgcaaaaaaaaacgaaaaccgaaaaaaaaaaaacaataaacgccgaaaactaactacgcccccgaaacgaaacgaaccacgtaaaaataaatcctcttcccaacgcccaccgccaaatccgaaccgattcccgaacccgatacgatacctacgaaacgaaaacga

SEQ ID NO: 19787 - DNA, 657 bp, Artificial Sequence
  chemically treated genomic DNA (Homo sapiens) CpG-island No: 19787
attcggagggttggtttttagtagtatttaagtttttttggtatgggagagatgtattatttttaacgggagtgttgacgttaatgtagaacggagattgttagtcggtttggaacggacgttgacgtgatcgttttcgtagttcggttcgcgttgttagcgcgtcgtgggtttagttttcgggcgttgcggttattgttttcggttcgagtttggtttttggtttatgttttggttttgtttcgaattttcggggcggtgggcgttacgttcgttttcggtattttcgttttcgcggtcgcgttcgttgttgcgtttgggggtgggcgcgtttgtttcgcggggcggtcgaggcgcgcgtttatttgggtttcgttgcgcgcgggtattcggcggttcgggtcggggtttcgtgggattcggatttcggcgcggagtttagtagtcgtcgattacggaagtatttttaggatcggggcggagcggcgtttgcgtagaaggggacggaagtcgggagaaggggggtagtgagcgtcgggaattggttgcgttttcggggcggggcgggttacgtggaggtggattttttttttagcgtttatcgttaggttcggatcgattttcgggttcgatgcggtgtttgcgaggcgagagcgg

SEQ ID NO: 19788 - DNA, 657 bp, Artificial Sequence
  chemically treated genomic DNA (Homo sapiens) CpG-island No: 19788
ccgctctcgcctcgcaaacaccgcatcgaacccgaaaatcgatccgaacctaacgataaacgctaaaaaaaaaatccacctccacgtaacccgccccgccccgaaaacgcaaccaattcccgacgctcactaccccccttctcccgacttccgtccccttctacgcaaacgccgctccgccccgatcctaaaaatacttccgtaatcgacgactactaaactccgcgccgaaatccgaatcccacgaaaccccgacccgaaccgccgaatacccgcgcgcaacgaaacccaaataaacgcgcgcctcgaccgccccgcgaaacaaacgcgcccacccccaaacgcaacaacgaacgcgaccgcgaaaacgaaaataccgaaaacgaacgtaacgcccaccgccccgaaaattcgaaacaaaaccaaaacataaaccaaaaaccaaactcgaaccgaaaacaataaccgcaacgcccgaaaactaaacccacgacgcgctaacaacgcgaaccgaactacgaaaacgatcacgtcaacgtccgttccaaaccgactaacaatctccgttctacattaacgtcaacactcccgttaaaaataatacatctctcccataccaaaaaaacttaaatactactaaaaaccaaccctccgaat

SEQ ID NO: 19789 - DNA, 670 bp, Artificial Sequence
  chemically treated genomic DNA (Homo sapiens) CpG-island No: 19789
ttttatcgtttcgtgtttttgtttttcgttggagtttggtgcggtttcggtgtttagggggcgtttttttcgtatgtcggtttttaggattttttttcgcgttcgggggattcgtcgaagttttggtttagttcgttttgagggcgttcgttttttttttttggtacgtagaattcgttaaaagagagtatttcggggggcgacgggcgttttttatttatcggtaggtggtttagattcgtgatttttttgtttttttagtttttaggtttcgttatggtttcgaggagtcgaacgggagcgggcgattgaattgggtgcgcgtagagtttgaggtggaagcggatgaagagttgaagggaggagagaggaaggaggagggcgggagagaggagtttggggatcggggttcgtggcgtgggagatagaggaggggaaacgtgtagtgaaaagagttgggagtggagggaaatcggagtttgcgaggcgggaaagtaagttgggttaaggcgagagaggagtttgagcgttagttttggagacgaagaagttagaagggtgtttcgtgtcgagagcgttgtgtttgtttcgttagggtgcgttttttttagggtggggaggggggcggtgtaaggagaggggattcgggagtagttcgaaagggattggt

SEQ ID NO: 19790 - DNA, 670 bp, Artificial Sequence
  chemically treated genomic DNA (Homo sapiens) CpG-island No: 19790
accaatccctttcgaactactcccgaatcccctctccttacaccgcccccctccccaccctaaaaaaaacgcaccctaacgaaacaaacacaacgctctcgacacgaaacacccttctaacttcttcgtctccaaaactaacgctcaaactcctctctcgccttaacccaacttactttcccgcctcgcaaactccgatttccctccactcccaactcttttcactacacgtttcccctcctctatctcccacgccacgaaccccgatccccaaactcctctctcccgccctcctccttcctctctcctcccttcaactcttcatccgcttccacctcaaactctacgcgcacccaattcaatcgcccgctcccgttcgactcctcgaaaccataacgaaacctaaaaactaaaaaaacaaaaaaatcacgaatctaaaccacctaccgataaataaaaaacgcccgtcgccccccgaaatactctcttttaacgaattctacgtaccaaaaaaaaaaaacgaacgccctcaaaacgaactaaaccaaaacttcgacgaatcccccgaacgcgaaaaaaaatcctaaaaaccgacatacgaaaaaaacgccccctaaacaccgaaaccgcaccaaactccaacgaaaaacaaaaacacgaaacgataaaa

SEQ ID NO: 19791 - DNA, 670 bp, Artificial Sequence
  chemically treated genomic DNA (Homo sapiens) CpG-island No: 19791
attaatttttttcgagttgttttcgggttttttttttttgtatcgtttttttttttattttgaaagaggcgtattttgacggggtagatatagcgttttcgatacggagtatttttttagttttttcgtttttaggattgacgtttaggtttttttttcgttttagtttaatttgttttttcgtttcgtaaatttcggtttttttttatttttaattttttttattatacgtttttttttttttattttttacgttacgaatttcgatttttagatttttttttttcgtttttttttttttttttttttttttttaattttttattcgtttttattttagattttgcgcgtatttaatttagtcgttcgttttcgttcggtttttcgaagttatggcgggatttgggggttggagggatagggaggttacggatttgggttatttgtcggtgagtagaggacgttcgtcgtttttcgaaatgtttttttttggcgggttttgcgtattagagggagggagcggacgtttttaaaacgggttagattaggatttcgacgggtttttcgggcgcggaaggggattttgggagtcggtatgcggaaaaggcgttttttgggtatcgggatcgtattaaattttaacgaaaggtaaaggtacggggcggtggga

SEQ ID NO: 19792 - DNA, 670 bp, Artificial Sequence
  chemically treated genomic DNA (Homo sapiens) CpG-island No: 19792
tcccaccgccccgtacctttacctttcgttaaaatttaatacgatcccgatacccaaaaaacgccttttccgcataccgactcccaaaatccccttccgcgcccgaaaaacccgtcgaaatcctaatctaacccgttttaaaaacgtccgctccctccctctaatacgcaaaacccgccaaaaaaaaacatttcgaaaaacgacgaacgtcctctactcaccgacaaataacccaaatccgtaacctccctatccctccaacccccaaatcccgccataacttcgaaaaaccgaacgaaaacgaacgactaaattaaatacgcgcaaaatctaaaataaaaacgaataaaaaattaaaaaaaaaaaaaaaaaaaaaaaaaaacgaaaaaaaaaaatctaaaaatcgaaattcgtaacgtaaaaaataaaaaaaaaaaaacgtataataaaaaaaattaaaaataaaaaaaaaccgaaatttacgaaacgaaaaaacaaattaaactaaaacgaaaaaaaaacctaaacgtcaatcctaaaaacgaaaaaactaaaaaaatactccgtatcgaaaacgctatatctaccccgtcaaaatacgcctctttcaaaataaaaaaaaaaacgatacaaaaaaaaaaaacccgaaaacaactcgaaaaaaattaat

SEQ ID NO: 19793 - DNA, 511 bp, Artificial Sequence
  chemically treated genomic DNA (Homo sapiens) CpG-island No: 19793
tcgggtttttagcgcgttgggtttttgtatcgttttcgttttttttcgttcgggtagcggttttttcgggcgtttagtggtggtggagtcgggggagagggaaatttaatcggtcgttttgtgttagagataaaagcgggttgtcggttttattgtttgacggagttttttttttgttttttgttatcgtttcgtcgtttcgttttttcgtagttttggaggtttttttttcggttaggttcgggtttcgcgttcgttatggagaagacggagttgatttagaaggttaagttggtcgagcgttacgacgatatggttatttgtatgaaggtcgggattaagtagggcgtcgagttgtttaaggaggagcgtaatttgtttttcgtggtttataagaacgtggtcggggtcgtaggttcgtttggggcgttatttggagtatcgagtagaatatttatattttcgataagaagttgtagttgattaaggattattatatagttgttttgag

SEQ ID NO: 19794 - DNA, 511 bp, Artificial Sequence
  chemically treated genomic DNA (Homo sapiens) CpG-island No: 19794
ctcaaaacaactatataataatccttaatcaactacaacttcttatcgaaaatataaatattctactcgatactccaaataacgccccaaacgaacctacgaccccgaccacgttcttataaaccacgaaaaacaaattacgctcctccttaaacaactcgacgccctacttaatcccgaccttcatacaaataaccatatcgtcgtaacgctcgaccaacttaaccttctaaatcaactccgtcttctccataacgaacgcgaaacccgaacctaaccgaaaaaaaaacctccaaaactacgaaaaaacgaaacgacgaaacgataacaaaaaacaaaaaaaaaactccgtcaaacaataaaaccgacaacccgcttttatctctaacacaaaacgaccgattaaatttccctctcccccgactccaccaccactaaacgcccgaaaaaaccgctacccgaacgaaaaaaaacgaaaacgatacaaaaacccaacgcgctaaaaacccga

SEQ ID NO: 19795 - DNA, 511 bp, Artificial Sequence
  chemically treated genomic DNA (Homo sapiens) CpG-island No: 19795
tttaaagtaattgtatgatagtttttaattagttgtaattttttgtcggaggtgtaggtattttgttcgatgttttagatgacgttttaggcggatttgcggtttcgattacgtttttgtaggttacggaaagtaggttgcgtttttttttggatagttcggcgttttgtttggtttcggtttttatgtaggtggttatgtcgtcgtagcgttcggttaatttggttttttggattagtttcgttttttttatggcgggcgcggggttcgggtttggtcggggagggagtttttagagttgcggaggggcggggcggcgaggcgataataaaaagtagggagggagtttcgttagataatggggtcggtagttcgtttttatttttggtataaggcggtcggttgaatttttttttttttcgattttattattattgggcgttcggggaggtcgttgttcgggcgggaggaggcgggggcggtgtagaggtttagcgcgttgggagttcga

SEQ ID NO: 19796 - DNA, 511 bp, Artificial Sequence
  chemically treated genomic DNA (Homo sapiens) CpG-island No: 19796
tcgaactcccaacgcgctaaacctctacaccgcccccgcctcctcccgcccgaacaacgacctccccgaacgcccaataataataaaatcgaaaaaaaaaaaaattcaaccgaccgccttataccaaaaataaaaacgaactaccgaccccattatctaacgaaactccctccctactttttattatcgcctcgccgccccgcccctccgcaactctaaaaactccctccccgaccaaacccgaaccccgcgcccgccataaaaaaaacgaaactaatccaaaaaaccaaattaaccgaacgctacgacgacataaccacctacataaaaaccgaaaccaaacaaaacgccgaactatccaaaaaaaaacgcaacctactttccgtaacctacaaaaacgtaatcgaaaccgcaaatccgcctaaaacgtcatctaaaacatcgaacaaaatacctacacctccgacaaaaaattacaactaattaaaaactatcatacaattactttaaa

SEQ ID NO: 19797 - DNA, 989 bp, Artificial Sequence
  chemically treated genomic DNA (Homo sapiens) CpG-island No: 19797
tcggggtcgattttatttttcgcgttttaagtcgattcgtttttttagggtagggtttgttcgcgaatagttcggcgagacgagcgcggtcgcgtttttagtttcgggcgttcgggtttcggcgcggcggcggggtaggagtagattggtcgggtcgggcgtcgaacgcggcggcgcggggggggttgtaatcggtcgcggcgcgtttttttttagggtttgcgtcgttcgttcgcggtttcgcgggaaagaagcgtcggaaaaggtttcgtttcggtttggggcgcggggtcgggggcgcggggttaggggaggcgtttcgggaaggttacgggagcggaggcgcggcgagtggatcgcggcgcggtgggtgcggggagtcgaggcgggcggttttcgtcgtcgggagcgttcgtcggttttggtcgtcgtcgtcgttttcgagatgcgtcggtttttcggagcgttcggcgttcggagttgggcggtcgttgtagtcgtcgcgggtagtcgggcgtcgttggtcggagtcggcgcgcgattttcgtttttcgcgttcggttaggagtgggtcgtcgcgcgggaatcggtaggggcgggcgttggggttcgggtttcgggttggtttcgtcgttttcgcgtgtttagagcgtcggattcgtttagtagttgtagtgattgtgtgtttgtgttatgtttgtgtagtcgggggggatcgcgagtcggggttgggtttcgagcgggggcggggtcggcgttcgcgtcggcgttcgttttcgatttcgtgatcgagcggtcggttaatggtaagcgtcgtagtcgcgcggatcgagagttcgttttcgtataggtttcgtttttcggcgagatttcgtttcggtgtttttttagttcgttggttggtaggtaggcggaagtaatattcggagtcgggatttcgggtcgggtcgggatgaaagggtgtaagttgggagtttttcgtttttttt

SEQ ID NO: 19798 - DNA, 989 bp, Artificial Sequence
  chemically treated genomic DNA (Homo sapiens) CpG-island No: 19798
aaaaaaaacgaaaaactcccaacttacaccctttcatcccgacccgacccgaaatcccgactccgaatattacttccgcctacctaccaaccaacgaactaaaaaaacaccgaaacgaaatctcgccgaaaaacgaaacctatacgaaaacgaactctcgatccgcgcgactacgacgcttaccattaaccgaccgctcgatcacgaaatcgaaaacgaacgccgacgcgaacgccgaccccgcccccgctcgaaacccaaccccgactcgcgatcccccccgactacacaaacataacacaaacacacaatcactacaactactaaacgaatccgacgctctaaacacgcgaaaacgacgaaaccaacccgaaacccgaaccccaacgcccgcccctaccgattcccgcgcgacgacccactcctaaccgaacgcgaaaaacgaaaatcgcgcgccgactccgaccaacgacgcccgactacccgcgacgactacaacgaccgcccaactccgaacgccgaacgctccgaaaaaccgacgcatctcgaaaacgacgacgacgaccaaaaccgacgaacgctcccgacgacgaaaaccgcccgcctcgactccccgcacccaccgcgccgcgatccactcgccgcgcctccgctcccgtaaccttcccgaaacgcctcccctaaccccgcgcccccgaccccgcgccccaaaccgaaacgaaaccttttccgacgcttctttcccgcgaaaccgcgaacgaacgacgcaaaccctaaaaaaaaacgcgccgcgaccgattacaaccccccccgcgccgccgcgttcgacgcccgacccgaccaatctactcctaccccgccgccgcgccgaaacccgaacgcccgaaactaaaaacgcgaccgcgctcgtctcgccgaactattcgcgaacaaaccctaccctaaaaaaacgaatcgacttaaaacgcgaaaaataaaatcgaccccga

SEQ ID NO: 19799 - DNA, 989 bp, Artificial Sequence
  chemically treated genomic DNA (Homo sapiens) CpG-island No: 19799
aagaagggcggggagtttttagtttgtatttttttatttcgattcggttcgggatttcggtttcgggtgttgttttcgtttgtttgttagttagcgagttgaagaagtatcggggcggagtttcgtcggggggcggagtttgtgcgggggcgaattttcggttcgcgcggttgcggcgtttgttattggtcggtcgttcggttacggggtcgggggcgggcgtcgacgcgggcgtcggtttcgttttcgttcggaatttagtttcggttcgcggtttttttcggttgtatagatatgatatagatatatagttattgtagttgttgagcgagttcggcgttttgggtacgcggaggcggcggggttagttcggagttcggattttagcgttcgtttttgtcggttttcgcgcggcggtttatttttggtcgggcgcgggaggcggggatcgcgcgtcggtttcggttagcggcgttcggttgttcgcggcggttgtagcggtcgtttagtttcgagcgtcgggcgtttcgggaagtcggcgtatttcggaggcggcggcggcggttaaggtcggcgagcgttttcggcggcgggggtcgttcgtttcggtttttcgtatttatcgcgtcgcgatttattcgtcgcgttttcgttttcgtgattttttcggggcgttttttttagtttcgcgttttcggtttcgcgttttaggtcggggcgaggtttttttcggcgtttttttttcgcggagtcgcgggcgggcggcgtaggttttgggggagagcgcgtcgcggtcggttgtagtttttttcgcgtcgtcgcgttcggcgttcggttcggttagtttgtttttgtttcgtcgtcgcgtcggagttcgggcgttcgaagttgggggcgcggtcgcgttcgtttcgtcgggttgttcgcgggtaggttttgttttgaagggacgaatcggtttggagcgcgggaggtggagtcggtttcgg

SEQ ID NO: 19800 - DNA, 989 bp, Artificial Sequence
  chemically treated genomic DNA (Homo sapiens) CpG-island No: 19800
ccgaaaccgactccacctcccgcgctccaaaccgattcgtcccttcaaaacaaaacctacccgcgaacaacccgacgaaacgaacgcgaccgcgcccccaacttcgaacgcccgaactccgacgcgacgacgaaacaaaaacaaactaaccgaaccgaacgccgaacgcgacgacgcgaaaaaaactacaaccgaccgcgacgcgctctcccccaaaacctacgccgcccgcccgcgactccgcgaaaaaaaaacgccgaaaaaaacctcgccccgacctaaaacgcgaaaccgaaaacgcgaaactaaaaaaaacgccccgaaaaaatcacgaaaacgaaaacgcgacgaataaatcgcgacgcgataaatacgaaaaaccgaaacgaacgacccccgccgccgaaaacgctcgccgaccttaaccgccgccgccgcctccgaaatacgccgacttcccgaaacgcccgacgctcgaaactaaacgaccgctacaaccgccgcgaacaaccgaacgccgctaaccgaaaccgacgcgcgatccccgcctcccgcgcccgaccaaaaataaaccgccgcgcgaaaaccgacaaaaacgaacgctaaaatccgaactccgaactaaccccgccgcctccgcgtacccaaaacgccgaactcgctcaacaactacaataactatatatctatatcatatctatacaaccgaaaaaaaccgcgaaccgaaactaaattccgaacgaaaacgaaaccgacgcccgcgtcgacgcccgcccccgaccccgtaaccgaacgaccgaccaataacaaacgccgcaaccgcgcgaaccgaaaattcgcccccgcacaaactccgccccccgacgaaactccgccccgatacttcttcaactcgctaactaacaaacaaacgaaaacaacacccgaaaccgaaatcccgaaccgaatcgaaataaaaaaatacaaactaaaaactccccgcccttctt

SEQ ID NO: 19801 - DNA, 513 bp, Artificial Sequence
  chemically treated genomic DNA (Homo sapiens) CpG-island No: 19801
ggtacgggcgggcgggaattggaggtcgcgcgggcggttttatagtttcgggtcgggttagggcggcggttgcgggggcggtcgggttggggtcgggtcggggtttgattgatcggtcggtgatttttcgtagaggatttcgtgttttagtttaagggtatgtgttattttattaacgggatcgagcgcgtgcggggtgtgattagatatatttataatcgagaggagtacgcgcgtttcgatagcgacgtgggggtgtatcgggcggtgacgtcgttggggcggtttgacgtcgagtattggaatagttagaaggatattttggaggaggatcgggcgtcggtggatatcgtatgtagatataattattagttggagtttcgtacgattttgtagcggcgaggtgagcgtcgtcgttcgtttgcgaggtttatttttggtaggggtttagagtttttgcgttaggaggggcgaagggggcgcggtttttggaatttgagttttgttcgtttt

SEQ ID NO: 19802 - DNA, 513 bp, Artificial Sequence
  chemically treated genomic DNA (Homo sapiens) CpG-island No: 19802
aaaacgaacaaaactcaaattccaaaaaccgcgcccccttcgcccctcctaacgcaaaaactctaaacccctaccaaaaataaacctcgcaaacgaacgacgacgctcacctcgccgctacaaaatcgtacgaaactccaactaataattatatctacatacgatatccaccgacgcccgatcctcctccaaaatatccttctaactattccaatactcgacgtcaaaccgccccaacgacgtcaccgcccgatacacccccacgtcgctatcgaaacgcgcgtactcctctcgattataaatatatctaatcacaccccgcacgcgctcgatcccgttaataaaataacacatacccttaaactaaaacacgaaatcctctacgaaaaatcaccgaccgatcaatcaaaccccgacccgaccccaacccgaccgcccccgcaaccgccgccctaacccgacccgaaactataaaaccgcccgcgcgacctccaattcccgcccgcccgtacc

SEQ ID NO: 19803 - DNA, 513 bp, Artificial Sequence
  chemically treated genomic DNA (Homo sapiens) CpG-island No: 19803
ggaacgaataaggtttaggttttagaggtcgcgtttttttcgttttttttggcgtagagattttgggtttttgttaaggatgggtttcgtagacgggcgacgacgtttatttcgtcgttgtaaggtcgtgcggagttttaattggtagttgtgtttgtatacggtgtttatcgacgttcggtttttttttaggatgtttttttggttattttagtattcggcgttaagtcgttttagcggcgttatcgttcgatatatttttacgtcgttgtcgaagcgcgcgtatttttttcggttatagatgtatttggttatatttcgtacgcgttcggtttcgttggtgaagtagtatatgtttttaaattggaatacgaaattttttgcggggaattatcggtcggttagttaggtttcggttcggttttagttcggtcgttttcgtagtcgtcgttttgattcggttcggagttgtggaatcgttcgcgcgatttttagttttcgttcgttcgtgtt

SEQ ID NO: 19804 - DNA, 513 bp, Artificial Sequence
  chemically treated genomic DNA (Homo sapiens) CpG-island No: 19804
aacacgaacgaacgaaaactaaaaatcgcgcgaacgattccacaactccgaaccgaatcaaaacgacgactacgaaaacgaccgaactaaaaccgaaccgaaacctaactaaccgaccgataattccccgcaaaaaatttcgtattccaatttaaaaacatatactacttcaccaacgaaaccgaacgcgtacgaaatataaccaaatacatctataaccgaaaaaaatacgcgcgcttcgacaacgacgtaaaaatatatcgaacgataacgccgctaaaacgacttaacgccgaatactaaaataaccaaaaaaacatcctaaaaaaaaaccgaacgtcgataaacaccgtatacaaacacaactaccaattaaaactccgcacgaccttacaacgacgaaataaacgtcgtcgcccgtctacgaaacccatccttaacaaaaacccaaaatctctacgccaaaaaaaacgaaaaaaacgcgacctctaaaacctaaaccttattcgttcc

SEQ ID NO: 19805 - DNA, 501 bp, Artificial Sequence
  chemically treated genomic DNA (Homo sapiens) CpG-island No: 19805
gatatttatttcgtcgggaaggcgtcgatgtcgggttattgttcggggggttgtcgcgggcgggggcggttcgtcggggcggatgtcggaggattcgcggagtcgttcggcgcgttagtttttttcggtttagtcgtcgtcgtcgtcgtcgtcgtcgcgtttcgttcggtttcggtcgggttttggttttgggttttcgtcgtcgtcgtcgtcgtcgtcgtcgtttttttttcggtttttgttcgttcgttcgttttcgtcgtcggttcgcgcgttttcgtatcgcgcgcgttcgtcggtttttattgagtttcgggttcgttcgttgatgttattttcggttcgtcgtcgtcgtttcggaggatttaaagggttcgcgtttttcgcgttgggggtcgtagttgcgagacgtagttttttagttttagtgtaggcgcgcgggtttacgcgtgggggtgggggagtatatagatattgatattttaatgtagtttagggtat

SEQ ID NO: 19806 - DNA, 501 bp, Artificial Sequence
  chemically treated genomic DNA (Homo sapiens) CpG-island No: 19806
ataccctaaactacattaaaatatcaatatctatatactcccccacccccacgcgtaaacccgcgcgcctacactaaaactaaaaaactacgtctcgcaactacgacccccaacgcgaaaaacgcgaaccctttaaatcctccgaaacgacgacgacgaaccgaaaataacatcaacgaacgaacccgaaactcaataaaaaccgacgaacgcgcgcgatacgaaaacgcgcgaaccgacgacgaaaacgaacgaacgaacaaaaaccgaaaaaaaaacgacgacgacgacgacgacgacgacgaaaacccaaaaccaaaacccgaccgaaaccgaacgaaacgcgacgacgacgacgacgacgacgactaaaccgaaaaaaactaacgcgccgaacgactccgcgaatcctccgacatccgccccgacgaaccgcccccgcccgcgacaaccccccgaacaataacccgacatcgacgccttcccgacgaaataaatatc

SEQ ID NO: 19807 - DNA, 501 bp, Artificial Sequence
  chemically treated genomic DNA (Homo sapiens) CpG-island No: 19807
gtgttttggattgtattagggtgttagtatttgtgtgtttttttatttttacgcgtaagttcgcgcgtttgtattgaggttggggaattgcgtttcgtagttgcggtttttagcgcggagggcgcgggttttttaaatttttcggggcggcggcggcgggtcggggatgatattagcgggcgggttcggggtttaatgggagtcggcgggcgcgcgcggtgcgagagcgcgcgagtcggcggcgggggcgggcgggcgggtagaagtcgggagaggagcggcggcggcggcggcggcggcggcgagagtttagagttagagttcggtcggggtcgagcggagcgcggcggcggcggcggcggcggcggttgggtcgggagaggttggcgcgtcgggcggtttcgcgaatttttcggtattcgtttcggcgggtcgttttcgttcgcggtagtttttcgagtagtggttcggtatcggcgttttttcggcggggtaaatatt

SEQ ID NO: 19808 - DNA, 501 bp, Artificial Sequence
  chemically treated genomic DNA (Homo sapiens) CpG-island No: 19808
aatatttaccccgccgaaaaaacgccgataccgaaccactactcgaaaaactaccgcgaacgaaaacgacccgccgaaacgaataccgaaaaattcgcgaaaccgcccgacgcgccaacctctcccgacccaaccgccgccgccgccgccgccgccgcgctccgctcgaccccgaccgaactctaactctaaactctcgccgccgccgccgccgccgccgccgctcctctcccgacttctacccgcccgcccgcccccgccgccgactcgcgcgctctcgcaccgcgcgcgcccgccgactcccattaaaccccgaacccgcccgctaatatcatccccgacccgccgccgccgccccgaaaaatttaaaaaacccgcgccctccgcgctaaaaaccgcaactacgaaacgcaattccccaacctcaatacaaacgcgcgaacttacgcgtaaaaataaaaaaacacacaaatactaacaccctaatacaatccaaaacac

SEQ ID NO: 19809 - DNA, 1301 bp, Artificial Sequence
  chemically treated genomic DNA (Homo sapiens) CpG-island No: 19809
gaatttttttcgatagaggttcgcgtagtgttgtgttttttttcgggattagaatttttttcgatagaggttcgcgtagtgttgtgttttttttcgggattagaatttttttttatagaggttcgcgtagtgtcgtgttttttttcgggattagaatttttttttgatagaggttcgcgtagtgtcgtgttttttttcgggattagaatttttttttatagaggttcgcgtagtgtcgtgttttttttcgggattagaatttttttttgatagaggttcgcgtagtgtcgtgttttttttcgggattagaatttttttttatagaggttcgcgtagtgtcgtgttttttttcgggattagaatttttttttatagaggttcgcgtagtgtcgtgttttttttcgggattagaatttttttttgatagaggttcgcgtagtgtcgtgttttttttcgggattagaatttttttttatagaggttcgcgtagtgttgtgttttttttcggggttagaatttttttttatagaggttcgcgtagtgttgtgttttttttcgggattagaatttttttttgatagaggttcgcgtagtgtcgtgttttttttcgggattagaatttttttttatagaggttcgcgtagtgttgtgttttttttcggggttagaatttttttttatagaggttcgcgtagtgttgtgttttttttcgggattagaatttttttttgatagaggttcgcgtagtgtcgtgttttttttcgggattagaatttttttttatagaggttcgcgtagtgttgtgttttttttcggggttagaatttttttttataaaagttcgcgtagtgttgtgttttttttcgggattagaatttttttttgatagaggttcgcgtagtgttgtgttttttttcgggattagaatttttttttatagaggttcgcgtagtgttgtgttttttttcgggattagaatttttttttatagaggttcgcgtagtgtcgtgtttttttttgggattagaatttttttttatagaggttcgcgtagtgttgtgttttttttcgggattagaatttttttttgatagaggttcgcgtagtgtcgtgttttttttcgggattagaatttttttttatagaggttcgcgtagtgttgtgttttttttcggggttagaatttttttttatagaggttcgcgtagtgttgtgttttttttcgggattagaatttttttttgatagaggttcgcgtagtgttgtgttttttttcgggattagaatttttttttatagag

SEQ ID NO: 19810 - DNA, 1301 bp, Artificial Sequence
  chemically treated genomic DNA (Homo sapiens) CpG-island No: 19810
ctctataaaaaaaaattctaatcccgaaaaaaaacacaacactacgcgaacctctatcaaaaaaaaattctaatcccgaaaaaaaacacaacactacgcgaacctctataaaaaaaaattctaaccccgaaaaaaaacacaacactacgcgaacctctataaaaaaaaattctaatcccgaaaaaaaacacgacactacgcgaacctctatcaaaaaaaaattctaatcccgaaaaaaaacacaacactacgcgaacctctataaaaaaaaattctaatcccaaaaaaaaacacgacactacgcgaacctctataaaaaaaaattctaatcccgaaaaaaaacacaacactacgcgaacctctataaaaaaaaattctaatcccgaaaaaaaacacaacactacgcgaacctctatcaaaaaaaaattctaatcccgaaaaaaaacacaacactacgcgaacttttataaaaaaaaattctaaccccgaaaaaaaacacaacactacgcgaacctctataaaaaaaaattctaatcccgaaaaaaaacacgacactacgcgaacctctatcaaaaaaaaattctaatcccgaaaaaaaacacaacactacgcgaacctctataaaaaaaaattctaaccccgaaaaaaaacacaacactacgcgaacctctataaaaaaaaattctaatcccgaaaaaaaacacgacactacgcgaacctctatcaaaaaaaaattctaatcccgaaaaaaaacacaacactacgcgaacctctataaaaaaaaattctaaccccgaaaaaaaacacaacactacgcgaacctctataaaaaaaaattctaatcccgaaaaaaaacacgacactacgcgaacctctatcaaaaaaaaattctaatcccgaaaaaaaacacgacactacgcgaacctctataaaaaaaaattctaatcccgaaaaaaaacacgacactacgcgaacctctataaaaaaaaattctaatcccgaaaaaaaacacgacactacgcgaacctctatcaaaaaaaaattctaatcccgaaaaaaaacacgacactacgcgaacctctataaaaaaaaattctaatcccgaaaaaaaacacgacactacgcgaacctctatcaaaaaaaaattctaatcccgaaaaaaaacacgacactacgcgaacctctataaaaaaaaattctaatcccgaaaaaaaacacaacactacgcgaacctctatcgaaaaaaattctaatcccgaaaaaaaacacaacactacgcgaacctctatcgaaaaaaattc

SEQ ID NO: 19811 - DNA, 1301 bp, Artificial Sequence
  chemically treated genomic DNA (Homo sapiens) CpG-island No: 19811
ttttatggaaaaggattttggtttcgggaaggggtatagtattgcgcggatttttattaaaaaaggattttggtttcgggaaggggtatagtattgcgcggatttttatggaaaaggattttggtttcgggaaggggtatagtattgcgcggatttttatggaaaaggattttggtttcgggaaggggtacggtattgcgcggatttttattaaaaaaggattttggtttcgggaaggggtatagtattgcgcggatttttatggaaaaggattttggttttaggaaggggtacggtattgcgcggatttttatggaaaaggattttggtttcgggaaggggtatagtattgcgcggatttttatggaaaaggattttggtttcgggaaggggtatagtattgcgcggatttttattaaaaaaggattttggtttcgggaaggggtatagtattgcgcggatttttatggaaaaggattttggtttcgggaaggggtatagtattgcgcggatttttatggaaaaggattttggtttcgggaaggggtacggtattgcgcggatttttattaaaaaaggattttggtttcgggaaggggtatagtattgcgcggatttttatggaaaaggattttggtttcgggaaggggtatagtattgcgcggatttttatggaaaaggattttggtttcgggaaggggtacggtattgcgcggatttttattaaaaaaggattttggtttcgggaaggggtatagtattgcgcggatttttatggaaaaggattttggtttcgggaaggggtatagtattgcgcggatttttatggaaaaggattttggtttcgggaaggggtacggtattgcgcggatttttattaaaaaaggattttggtttcgggaaggggtacggtattgcgcggatttttatggaaaaggattttggtttcgggaaggggtacggtattgcgcggatttttatggaaaaggattttggtttcgggaaggggtacggtattgcgcggatttttattaaaaaaggattttggtttcgggaaggggtacggtattgcgcggatttttatggaaaaggattttggtttcgggaaggggtacggtattgcgcggatttttattaaaaaaggattttggtttcgggaaggggtacggtattgcgcggatttttatggaaaaggattttggtttcgggaaggggtatagtattgcgcggatttttatcgaaaaggattttggtttcgggaaggggtatagtattgcgcggatttttatcgaaaaggattt

SEQ ID NO: 19812 - DNA, 1301 bp, Artificial Sequence
  chemically treated genomic DNA (Homo sapiens) CpG-island No: 19812
aaatccttttcgataaaaatccgcgcaatactataccccttcccgaaaccaaaatccttttcgataaaaatccgcgcaatactataccccttcccgaaaccaaaatccttttccataaaaatccgcgcaataccgtaccccttcccgaaaccaaaatccttttttaataaaaatccgcgcaataccgtaccccttcccgaaaccaaaatccttttccataaaaatccgcgcaataccgtaccccttcccgaaaccaaaatccttttttaataaaaatccgcgcaataccgtaccccttcccgaaaccaaaatccttttccataaaaatccgcgcaataccgtaccccttcccgaaaccaaaatccttttccataaaaatccgcgcaataccgtaccccttcccgaaaccaaaatccttttttaataaaaatccgcgcaataccgtaccccttcccgaaaccaaaatccttttccataaaaatccgcgcaatactataccccttcccgaaaccaaaatccttttccataaaaatccgcgcaatactataccccttcccgaaaccaaaatccttttttaataaaaatccgcgcaataccgtaccccttcccgaaaccaaaatccttttccataaaaatccgcgcaatactataccccttcccgaaaccaaaatccttttccataaaaatccgcgcaatactataccccttcccgaaaccaaaatccttttttaataaaaatccgcgcaataccgtaccccttcccgaaaccaaaatccttttccataaaaatccgcgcaatactataccccttcccgaaaccaaaatccttttccataaaaatccgcgcaatactataccccttcccgaaaccaaaatccttttttaataaaaatccgcgcaatactataccccttcccgaaaccaaaatccttttccataaaaatccgcgcaatactataccccttcccgaaaccaaaatccttttccataaaaatccgcgcaataccgtaccccttcctaaaaccaaaatccttttccataaaaatccgcgcaatactataccccttcccgaaaccaaaatccttttttaataaaaatccgcgcaataccgtaccccttcccgaaaccaaaatccttttccataaaaatccgcgcaatactataccccttcccgaaaccaaaatccttttccataaaaatccgcgcaatactataccccttcccgaaaccaaaatccttttttaataaaaatccgcgcaatactataccccttcccgaaaccaaaatccttttccataaaa

SEQ ID NO: 19813 - DNA, 780 bp, Artificial Sequence
  chemically treated genomic DNA (Homo sapiens) CpG-island No: 19813
tcgtgttatatattttttttacgttatatattttttttacgttatatatttttttttttacgttatatattttttttacgttatatattttttttacgttatatattttttttacgttatatatttttttatgttatatattttttttacgttttttacgttatatattttttttacgttatatattttttttacgttatatattttttttacgttatatatttttttacgttatatattttttttacgttatatatttttttttttacgttatatattttttttacgttatatattttttttacgttatatattttttttacgttatatatttttttatgttatatattttttttacgttttttacgttatatattttttttacgttatatattttttttacgttatatattttttttacgttatatatttttttacgttatatattttttttacgttatatattttttttatattatatattttttttatgttttttatgttatataagtttttttacgttatatatttttttttacgttatatattttttttacgttttttatgttatatattttttttacgttatatatttttttttacgttatatatttttttttatgttttttacgttatatattttttttacgttttttatattatatattttttttacgttatatattttttttatgttatataattttttttattttatatatttttttttacgttatatatttttttatgtcgtatatttttttttaagttatataattg

SEQ ID NO: 19814 - DNA, 780 bp, Artificial Sequence
  chemically treated genomic DNA (Homo sapiens) CpG-island No: 19814
caattatataacttaaaaaaaaatatacgacataaaaaaatatataacgtaaaaaaaaatatataaaataaaaaaaattatataacataaaaaaaatatataacgtaaaaaaaatatataatataaaaaacgtaaaaaaaatatataacgtaaaaaacataaaaaaaaatatataacgtaaaaaaaaatatataacgtaaaaaaaatatataacataaaaaacgtaaaaaaaatatataacgtaaaaaaaaatatataacgtaaaaaaacttatataacataaaaaacataaaaaaaatatataatataaaaaaaatatataacgtaaaaaaaatatataacgtaaaaaaatatataacgtaaaaaaaatatataacgtaaaaaaaatatataacgtaaaaaaaatatataacgtaaaaaacgtaaaaaaaatatataacataaaaaaatatataacgtaaaaaaaatatataacgtaaaaaaaatatataacgtaaaaaaaatatataacgtaaaaaaaaaaatatataacgtaaaaaaaatatataacgtaaaaaaatatataacgtaaaaaaaatatataacgtaaaaaaaatatataacgtaaaaaaaatatataacgtaaaaaacgtaaaaaaaatatataacataaaaaaatatataacgtaaaaaaaatatataacgtaaaaaaaatatataacgtaaaaaaaatatataacgtaaaaaaaaaaatatataacgtaaaaaaaatatataacgtaaaaaaaatatataacacga

SEQ ID NO: 19815 - DNA, 780 bp, Artificial Sequence
  chemically treated genomic DNA (Homo sapiens) CpG-island No: 19815
tagttgtatggtttgggagggggtgtacggtatggaggggtgtatggcgtgggagggggtgtatggggtgggaggggttgtatggtataggaggggtgtatggcgtgggaggggtgtatggtgtgggaggcgtgggaggggtatatggcgtgggaggtatgggaaggggtgtatggcgtgggagggggtgtatggcgtgggaggggtgtatggtatgggaggcgtgggagggatgtatggcgtgggagggggtgtatggcgtgggagggtttgtatggtatgggaggtatgggaggagtgtatggtgtgggaggggtgtatggcgtgggaggggtgtatggcgtgggagggtgtatggcgtgggaggggtatatggcgtgggaggggtgtatggcgtgggaggggtgtatggcgtgggaggcgtgggaggggtgtatggtatgggagggtgtatggcgtgggaggggtgtatggcgtgggaggagtgtatggcgtgggaggggtgtatggcgtgggagggagggtgtatggcgtgggaggggtgtatggcgtgggagggtgtatggcgtgggaggggtatatggcgtgggaggggtgtatggcgtgggaggggtgtatggcgtgggaggcgtgggaggggtgtatggtatgggagggtgtatggcgtgggaggggtgtatggcgtgggaggagtgtatggcgtgggaggggtgtatggcgtgggagggagggtgtatggcgtgggaggggtgtatggcgtgggaggggtgtatggtacgg

SEQ ID NO: 19816 - DNA, 780 bp, Artificial Sequence
  chemically treated genomic DNA (Homo sapiens) CpG-island No: 19816
ccgtaccatacacccctcccacgccatacacccctcccacgccatacaccctccctcccacgccatacacccctcccacgccatacactcctcccacgccatacacccctcccacgccatacaccctcccataccatacacccctcccacgcctcccacgccatacacccctcccacgccatacacccctcccacgccatatacccctcccacgccatacaccctcccacgccatacacccctcccacgccatacaccctccctcccacgccatacacccctcccacgccatacactcctcccacgccatacacccctcccacgccatacaccctcccataccatacacccctcccacgcctcccacgccatacacccctcccacgccatacacccctcccacgccatatacccctcccacgccatacaccctcccacgccatacacccctcccacgccatacacccctcccacaccatacactcctcccatacctcccataccatacaaaccctcccacgccatacaccccctcccacgccatacatccctcccacgcctcccataccatacacccctcccacgccatacaccccctcccacgccatacaccccttcccatacctcccacgccatatacccctcccacgcctcccacaccatacacccctcccacgccatacacccctcctataccatacaacccctcccaccccatacaccccctcccacgccatacacccctccataccgtacaccccctcccaaaccatacaacta

SEQ ID NO: 19817 - DNA, 690 bp, Artificial Sequence
  chemically treated genomic DNA (Homo sapiens) CpG-island No: 19817
ggtttatacggttttttttggcgtcgagatttagttttttcgggttatttcggttaggtacgattagtagggttatttgcgcgcgtttttcgagacggggttttttgatgtgaagcgattttagtggtattttatacgattttcgagggttgcgggcggtttttttttagttttgtagtttttatacgcggatatcgcgggtttcggttatgtttattgatcgatttttttcgtcggaatttttcgcgtatcgtcggttttttagcggcgattagcgcgcgaatattttggaagacgcgttgtcggttttacgtgagtcgacgttttaaagcgcggttgttggcgtcggttacgagattaaggtcggcgcgtgcgcgtttgcgcgagatcggtatttttagtttcgcgtcggtttttagggagttgggcgtatgcgtcgcgtaaggggttcggtcggcggaaggaggtgttattgtcggaagcgtcggcgcgtttgcgtagtagttgaacgcgggcgttttttttttttttttttttcgaattggttttgggggtagattcgagttataaaatggtcgttcggagcgtgttcggcgcggtttttttagttgtttttggttgaatcggcgttttcgtttttttgtcgaatatagcgtgaggagtttttttagggatatggtgtttgagttt

SEQ ID NO: 19818 - DNA, 690 bp, Artificial Sequence
  chemically treated genomic DNA (Homo sapiens) CpG-island No: 19818
aaactcaaacaccatatccctaaaaaaactcctcacgctatattcgacaaaaaaacgaaaacgccgattcaaccaaaaacaactaaaaaaaccgcgccgaacacgctccgaacgaccattttataactcgaatctacccccaaaaccaattcgaaaaaaaaaaaaaaaaaaaacgcccgcgttcaactactacgcaaacgcgccgacgcttccgacaataacacctccttccgccgaccgaaccccttacgcgacgcatacgcccaactccctaaaaaccgacgcgaaactaaaaataccgatctcgcgcaaacgcgcacgcgccgaccttaatctcgtaaccgacgccaacaaccgcgctttaaaacgtcgactcacgtaaaaccgacaacgcgtcttccaaaatattcgcgcgctaatcgccgctaaaaaaccgacgatacgcgaaaaattccgacgaaaaaaatcgatcaataaacataaccgaaacccgcgatatccgcgtataaaaactacaaaactaaaaaaaaaccgcccgcaaccctcgaaaatcgtataaaataccactaaaatcgcttcacatcaaaaaaccccgtctcgaaaaacgcgcgcaaataaccctactaatcgtacctaaccgaaataacccgaaaaaactaaatctcgacgccaaaaaaaaccgtataaacc

SEQ ID NO: 19819 - DNA, 690 bp, Artificial Sequence
  chemically treated genomic DNA (Homo sapiens) CpG-island No: 19819
agatttaaatattatatttttgggggggttttttacgttgtgttcggtagggaggcgagagcgtcggtttagttagagatagttgggggaatcgcgtcgaatacgtttcgggcggttattttgtaattcgaatttatttttaaaattaattcgaaaaaaagggaggaaagaaacgttcgcgtttagttattgcgtaagcgcgtcggcgttttcggtagtagtattttttttcgtcggtcgggttttttacgcggcgtatgcgtttagttttttggaaatcggcgcggggttgagaatgtcggtttcgcgtaagcgcgtacgcgtcgattttgatttcgtagtcggcgttagtagtcgcgttttggggcgtcggtttacgtggggtcggtaacgcgttttttaggatgttcgcgcgttagtcgtcgttgaggggtcggcgatgcgcgaggagtttcggcgaggaaggtcggttagtggatatggtcgaggttcgcggtgttcgcgtgtgggagttgtagggttgaggagaggtcgttcgtaattttcgggaatcgtgtgaggtgttattggggtcgttttatattaggaggtttcgtttcgggggacgcgcgtaggtgattttgttggtcgtatttggtcggggtggttcggaggggttgggtttcggcgttaggaggggtcgtgtgggtt

SEQ ID NO: 19820 - DNA, 690 bp, Artificial Sequence
  chemically treated genomic DNA (Homo sapiens) CpG-island No: 19820
aacccacacgacccctcctaacgccgaaacccaacccctccgaaccaccccgaccaaatacgaccaacaaaatcacctacgcgcgtcccccgaaacgaaacctcctaatataaaacgaccccaataacacctcacacgattcccgaaaattacgaacgacctctcctcaaccctacaactcccacacgcgaacaccgcgaacctcgaccatatccactaaccgaccttcctcgccgaaactcctcgcgcatcgccgacccctcaacgacgactaacgcgcgaacatcctaaaaaacgcgttaccgaccccacgtaaaccgacgccccaaaacgcgactactaacgccgactacgaaatcaaaatcgacgcgtacgcgcttacgcgaaaccgacattctcaaccccgcgccgatttccaaaaaactaaacgcatacgccgcgtaaaaaacccgaccgacgaaaaaaaatactactaccgaaaacgccgacgcgcttacgcaataactaaacgcgaacgtttctttcctccctttttttcgaattaattttaaaaataaattcgaattacaaaataaccgcccgaaacgtattcgacgcgattcccccaactatctctaactaaaccgacgctctcgcctccctaccgaacacaacgtaaaaaacccccccaaaaatataatatttaaatct

SEQ ID NO: 19821 - DNA, 1060 bp, Artificial Sequence
  chemically treated genomic DNA (Homo sapiens) CpG-island No: 19821
atcgcgttttttttatcggtttcgtagttttttgttcggtttttttttttttatttttatttttgcggcggtaaaatgtagtattcgtagagcgtttgcgcggtttttaggtcgggcggcggcggcggcggtggttatttatagtaggtgacgttattttgaaatagatcgttagggtcggttcgtttttttttttttttattttcgtcgtttttcgtcgttcggtttggttatttttattgcgtaggcgtcgtttcgtttttttattttttagcgcggtcgcgttttttttttcggcgttgttcgcggcgcgagttatagcgcgcggggcgagttagcgagagggcgcgagcggcggcgttgtttgtagtttgtagtttgtagttttcggtcggtcggcgagttagtgcgcgtgcgcggcggcggttttcgtagcgatcggggagcggattgatcggcgggagggttagcgagttagcggtgtgaggcgcgaggcgaggtcgagtcgcgagcgatatgggggatcgggagtagttgttgtagcgggcgcggttggtcgagtaggcggagcgttacgacgatatggttttcgttatgaaggcggtgagcgcgtcgggagttcgggcggttggtcggggggggtttggcgttggggagggacggggatggtcgcgggcgcgtttttttttcggttatgggcgattcggcgattcggttgggcgtggtcgttcgttcgtttttagttcgcgtttttcgttttcgttgggcgtttcgttattttttgaggttgggtttagggtgggggattcgggagggtgtagttcgggatcgcgaaggtagtttcggaaggggggcgggtcggtcggggtcgttatattttagttcggaattcggtcgggggtagagggtgttttaggggacgcgaaggagtcgtattttttttagagcgttttatcggattcgggggttttttttttcgttttttttcgttttttaatttggaataaagaattatttagtaagtggcgttttgttttagttggttttttttgttacgatt

SEQ ID NO: 19822 - DNA, 1060 bp, Artificial Sequence
  chemically treated genomic DNA (Homo sapiens) CpG-island No: 19822
aatcgtaacaaaaaaaaccaactaaaacaaaacgccacttactaaataattctttattccaaattaaaaaacgaaaaaaaacgaaaaaaaaaacccccgaatccgataaaacgctctaaaaaaaatacgactccttcgcgtcccctaaaacaccctctacccccgaccgaattccgaactaaaatataacgaccccgaccgacccgccccccttccgaaactaccttcgcgatcccgaactacaccctcccgaatcccccaccctaaacccaacctcaaaaaataacgaaacgcccaacgaaaacgaaaaacgcgaactaaaaacgaacgaacgaccacgcccaaccgaatcgccgaatcgcccataaccgaaaaaaaaacgcgcccgcgaccatccccgtccctccccaacgccaaaccccccccgaccaaccgcccgaactcccgacgcgctcaccgccttcataacgaaaaccatatcgtcgtaacgctccgcctactcgaccaaccgcgcccgctacaacaactactcccgatcccccatatcgctcgcgactcgacctcgcctcgcgcctcacaccgctaactcgctaaccctcccgccgatcaatccgctccccgatcgctacgaaaaccgccgccgcgcacgcgcactaactcgccgaccgaccgaaaactacaaactacaaactacaaacaacgccgccgctcgcgccctctcgctaactcgccccgcgcgctataactcgcgccgcgaacaacgccgaaaaaaaaaacgcgaccgcgctaaaaaataaaaaaacgaaacgacgcctacgcaataaaaataaccaaaccgaacgacgaaaaacgacgaaaataaaaaaaaaaaaaaacgaaccgaccctaacgatctatttcaaaataacgtcacctactataaataaccaccgccgccgccgccgcccgacctaaaaaccgcgcaaacgctctacgaatactacattttaccgccgcaaaaataaaaataaaaaaaaaaaaaccgaacaaaaaactacgaaaccgataaaaaaaacgcgat

SEQ ID NO: 19823 - DNA, 1060 bp, Artificial Sequence
  chemically treated genomic DNA (Homo sapiens) CpG-island No: 19823
ggtcgtggtagagaaaattagttgagatagggcgttatttattaggtgattttttattttaagttggggaacggaggaagacgagagggggagttttcgggttcggtgaaacgttttaggagaaatgcggttttttcgcgttttttagggtattttttgttttcggtcgggtttcgaattaagatgtggcgatttcgatcggttcgtttttttttcggggttgttttcgcgatttcgaattgtattttttcggattttttattttgggtttagttttaggaagtggcggggcgtttagcgggagcgggaagcgcgggttaagggcgggcgggcggttacgtttagtcgggtcgtcgggtcgtttatggtcgggaggggaacgcgttcgcggttattttcgtttttttttaacgttaggtttttttcggttagtcgttcgggttttcggcgcgtttatcgtttttatagcggaggttatgtcgtcgtagcgtttcgtttgttcggttagtcgcgttcgttgtagtagttgttttcggttttttatgtcgttcgcggttcggtttcgtttcgcgttttatatcgttggttcgttagttttttcgtcggttagttcgtttttcggtcgttgcggaggtcgtcgtcgcgtacgcgtattggttcgtcggtcggtcggaggttgtaggttgtaggttgtaggtagcgtcgtcgttcgcgttttttcgttggttcgtttcgcgcgttgtggttcgcgtcgcggataacgtcgagggaggagacgcggtcgcgttgggggatgggaggacgggacgacgtttgcgtagtgagagtggttaggtcgggcggcggggagcggcgggagtgggaggggggaagggcgggtcggttttaacggtttattttaaggtgacgttatttattataaatagttatcgtcgtcgtcgtcgttcggtttgaaagtcgcgtaggcgttttgcgagtgttgtattttatcgtcgtagagatggaggtggagaagggaaagtcgggtaggagattgcggagtcggtggagggggcgcggt

SEQ ID NO: 19824 - DNA, 1060 bp, Artificial Sequence
  chemically treated genomic DNA (Homo sapiens) CpG-island No: 19824
accgcgccccctccaccgactccgcaatctcctacccgactttcccttctccacctccatctctacgacgataaaatacaacactcgcaaaacgcctacgcgactttcaaaccgaacgacgacgacgacgataactatttataataaataacgtcaccttaaaataaaccgttaaaaccgacccgcccttcccccctcccactcccgccgctccccgccgcccgacctaaccactctcactacgcaaacgtcgtcccgtcctcccatcccccaacgcgaccgcgtctcctccctcgacgttatccgcgacgcgaaccacaacgcgcgaaacgaaccaacgaaaaaacgcgaacgacgacgctacctacaacctacaacctacaacctccgaccgaccgacgaaccaatacgcgtacgcgacgacgacctccgcaacgaccgaaaaacgaactaaccgacgaaaaaactaacgaaccaacgatataaaacgcgaaacgaaaccgaaccgcgaacgacataaaaaaccgaaaacaactactacaacgaacgcgactaaccgaacaaacgaaacgctacgacgacataacctccgctataaaaacgataaacgcgccgaaaacccgaacgactaaccgaaaaaaacctaacgttaaaaaaaaacgaaaataaccgcgaacgcgttcccctcccgaccataaacgacccgacgacccgactaaacgtaaccgcccgcccgcccttaacccgcgcttcccgctcccgctaaacgccccgccacttcctaaaactaaacccaaaataaaaaatccgaaaaaatacaattcgaaatcgcgaaaacaaccccgaaaaaaaaacgaaccgatcgaaatcgccacatcttaattcgaaacccgaccgaaaacaaaaaataccctaaaaaacgcgaaaaaaccgcatttctcctaaaacgtttcaccgaacccgaaaactccccctctcgtcttcctccgttccccaacttaaaataaaaaatcacctaataaataacgccctatctcaactaattttctctaccacgacc

SEQ ID NO: 19825 - DNA, 686 bp, Artificial Sequence
  chemically treated genomic DNA (Homo sapiens) CpG-island No: 19825
  unsure (507, 521, 602, 630)
gcgcgtgcgtttttttttttgtttttgatttttttatggaagtagttcgttaggcgaaatggcgatcgattaggcgaaacgttggtggattttatggtagcgcgcgtggtaggtagttatattcgggttcggtttcgtttagcgttaagggcgtggagtcgcgtcgtaaatggcgcgcgagttttttgcgtacgcgcgtgtagcgtttggggtcgggttagcggcgcggttgaagcgaaggcggggagggaaagcgagcggcgtttgcgtttcggcggtggacgggttcggtcgtgggcggggattggggcggaatttgatcgttacgcgtagtttcgttttcgcggtttcgtcgtttttgttgaagcggtagtcgtttttcgtcgatttttatcggttggttgggttagttgcgtcgcggtttatagttgacgatgggggattttagtaagtaggatattttgattatttttaagcgttttcgttcggtgtttattaataaggtancggtcgcgggcgantgcgggtttgtttggtatttttgcgggaatcggcgggaagtttcgcgggcgttagtgttcgtggtttgggaagcgggggtngcgtcgtttgttaatacgttttattgtngggtcgtcgtaattttggttcggttcgggtcggtcgggttcggtaatttaaaaggt

SEQ ID NO: 19826 - DNA, 686 bp, Artificial Sequence
  chemically treated genomic DNA (Homo sapiens) CpG-island No: 19826
  unsure (57, 85, 166, 180)
accttttaaattaccgaacccgaccgacccgaaccgaaccaaaattacgacgacccnacaataaaacgtattaacaaacgacgcnacccccgcttcccaaaccacgaacactaacgcccgcgaaacttcccgccgattcccgcaaaaataccaaacaaacccgcantcgcccgcgaccgntaccttattaataaacaccgaacgaaaacgcttaaaaataatcaaaatatcctacttactaaaatcccccatcgtcaactataaaccgcgacgcaactaacccaaccaaccgataaaaatcgacgaaaaacgactaccgcttcaacaaaaacgacgaaaccgcgaaaacgaaactacgcgtaacgatcaaattccgccccaatccccgcccacgaccgaacccgtccaccgccgaaacgcaaacgccgctcgctttccctccccgccttcgcttcaaccgcgccgctaacccgaccccaaacgctacacgcgcgtacgcaaaaaactcgcgcgccatttacgacgcgactccacgcccttaacgctaaacgaaaccgaacccgaatataactacctaccacgcgcgctaccataaaatccaccaacgtttcgcctaatcgatcgccatttcgcctaacgaactacttccataaaaaaatcaaaaacaaaaaaaaaaacgcacgcgc

SEQ ID NO: 19827 - DNA, 686 bp, Artificial Sequence
  chemically treated genomic DNA (Homo sapiens) CpG-island No: 19827
  unsure (57, 85, 166, 180)
gttttttaagttgtcgggttcggtcggttcgggtcgggttaaggttgcggcggtttnatagtgggacgtgttaataggcggcgtngttttcgttttttaagttacgggtattggcgttcgcggggtttttcgtcggttttcgtagggatgttaggtaggttcgtantcgttcgcggtcgntattttgttagtgggtatcgagcggaggcgtttgaagatggttaagatgttttgtttgttggggttttttatcgttagttgtgagtcgcggcgtagttggtttagttaatcggtaagagtcgacgaaaagcggttatcgttttagtaggagcgacgaggtcgcgggggcggggttgcgcgtaacggttaggtttcgttttaattttcgtttacgatcgggttcgtttatcgtcggggcgtaggcgtcgttcgtttttttttttcgttttcgttttagtcgcgtcgttggttcgattttaggcgttgtacgcgcgtgcgtaggaggttcgcgcgttatttgcggcgcggttttacgtttttagcgttgggcgaagtcgggttcgggtgtggttgtttgttacgcgcgttgttataggatttattaacgtttcgtttggtcgatcgttatttcgtttaacgggttgtttttatggaaaggttagaggtaggggaaggggcgtacgcgt

SEQ ID NO: 19828 - DNA, 686 bp, Artificial Sequence
  chemically treated genomic DNA (Homo sapiens) CpG-island No: 19828
  unsure (507, 521, 602, 630)
acgcgtacgccccttcccctacctctaacctttccataaaaacaacccgttaaacgaaataacgatcgaccaaacgaaacgttaataaatcctataacaacgcgcgtaacaaacaaccacacccgaacccgacttcgcccaacgctaaaaacgtaaaaccgcgccgcaaataacgcgcgaacctcctacgcacgcgcgtacaacgcctaaaatcgaaccaacgacgcgactaaaacgaaaacgaaaaaaaaaaacgaacgacgcctacgccccgacgataaacgaacccgatcgtaaacgaaaattaaaacgaaacctaaccgttacgcgcaaccccgcccccgcgacctcgtcgctcctactaaaacgataaccgcttttcgtcgactcttaccgattaactaaaccaactacgccgcgactcacaactaacgataaaaaaccccaacaaacaaaacatcttaaccatcttcaaacgcctccgctcgatacccactaacaaaatancgaccgcgaacgantacgaacctacctaacatccctacgaaaaccgacgaaaaaccccgcgaacgccaatacccgtaacttaaaaaacgaaaacnacgccgcctattaacacgtcccactatnaaaccgccgcaaccttaacccgacccgaaccgaccgaacccgacaacttaaaaaac

SEQ ID NO: 19829 - DNA, 508 bp, Artificial Sequence
  chemically treated genomic DNA (Homo sapiens) CpG-island No: 19829
cgttttcgagttttggattattttttttgtttcgcgcggggtcgagttttacggtacgtgttttggtttggatcgggaaggttcgtagttttatagtgttcggggaggacggttcgcgttttttacgatttcgcgtcgttcgcgtggttgtagcgtcgtggttcggggacgcgaggttatagttcgggagcgaggagcgcgggaggatcggtttgtttgtgttcggtaaagggggttttttcgaggcgggttttttttttcgtcgttttcgtaagcgcgggagttagaggattttagattcgtcgcggtttattttaagtttcgattaagttttgtagcgcgggagggatttttgtaggcgcggggttagacgggcgataaagcggcggattgcgagggttttgaggaagtcggcggcgcggggttaggagtaatttgttattcgtagggttaggagtttacgcgtttttattgcggagggcggggtcgtagttaggttttttcgttt

SEQ ID NO: 19830 - DNA, 508 bp, Artificial Sequence
  chemically treated genomic DNA (Homo sapiens) CpG-island No: 19830
aaacgaaaaaacctaactacgaccccgccctccgcaataaaaacgcgtaaactcctaaccctacgaataacaaattactcctaaccccgcgccgccgacttcctcaaaaccctcgcaatccgccgctttatcgcccgtctaaccccgcgcctacaaaaatccctcccgcgctacaaaacttaatcgaaacttaaaataaaccgcgacgaatctaaaatcctctaactcccgcgcttacgaaaacgacgaaaaaaaaaacccgcctcgaaaaaaccccctttaccgaacacaaacaaaccgatcctcccgcgctcctcgctcccgaactataacctcgcgtccccgaaccacgacgctacaaccacgcgaacgacgcgaaatcgtaaaaaacgcgaaccgtcctccccgaacactataaaactacgaaccttcccgatccaaaccaaaacacgtaccgtaaaactcgaccccgcgcgaaacaaaaaaaataatccaaaactcgaaaacg

SEQ ID NO: 19831 - DNA, 508 bp, Artificial Sequence
  chemically treated genomic DNA (Homo sapiens) CpG-island No: 19831
aaacggggaggtttggttgcgatttcgtttttcgtagtggggacgcgtgggtttttgattttacgaatagtaggttgtttttgatttcgcgtcgtcggtttttttagggttttcgtagttcgtcgttttgtcgttcgtttggtttcgcgtttgtaggggtttttttcgcgttgtaggatttgatcggggtttggggtgggtcgcggcgggtttggggttttttggttttcgcgtttacgggagcggcggggaagggagttcgtttcggaagggttttttttgtcgggtataggtaggtcggttttttcgcgtttttcgttttcgggttgtggtttcgcgttttcgggttacggcgttgtagttacgcgggcggcgcgaagtcgtggaaggcgcggatcgtttttttcgggtattgtgggattgcgggttttttcggtttaagttaaagtacgtgtcgtggagttcggtttcgcgcggggtagagggagtggtttagggttcgggagcg

SEQ ID NO: 19832 - DNA, 508 bp, Artificial Sequence
  chemically treated genomic DNA (Homo sapiens) CpG-island No: 19832
cgctcccgaaccctaaaccactccctctaccccgcgcgaaaccgaactccacgacacgtactttaacttaaaccgaaaaaacccgcaatcccacaatacccgaaaaaaacgatccgcgccttccacgacttcgcgccgcccgcgtaactacaacgccgtaacccgaaaacgcgaaaccacaacccgaaaacgaaaaacgcgaaaaaaccgacctacctatacccgacaaaaaaaacccttccgaaacgaactcccttccccgccgctcccgtaaacgcgaaaaccaaaaaaccccaaacccgccgcgacccaccccaaaccccgatcaaatcctacaacgcgaaaaaaacccctacaaacgcgaaaccaaacgaacgacaaaacgacgaactacgaaaaccctaaaaaaaccgacgacgcgaaatcaaaaacaacctactattcgtaaaatcaaaaacccacgcgtccccactacgaaaaacgaaatcgcaaccaaacctccccgttt

SEQ ID NO: 19833 - DNA, 998 bp, Artificial Sequence
  chemically treated genomic DNA (Homo sapiens) CpG-island No: 19833
gtgcggcgtcgggtgtcggttttgcgggaatatcgcgttggcggcggtcggggttttgtttttcggtaatttaatttttcggttaatttttaattttaatttcgtcgaggaaaattaagtcggaaagttaggtagaagcggggagcgaggtggttacgtacgtaggcgcgttaggtcgggcgtatcggttattcggcgttcgtagttgtttcggttttcgttttcgtcggtgcgggtttcggtttttagggttatattagtgggcgttttaggtttagttgttttaataatttgcgcggagacgtcgggcgttcggggattgtgcgcgggggtagtgttttaatttttcggttttagtcgttcgggcggggaggcgggggcgcggtgatttcgatcgtatttttttcggggattcgcgtgcgcggcgttagttttgggtaaataaatttagacgggttgtttttttttgttttttttttggttcgtttttttttcgggtttttttcgaggcggcggcgggcgaggcgtaggtggcgcggcggttttcgttaattttatataaattcgacgttttcggggcgattttcgtaagattcggttgcgttttcggttcgggtgttcgtagggtttcgggacgtaaaagggagagaggttgaggacgcggcggaggtttttggtcggggagcgagggatgattaggcggggaaagtgcggagggcgcgtcggaaggcggttcggtacgtttcgtgcgattagtattcggtgtttttcgcggttgtataaattttcgggttcgacggggttattttatcgagagtagtttcgtaaatggtcgttgtttttcgagttcggggagtattagggcgtcgcgtttcgcgcgtattcgttttgtacggtcggttcggtcgtttcggatttttttttcgagttttttttttttcggttttttttttttttttttttagtttttttttttttttttttcggttttttttttt

SEQ ID NO: 19834 - DNA, 998 bp, Artificial Sequence
  chemically treated genomic DNA (Homo sapiens) CpG-island No: 19834
aaaaaaaaaaaccgaaaaaaaaaaaaaaaaaaactaaaaaaaaaaaaaaaaaaaaccgaaaaaaaaaaaactcgaaaaaaaaatccgaaacgaccgaaccgaccgtacaaaacgaatacgcgcgaaacgcgacgccctaatactccccgaactcgaaaaacaacgaccatttacgaaactactctcgataaaataaccccgtcgaacccgaaaatttatacaaccgcgaaaaacaccgaatactaatcgcacgaaacgtaccgaaccgccttccgacgcgccctccgcactttccccgcctaatcatccctcgctccccgaccaaaaacctccgccgcgtcctcaacctctctcccttttacgtcccgaaaccctacgaacacccgaaccgaaaacgcaaccgaatcttacgaaaatcgccccgaaaacgtcgaatttatataaaattaacgaaaaccgccgcgccacctacgcctcgcccgccgccgcctcgaaaaaaacccgaaaaaaaaacgaaccaaaaaaaaaacaaaaaaaaacaacccgtctaaatttatttacccaaaactaacgccgcgcacgcgaatccccgaaaaaaatacgatcgaaatcaccgcgcccccgcctccccgcccgaacgactaaaaccgaaaaattaaaacactacccccgcgcacaatccccgaacgcccgacgtctccgcgcaaattattaaaacaactaaacctaaaacgcccactaatataaccctaaaaaccgaaacccgcaccgacgaaaacgaaaaccgaaacaactacgaacgccgaataaccgatacgcccgacctaacgcgcctacgtacgtaaccacctcgctccccgcttctacctaactttccgacttaattttcctcgacgaaattaaaattaaaaattaaccgaaaaattaaattaccgaaaaacaaaaccccgaccgccgccaacgcgatattcccgcaaaaccgacacccgacgccgcac

SEQ ID NO: 19835 - DNA, 998 bp, Artificial Sequence
  chemically treated genomic DNA (Homo sapiens) CpG-island No: 19835
aagaaagaagatcgaggaagaaaagaaagaagattgaggaagaaaagaaagaagatcgaggaagaaggggttcggaagaagggttcggagcggtcgggtcggtcgtgtagggcgagtgcgcgcgaggcgcggcgttttgatgtttttcgagttcgaggagtagcggttatttgcgggattgttttcggtggagtagtttcgtcgggttcggaggtttgtgtaatcgcggagaatatcgagtgttggtcgtacggggcgtgtcgagtcgtttttcggcgcgtttttcgtatttttttcgtttagttatttttcgtttttcggttaggagttttcgtcgcgtttttaattttttttttttttgcgtttcgggattttgcgagtattcgggtcgagggcgtagtcgagttttgcgggagtcgtttcgaaagcgtcgggtttgtgtggggttagcgggggtcgtcgcgttatttgcgtttcgttcgtcgtcgtttcggggaaaattcgaagaggaggcggattaggagaagagtaaagaaaagtagttcgtttggatttgtttgtttaggattggcgtcgcgtacgcggattttcgaggggagtgcggtcggagttatcgcgttttcgttttttcgttcgggcgattgaggtcggggggttggagtattgttttcgcgtatagttttcgaacgttcgacgttttcgcgtaggttattgaagtagttgggtttggggcgtttattaatgtggttttgagggtcggagttcgtatcgacgggagcgggagtcggagtagttgcgggcgtcgagtggtcggtacgttcggtttagcgcgtttgcgtgcgtggttatttcgtttttcgtttttgtttggtttttcggtttaatttttttcggcgggattaaagttggaaattgatcggagaattgagttgtcggggaatagagtttcggtcgtcgttagcgcgatgttttcgtagagtcggtattcgacgtcgtat

SEQ ID NO: 19836 - DNA, 998 bp, Artificial Sequence
  chemically treated genomic DNA (Homo sapiens) CpG-island No: 19836
atacgacgtcgaataccgactctacgaaaacatcgcgctaacgacgaccgaaactctattccccgacaactcaattctccgatcaatttccaactttaatcccgccgaaaaaaattaaaccgaaaaaccaaacaaaaacgaaaaacgaaataaccacgcacgcaaacgcgctaaaccgaacgtaccgaccactcgacgcccgcaactactccgactcccgctcccgtcgatacgaactccgaccctcaaaaccacattaataaacgccccaaacccaactacttcaataacctacgcgaaaacgtcgaacgttcgaaaactatacgcgaaaacaatactccaaccccccgacctcaatcgcccgaacgaaaaaacgaaaacgcgataactccgaccgcactcccctcgaaaatccgcgtacgcgacgccaatcctaaacaaacaaatccaaacgaactacttttctttactcttctcctaatccgcctcctcttcgaattttccccgaaacgacgacgaacgaaacgcaaataacgcgacgacccccgctaaccccacacaaacccgacgctttcgaaacgactcccgcaaaactcgactacgccctcgacccgaatactcgcaaaatcccgaaacgcaaaaaaaaaaaaaattaaaaacgcgacgaaaactcctaaccgaaaaacgaaaaataactaaacgaaaaaaatacgaaaaacgcgccgaaaaacgactcgacacgccccgtacgaccaacactcgatattctccgcgattacacaaacctccgaacccgacgaaactactccaccgaaaacaatcccgcaaataaccgctactcctcgaactcgaaaaacatcaaaacgccgcgcctcgcgcgcactcgccctacacgaccgacccgaccgctccgaacccttcttccgaaccccttcttcctcgatcttctttcttttcttcctcaatcttctttcttttcttcctcgatcttctttctt

SEQ ID NO: 19837 - DNA, 533 bp, Artificial Sequence
  chemically treated genomic DNA (Homo sapiens) CpG-island No: 19837
ttgtaaagtttttttattattcgagggacgatatttacgagatggtgggagaaatagtaggagtgcgtttcgttaatcggttatttttttcggcgggtaaattttgtcggcgagttcggagtagttatagcggtgcggttagcggagattttggtcgtcgcgggacgacggaggttcgggttggtggcgcgggtttcgttcggtcgtgcgagggtggggtggcgtagtcggttgttttcgggacgtagagtatagagtattcgtcgttgtttttgttgttgttgtttttgtagtcgtcgtttttatcgtcgtcgtcgtcgttcgcgtttttggcgtgggttatattaatacgcggttttatatttaggagttaattagcgtcggtttcgttcggtttcgtttagtttcgtttagtttcgtttagtttcgtttagtttcgtttagtttcgtttagtttcgtttagtttcgatcgggcgggggacgttagttcgtagttttatatagtttttattatgttgaggtatgttttttt

SEQ ID NO: 19838 - DNA, 533 bp, Artificial Sequence
  chemically treated genomic DNA (Homo sapiens) CpG-island No: 19838
aaaaaaacatacctcaacataataaaaactatataaaactacgaactaacgtcccccgcccgatcgaaactaaacgaaactaaacgaaactaaacgaaactaaacgaaactaaacgaaactaaacgaaactaaacgaaaccgaacgaaaccgacgctaattaactcctaaatataaaaccgcgtattaatataacccacgccaaaaacgcgaacgacgacgacgacgataaaaacgacgactacaaaaacaacaacaacaaaaacaacgacgaatactctatactctacgtcccgaaaacaaccgactacgccaccccaccctcgcacgaccgaacgaaacccgcgccaccaacccgaacctccgtcgtcccgcgacgaccaaaatctccgctaaccgcaccgctataactactccgaactcgccgacaaaatttacccgccgaaaaaaataaccgattaacgaaacgcactcctactatttctcccaccatctcgtaaatatcgtccctcgaataataaaaaaactttacaa

SEQ ID NO: 19839 - DNA, 533 bp, Artificial Sequence
  chemically treated genomic DNA (Homo sapiens) CpG-island No: 19839
gaaagaatatattttaatataataaaagttatatagggttgcgggttagcgtttttcgttcgatcggggttgaacggggttgggcggggttgggcggggttgggcggggttgggcggggttgggcgggattgggcggggtcgggcggggtcggcgttggttagtttttgagtgtgaaatcgcgtgttagtgtaatttacgttagaggcgcgggcggcggcggcggcggtaggagcggcggttgtaggagtagtagtagtagaagtagcggcgggtattttgtgttttgcgtttcggaggtagtcgattgcgttattttattttcgtacggtcgggcgggattcgcgttattagttcggattttcgtcgtttcgcggcgattaaaattttcgttggtcgtatcgttgtgattatttcggattcgtcggtagagtttgttcgtcggggagggtggtcgattggcggagcgtatttttgttgttttttttattatttcgtggatgtcgtttttcgggtggtgagagaattttgtag

SEQ ID NO: 19840 - DNA, 533 bp, Artificial Sequence
  chemically treated genomic DNA (Homo sapiens) CpG-island No: 19840
ctacaaaattctctcaccacccgaaaaacgacatccacgaaataataaaaaaaacaacaaaaatacgctccgccaatcgaccaccctccccgacgaacaaactctaccgacgaatccgaaataatcacaacgatacgaccaacgaaaattttaatcgccgcgaaacgacgaaaatccgaactaataacgcgaatcccgcccgaccgtacgaaaataaaataacgcaatcgactacctccgaaacgcaaaacacaaaatacccgccgctacttctactactactactcctacaaccgccgctcctaccgccgccgccgccgcccgcgcctctaacgtaaattacactaacacgcgatttcacactcaaaaactaaccaacgccgaccccgcccgaccccgcccaatcccgcccaaccccgcccaaccccgcccaaccccgcccaaccccgcccaaccccgttcaaccccgatcgaacgaaaaacgctaacccgcaaccctatataacttttattatattaaaatatattctttc

SEQ ID NO: 19841 - DNA, 888 bp, Artificial Sequence
  chemically treated genomic DNA (Homo sapiens) CpG-island No: 19841
gttagttcgcggtttcgttttttttttagattttcgtttttattggttgtaggttacgtcgtcgtttcgtttttcggtttttttagcgcgttaattggcggttgcgtggaacgtgttagggagagcgcgtcgtgttcgcggagagagcgcggcgcgggaggtcggcggtcggtcggttgtatggcgcgttgcgagaggttgcgcggagcggttttgcgcgacgtgttgggtcgggcgtagggggttttgttcgattgtgacggggtgttgtggaacggcgagcgcgtcgtgtcgggcgtttcggagttgttggagcggttggcgcgggtcggtaaggcggttttgtttgtgagtaataatagtcggcgcgcgcggttcgagttggttttgcgtttcgcgcgtttcggtttcggggggttgcgcgtcgagtagttttttagtttcgcgttgtgcgtcgcgcgtttgttgcgttagcgtttgttcgggttttcggacgcgtcgggcgtcgtgttcgtgttgggcggcgaggggttgcgcgtcgagttgcgcgtcgcggggttgcgtttggtcggggattcgagcgcgggggacggcgcggtttcgcgcgtgcgcgtcgtgtttgtgggttacgacgagtatttttttttcgttaagttgagggaggcgtgcgcgtatttgcgcgatttcgagtgtttattcgtggttatcgatcgtgatttatggtattcgttgagcgacggtagtcggatttttggtgagcgcgggaatggcggggaaattgagatgggggcgatttgcgtattcgtttttacgtttaagggtgaggggcggggaagaggcgtttttaggtggtaggtggggaataggagagtgcgagggaggtttagg

SEQ ID NO: 19842 - DNA, 888 bp, Artificial Sequence
  chemically treated genomic DNA (Homo sapiens) CpG-island No: 19842
cctaaacctccctcgcactctcctattccccacctaccacctaaaaacgcctcttccccgcccctcacccttaaacgtaaaaacgaatacgcaaatcgcccccatctcaatttccccgccattcccgcgctcaccaaaaatccgactaccgtcgctcaacgaataccataaatcacgatcgataaccacgaataaacactcgaaatcgcgcaaatacgcgcacgcctccctcaacttaacgaaaaaaaaatactcgtcgtaacccacaaacacgacgcgcacgcgcgaaaccgcgccgtcccccgcgctcgaatccccgaccaaacgcaaccccgcgacgcgcaactcgacgcgcaacccctcgccgcccaacacgaacacgacgcccgacgcgtccgaaaacccgaacaaacgctaacgcaacaaacgcgcgacgcacaacgcgaaactaaaaaactactcgacgcgcaaccccccgaaaccgaaacgcgcgaaacgcaaaaccaactcgaaccgcgcgcgccgactattattactcacaaacaaaaccgccttaccgacccgcgccaaccgctccaacaactccgaaacgcccgacacgacgcgctcgccgttccacaacaccccgtcacaatcgaacaaaaccccctacgcccgacccaacacgtcgcgcaaaaccgctccgcgcaacctctcgcaacgcgccatacaaccgaccgaccgccgacctcccgcgccgcgctctctccgcgaacacgacgcgctctccctaacacgttccacgcaaccgccaattaacgcgctaaaaaaaccgaaaaacgaaacgacgacgtaacctacaaccaataaaaacgaaaatctaaaaaaaaaacgaaaccgcgaactaac

SEQ ID NO: 19843 - DNA, 888 bp, Artificial Sequence
  chemically treated genomic DNA (Homo sapiens) CpG-island No: 19843
tttgggtttttttcgtatttttttgttttttatttgttatttggagacgtttttttttcgttttttatttttaggcgtggaggcgaatgcgtaggtcgtttttattttagttttttcgttattttcgcgtttattaggggttcggttgtcgtcgtttagcgggtgttatgggttacggtcggtggttacgagtaggtattcggggtcgcgtaggtgcgcgtacgttttttttagtttggcgaaggagaagtgttcgtcgtagtttataagtacggcgcgtacgcgcggggtcgcgtcgtttttcgcgttcgggttttcggttaggcgtagtttcgcggcgcgtagttcggcgcgtagtttttcgtcgtttagtacgaatacggcgttcggcgcgttcggaggttcgggtaggcgttggcgtagtaggcgcgcggcgtatagcgcggagttgaagagttgttcggcgcgtagtttttcgaagtcgaggcgcgcgaagcgtagggttagttcgggtcgcgcgcgtcggttgttgttgtttataaatagagtcgttttgtcggttcgcgttagtcgttttagtagtttcggggcgttcggtacggcgcgttcgtcgttttatagtatttcgttatagtcgaataggattttttgcgttcggtttagtacgtcgcgtagggtcgtttcgcgtagtttttcgtagcgcgttatgtagtcggtcggtcgtcggtttttcgcgtcgcgtttttttcgcgggtacggcgcgttttttttggtacgttttacgtagtcgttaattggcgcgttggaaggatcggggggcggggcgacggcgtggtttgtagttaatgggggcgagagtttgggagaggagcgaagtcgcgagttaat

SEQ ID NO: 19844 - DNA, 888 bp, Artificial Sequence
  chemically treated genomic DNA (Homo sapiens) CpG-island No: 19844
attaactcgcgacttcgctcctctcccaaactctcgcccccattaactacaaaccacgccgtcgccccgccccccgatccttccaacgcgccaattaacgactacgtaaaacgtaccaaaaaaaacgcgccgtacccgcgaaaaaaacgcgacgcgaaaaaccgacgaccgaccgactacataacgcgctacgaaaaactacgcgaaacgaccctacgcgacgtactaaaccgaacgcaaaaaatcctattcgactataacgaaatactataaaacgacgaacgcgccgtaccgaacgccccgaaactactaaaacgactaacgcgaaccgacaaaacgactctatttataaacaacaacaaccgacgcgcgcgacccgaactaaccctacgcttcgcgcgcctcgacttcgaaaaactacgcgccgaacaactcttcaactccgcgctatacgccgcgcgcctactacgccaacgcctacccgaacctccgaacgcgccgaacgccgtattcgtactaaacgacgaaaaactacgcgccgaactacgcgccgcgaaactacgcctaaccgaaaacccgaacgcgaaaaacgacgcgaccccgcgcgtacgcgccgtacttataaactacgacgaacacttctccttcgccaaactaaaaaaaacgtacgcgcacctacgcgaccccgaatacctactcgtaaccaccgaccgtaacccataacacccgctaaacgacgacaaccgaacccctaataaacgcgaaaataacgaaaaaactaaaataaaaacgacctacgcattcgcctccacgcctaaaaataaaaaacgaaaaaaaaacgtctccaaataacaaataaaaaacaaaaaaatacgaaaaaaacccaaa

SEQ ID NO: 19845 - DNA, 507 bp, Artificial Sequence
  chemically treated genomic DNA (Homo sapiens) CpG-island No: 19845
aatttcggtgcgacgttaaagtgtgcgttcgggaggatgagtacgttatattcggaagtgtttttagggagaggaagtcggcggttttattgttatgggtcgtaataagaagaagaagcgagatggtgacgatcggcggtcgaggttcgtttttagtttcgacgaggagaagaggcggtgagtggtaaagtcggatcggatttttttcgagttgtttttcgcggttaaggttaggtttggggtcgagtacgttttcgtcgggggttttttcggtttcgttttttggcgtggttagagaatttttttcggttttttagttcgcgttttcgttttttttttttcggtcgttattttttttttttttgatttttttatttcgtttagtgtttgtgcgtcgttagatagtcggaagttcgggttttagagtagtggtttcgattattttagtttagtttagtttatcggttcggtatatagtaggcgtttagtcgtggttgataaatgatg

SEQ ID NO: 19846 - DNA, 507 bp, Artificial Sequence
  chemically treated genomic DNA (Homo sapiens) CpG-island No: 19846
catcatttatcaaccacgactaaacgcctactatataccgaaccgataaactaaactaaactaaaataatcgaaaccactactctaaaacccgaacttccgactatctaacgacgcacaaacactaaacgaaataaaaaaatcaaaaaaaaaaaaaataacgaccgaaaaaaaaaaaacgaaaacgcgaactaaaaaaccgaaaaaaattctctaaccacgccaaaaaacgaaaccgaaaaaacccccgacgaaaacgtactcgaccccaaacctaaccttaaccgcgaaaaacaactcgaaaaaaatccgatccgactttaccactcaccgcctcttctcctcgtcgaaactaaaaacgaacctcgaccgccgatcgtcaccatctcgcttcttcttcttattacgacccataacaataaaaccgccgacttcctctccctaaaaacacttccgaatataacgtactcatcctcccgaacgcacactttaacgtcgcaccgaaatt

SEQ ID NO: 19847 - DNA, 507 bp, Artificial Sequence
  chemically treated genomic DNA (Homo sapiens) CpG-island No: 19847
tattatttattaattacggttgggcgtttgttgtgtgtcggatcgatggattgggttgggttagggtggtcgaagttattgttttgagattcgagttttcggttatttggcggcgtatagatattaggcgaggtggggaggttaagaagggagaaggtggcggtcgagaagggagaagcgggaacgcgggttggaaggtcgagaggggttttttagttacgttagggggcgggatcggaagagttttcggcgggagcgtgttcggttttagatttggttttggtcgcgaagaatagttcgaggggagttcggttcggttttgttatttatcgtttttttttttcgtcgaagttaagaacgagtttcggtcgtcggtcgttattatttcgttttttttttttgttgcggtttatagtagtgaggtcgtcggttttttttttttgaagatattttcgggtgtagcgtatttattttttcgggcgtatattttagcgtcgtatcgaagtt

SEQ ID NO: 19848 - DNA, 507 bp, Artificial Sequence
  chemically treated genomic DNA (Homo sapiens) CpG-island No: 19848
aacttcgatacgacgctaaaatatacgcccgaaaaaataaatacgctacacccgaaaatatcttcaaaaaaaaaaaaccgacgacctcactactataaaccgcaacaaaaaaaaaaaacgaaataataacgaccgacgaccgaaactcgttcttaacttcgacgaaaaaaaaaaacgataaataacaaaaccgaaccgaactcccctcgaactattcttcgcgaccaaaaccaaatctaaaaccgaacacgctcccgccgaaaactcttccgatcccgccccctaacgtaactaaaaaacccctctcgaccttccaacccgcgttcccgcttctcccttctcgaccgccaccttctcccttcttaacctccccacctcgcctaatatctatacgccgccaaataaccgaaaactcgaatctcaaaacaataacttcgaccaccctaacccaacccaatccatcgatccgacacacaacaaacgcccaaccgtaattaataaataata

SEQ ID NO: 19849 - DNA, 734 bp, Artificial Sequence
  chemically treated genomic DNA (Homo sapiens) CpG-island No: 19849
cgtcgagttttagcggatttatcgtttcggggtcgggtcgggaagcgtagtttgggcgagtcgtgtttacgttcggtcgttcgtatttttcgttttcgcgttattgtcggagttatttgtattttgggtttttttttttttttagcgcgttcgcggttcgggttcgttcgtttttcggtcgttatcgtttttttttttttgcggttttattcgtttatttcgtcgtttcgtcgtttcgtcgtttcgtcgttttagcgcgttcgtttcgttgcggtaggtttcgttttcggttcgtttcgcgtttttattggttcgtcgcggttttcgtcgttgtttgtttcggttttttcgttatttattggttcgttcgggtttttttaggaagtttgaaaaaaaaaaaaaaaaagttttatgggcggatggaaggggtcggggtagcgtcggggaaaggaagggtcggaggcgcggcggcgggcggtcgagaggggcggcggcggcggcggcggcggggttttcgcgtcgcggagttcggttcgagagtcgcgtttacgtttttgttttttgttttcgtcgttttggggcgtcgttatgacggtgagtgttttagttagtcgttcgcgttcgaggtcgggagaagggcgacgattcgaggtagagtttagtttttttttttcggggtagttttttttttatttttcgaaggcgagaggagggttgggtcggaagacggggtt

SEQ ID NO: 19850 - DNA, 734 bp, Artificial Sequence
  chemically treated genomic DNA (Homo sapiens) CpG-island No: 19850
aaccccgtcttccgacccaaccctcctctcgccttcgaaaaataaaaaaaaaactaccccgaaaaaaaaaaactaaactctacctcgaatcgtcgcccttctcccgacctcgaacgcgaacgactaactaaaacactcaccgtcataacgacgccccaaaacgacgaaaacaaaaaacaaaaacgtaaacgcgactctcgaaccgaactccgcgacgcgaaaaccccgccgccgccgccgccgccgcccctctcgaccgcccgccgccgcgcctccgacccttcctttccccgacgctaccccgaccccttccatccgcccataaaactttttttttttttttttcaaacttcctaaaaaaacccgaacgaaccaataaataacgaaaaaaccgaaacaaacaacgacgaaaaccgcgacgaaccaataaaaacgcgaaacgaaccgaaaacgaaacctaccgcaacgaaacgaacgcgctaaaacgacgaaacgacgaaacgacgaaacgacgaaataaacgaataaaaccgcaaaaaaaaaaaaacgataacgaccgaaaaacgaacgaacccgaaccgcgaacgcgctaaaaaaaaaaaaaaacccaaaatacaaataactccgacaataacgcgaaaacgaaaaatacgaacgaccgaacgtaaacacgactcgcccaaactacgcttcccgacccgaccccgaaacgataaatccgctaaaactcgacg

SEQ ID NO: 19851 - DNA, 734 bp, Artificial Sequence
  chemically treated genomic DNA (Homo sapiens) CpG-island No: 19851
ggtttcgtttttcggtttagtttttttttcgttttcgggaaatgaggagggggttgtttcggaggggagaggttgggttttgtttcgggtcgtcgtttttttttcggtttcgggcgcgggcggttgattggggtatttatcgttatggcggcgttttagggcggcgggagtaggaggtaggaacgtggacgcggttttcgggtcgggtttcgcggcgcgggaatttcgtcgtcgtcgtcgtcgtcgtttttttcggtcgttcgtcgtcgcgttttcggtttttttttttttcgacgttgtttcggttttttttattcgtttataaaatttttttttttttttttttaaattttttgggaggattcgagcgggttaatgggtggcggggaagtcgagataaatagcggcgggggtcgcggcgggttaatggaagcgcgagacgggtcgggggcgggatttgtcgtaacgggacgggcgcgttagggcggcggggcggcgggacggcgggacggcggggtgggcggatggggtcgtagggaagggagggcggtggcggtcggagggcgggcgggttcgggtcgcgggcgcgttgggaggaaggaagggtttagggtgtaggtgatttcggtaatggcgcgggggcggaggatgcgggcggtcgggcgtgggtacgattcgtttaggttgcgtttttcgattcggtttcggagcgatgggttcgttagggttcggcg

SEQ ID NO: 19852 - DNA, 734 bp, Artificial Sequence
  chemically treated genomic DNA (Homo sapiens) CpG-island No: 19852
cgccgaaccctaacgaacccatcgctccgaaaccgaatcgaaaaacgcaacctaaacgaatcgtacccacgcccgaccgcccgcatcctccgcccccgcgccattaccgaaatcacctacaccctaaacccttccttcctcccaacgcgcccgcgacccgaacccgcccgccctccgaccgccaccgccctcccttccctacgaccccatccgcccaccccgccgtcccgccgtcccgccgccccgccgccctaacgcgcccgtcccgttacgacaaatcccgcccccgacccgtctcgcgcttccattaacccgccgcgacccccgccgctatttatctcgacttccccgccacccattaacccgctcgaatcctcccaaaaaatttaaaaaaaaaaaaaaaaaaattttataaacgaataaaaaaaaccgaaacaacgtcgaaaaaaaaaaaaaccgaaaacgcgacgacgaacgaccgaaaaaaacgacgacgacgacgacgacgaaattcccgcgccgcgaaacccgacccgaaaaccgcgtccacgttcctacctcctactcccgccgccctaaaacgccgccataacgataaataccccaatcaaccgcccgcgcccgaaaccgaaaaaaaaacgacgacccgaaacaaaacccaacctctcccctccgaaacaaccccctcctcatttcccgaaaacgaaaaaaaaactaaaccgaaaaacgaaacc

SEQ ID NO: 19853 - DNA, 1364 bp, Artificial Sequence
  chemically treated genomic DNA (Homo sapiens) CpG-island No: 19853
gagaaattcgggacgtcgggtatataatagggatgggaggattgtatagagaagttaacgggtcggttagttcgaagggcggagatcgttgttgggggcggcggtgtttagcgggttagagtcgtggggttggcgaggattttaggtcgcgttcgttcgataggtttttcggcgaggttttaaatcgtcgttttcgcgaggcgtttagtcgattggaagttttataacgatcgttattatttagggtcggagcggtaatttcgtagcggagttttgtttgttcgttgcgtttttttaagagattagattttataaattttttttttatcgcggttttaattcgagttttttcgtcgttttcgagtattcggagggcgtttttttgggacgggatcgacgtttcggatcgggttgcgtcgcgggagttcgaggtacgcgacggggtcgcgcgggggaggcgggcggaacgggcgtttttcggagtcggtgttcggacgtaatttcgcgatttttttcgtttcgtttttcgggtacggttcgattgggattcgatttatttatttcgttaggtcgcgggtagggcgaggattcgagcgagtttatttttttcgtttttgtttttatttattttttcgtttcgttttgtagacgtgatcgtaggtgtcgcgttttattttgtatttttcgtatttaaataaattttttattcgttttcgtttcgtcgttagtttcgttttgaaattataatttattgtttgttttttttatagaggtacgggacgcgggggtcgtcgtcgtttagtttttttttttttttttttcgcgatcgtcgttttatttttttaatagtcgtttttcgcgcgcgcgcgcgcgtcgttcgtcgttcgtcgtttcgcggttcgtttttagtaagggatttttcggcggttatagtagttattttttttatttttttttttttttttttcgcgacggcggcggcggttttcgtaggtatttttagtttcgttttttttttttatttttttgttttggaatttggtgggtcgcgtcgtggttttttcgagtttattagcgaatttattggttcgttttatggtcgcggaggtttttgggaaatgaagtcgcgaaggttttagcggtttgggcggttttgtcggcgtaagaaatatagtttttaggttatttcgggttattatagtttcgtttttataaagtatgcgcgtttgcgtattagggtcgttttttttttttaggtagcgtacggttttcggtttttgtgaaggtagaaagttcgaagttttagtgtgttttttgcggttttcggggagatattggaaagaagtgttttattttagtgggaa

SEQ ID NO: 19854 - DNA, 1364 bp, Artificial Sequence
  chemically treated genomic DNA (Homo sapiens) CpG-island No: 19854
ttcccactaaaataaaacacttctttccaatatctccccgaaaaccgcaaaaaacacactaaaacttcgaactttctaccttcacaaaaaccgaaaaccgtacgctacctaaaaaaaaaaaacgaccctaatacgcaaacgcgcatactttataaaaacgaaactataataacccgaaataacctaaaaactatatttcttacgccgacaaaaccgcccaaaccgctaaaaccttcgcgacttcatttcccaaaaacctccgcgaccataaaacgaaccaataaattcgctaataaactcgaaaaaaccacgacgcgacccaccaaattccaaaacaaaaaaataaaaaaaaaaaacgaaactaaaaatacctacgaaaaccgccgccgccgtcgcgaaaaaaaaaaaaaaaaaaataaaaaaaataactactataaccgccgaaaaatcccttactaaaaacgaaccgcgaaacgacgaacgacgaacgacgcgcgcgcgcgcgcgaaaaacgactattaaaaaaataaaacgacgatcgcgaaaaaaaaaaaaaaaaaaactaaacgacgacgacccccgcgtcccgtacctctataaaaaaaacaaacaataaattataatttcaaaacgaaactaacgacgaaacgaaaacgaataaaaaatttatttaaatacgaaaaatacaaaataaaacgcgacacctacgatcacgtctacaaaacgaaacgaaaaaataaataaaaacaaaaacgaaaaaaataaactcgctcgaatcctcgccctacccgcgacctaacgaaataaataaatcgaatcccaatcgaaccgtacccgaaaaacgaaacgaaaaaaatcgcgaaattacgtccgaacaccgactccgaaaaacgcccgttccgcccgcctcccccgcgcgaccccgtcgcgtacctcgaactcccgcgacgcaacccgatccgaaacgtcgatcccgtcccaaaaaaacgccctccgaatactcgaaaacgacgaaaaaactcgaattaaaaccgcgataaaaaaaaaatttataaaatctaatctcttaaaaaaacgcaacgaacaaacaaaactccgctacgaaattaccgctccgaccctaaataataacgatcgttataaaacttccaatcgactaaacgcctcgcgaaaacgacgatttaaaacctcgccgaaaaacctatcgaacgaacgcgacctaaaatcctcgccaaccccacgactctaacccgctaaacaccgccgcccccaacaacgatctccgcccttcgaactaaccgacccgttaacttctctatacaatcctcccatccctattatatacccgacgtcccgaatttctc

SEQ ID NO: 19855 - DNA, 1364 bp, Artificial Sequence
  chemically treated genomic DNA (Homo sapiens) CpG-island No: 19855
tttttattagagtaaggtatttttttttagtgttttttcgagaatcgtagaaagtatattggaatttcgagttttttatttttataggaatcgggagtcgtgcgttatttgagggggaggggcggttttggtacgtaggcgcgtatgttttgtgggggcgaggttgtggtggttcgaggtaatttgggagttgtattttttacgtcggtaaaatcgtttaggtcgttgaggttttcgcgattttattttttaggagttttcgcgattatggggcgggttagtgagttcgttaatgagttcgaggaagttacggcgcggtttattaggttttaaaataaggaaatgaaggagggaggcgggattgggggtgtttgcgggagtcgtcgtcgtcgtcgcggaggaggaggaggaagaggtggaggaggtggttgttgtggtcgtcgaggagttttttgttgaaggcggatcgcggagcggcgggcggcgggcggcgcgcgcgcgcgcgcgagaggcggttgttggagaagtggagcggcggtcgcggggggaggaggaggagggattgagcggcggcggttttcgcgtttcgtgtttttatgggggaagtagataatggattatgattttaaggcgaagttggcggcggagcgggagcgggtggaggatttgtttgagtacgaagggtgtaaagtgggacgcggtatttacggttacgtttataaggcgaggcggaaagatgggtaagagtaggggcgggaggagtaggttcgttcgggttttcgttttgttcgcgatttggcgggatgggtgggtcggattttagtcgggtcgtgttcgaggggcgaggcggagggggtcgcggggttgcgttcggatatcgatttcgaggggcgttcgtttcgttcgtttttttcgcgcggtttcgtcgcgtatttcgaattttcgcggcgtagttcggttcgaggcgtcggtttcgttttagaggggcgtttttcgagtgttcggagacggcggggggattcgagttgggatcgcggtggaggaggagtttgtggggtttagttttttgggggaacgtagcgggtaggtagagtttcgttgcggagttgtcgtttcggttttgggtagtgacggtcgttgtggaatttttaatcggttgagcgtttcgcgggggcggcggtttgaaatttcgtcggggagtttgtcgggcgaacgcggtttggggttttcgttagttttacggttttgattcgttgggtatcgtcgtttttagtagcgattttcgtttttcgggttggtcggttcgttggtttttttatgtagtttttttatttttgttgtatgttcggcgtttcgggtttttt

SEQ ID NO: 19856 - DNA, 1364 bp, Artificial Sequence
  chemically treated genomic DNA (Homo sapiens) CpG-island No: 19856
aaaaaacccgaaacgccgaacatacaacaaaaataaaaaaactacataaaaaaaccaacgaaccgaccaacccgaaaaacgaaaatcgctactaaaaacgacgatacccaacgaatcaaaaccgtaaaactaacgaaaaccccaaaccgcgttcgcccgacaaactccccgacgaaatttcaaaccgccgcccccgcgaaacgctcaaccgattaaaaattccacaacgaccgtcactacccaaaaccgaaacgacaactccgcaacgaaactctacctacccgctacgttcccccaaaaaactaaaccccacaaactcctcctccaccgcgatcccaactcgaatccccccgccgtctccgaacactcgaaaaacgcccctctaaaacgaaaccgacgcctcgaaccgaactacgccgcgaaaattcgaaatacgcgacgaaaccgcgcgaaaaaaacgaacgaaacgaacgcccctcgaaatcgatatccgaacgcaaccccgcgaccccctccgcctcgcccctcgaacacgacccgactaaaatccgacccacccatcccgccaaatcgcgaacaaaacgaaaacccgaacgaacctactcctcccgcccctactcttacccatctttccgcctcgccttataaacgtaaccgtaaataccgcgtcccactttacacccttcgtactcaaacaaatcctccacccgctcccgctccgccgccaacttcgccttaaaatcataatccattatctacttcccccataaaaacacgaaacgcgaaaaccgccgccgctcaatccctcctcctcctccccccgcgaccgccgctccacttctccaacaaccgcctctcgcgcgcgcgcgcgcgccgcccgccgcccgccgctccgcgatccgccttcaacaaaaaactcctcgacgaccacaacaaccacctcctccacctcttcctcctcctcctccgcgacgacgacgacgactcccgcaaacacccccaatcccgcctccctccttcatttccttattttaaaacctaataaaccgcgccgtaacttcctcgaactcattaacgaactcactaacccgccccataatcgcgaaaactcctaaaaaataaaatcgcgaaaacctcaacgacctaaacgattttaccgacgtaaaaaatacaactcccaaattacctcgaaccaccacaacctcgcccccacaaaacatacgcgcctacgtaccaaaaccgcccctccccctcaaataacgcacgactcccgattcctataaaaataaaaaactcgaaattccaatatactttctacgattctcgaaaaaacactaaaaaaaaataccttactctaataaaaa

SEQ ID NO: 19857 - DNA, 591 bp, Artificial Sequence
  chemically treated genomic DNA (Homo sapiens) CpG-island No: 19857
atggcggcggtagcggtgtcgttttgttttcgcggtttttgcggcggtggtagtggtagcggtttttgagttgtggggaggttttagtagtagttatagtgacgattaagattttagtgtatttttatcgtaatcgggcgcgggggagcgtagatcggcgtttagtaattatagaagtcgataaggcgtttaagcgaaaatatgatcgttgagtttatgaggtaaaacgtaatttcgttttatgggttttagcggtttgggtttaggtatcgtttgagtcgggtgtttgggaaggcgttcgtttggtgggttaggtttgtgtgttgtttagtcgaaagaggtatcgttttttttttaggtgagaagggtttcggggtatcggcgtaaggtttcgacgggggtgggggtggggatggggtggggggaggtggggggggcgcggtttagggtatggggcgttttttgtaattttttttaaacggtgacgtttggtcgggtttttttgtttattttttggtgtttgtgggattgagatttcgaagtcggaggcggtttttggtatttcggttatttttgttaatttttgggttt

SEQ ID NO: 19858 - DNA, 591 bp, Artificial Sequence
  chemically treated genomic DNA (Homo sapiens) CpG-island No: 19858
aaacccaaaaattaacaaaaataaccgaaataccaaaaaccgcctccgacttcgaaatctcaatcccacaaacaccaaaaaataaacaaaaaaacccgaccaaacgtcaccgtttaaaaaaaattacaaaaaacgccccataccctaaaccgcgccccccccacctccccccaccccatccccacccccacccccgtcgaaaccttacgccgataccccgaaacccttctcacctaaaaaaaaaacgatacctctttcgactaaacaacacacaaacctaacccaccaaacgaacgccttcccaaacacccgactcaaacgatacctaaacccaaaccgctaaaacccataaaacgaaattacgttttacctcataaactcaacgatcatattttcgcttaaacgccttatcgacttctataattactaaacgccgatctacgctcccccgcgcccgattacgataaaaatacactaaaatcttaatcgtcactataactactactaaaacctccccacaactcaaaaaccgctaccactaccaccgccgcaaaaaccgcgaaaacaaaacgacaccgctaccgccgccat

SEQ ID NO: 19859 - DNA, 591 bp, Artificial Sequence
  chemically treated genomic DNA (Homo sapiens) CpG-island No: 19859
aggtttaaagattagtaaaaatgatcgggatattaaagatcgttttcgatttcgaggttttaattttataggtattaaagaataaatagaggagttcgattaagcgttatcgtttaggggagattgtaagaagcgttttatattttaggtcgcgttttttttatttttttttattttatttttatttttattttcgtcggagttttgcgtcgatatttcgaaattttttttatttaaagagaaaacgatgtttttttcggttaagtaatatataggtttaatttattaagcgaacgtttttttaaatattcgatttagacggtgtttgggtttagatcgttggggtttatgagacggggttgcgttttattttatgggtttagcggttatgttttcgtttgaacgttttgtcggtttttgtgattgttgggcgtcgatttgcgttttttcgcgttcggttacgatagaaatgtattggagttttagtcgttattgtagttgttgttggaatttttttatagtttaaaggtcgttattattgttatcgtcgtaggagtcgcggaaataaagcgatatcgttgtcgtcgttat

SEQ ID NO: 19860 - DNA, 591 bp, Artificial Sequence
  chemically treated genomic DNA (Homo sapiens) CpG-island No: 19860
ataacgacgacaacgatatcgctttatttccgcgactcctacgacgataacaataataacgacctttaaactataaaaaaattccaacaacaactacaataacgactaaaactccaatacatttctatcgtaaccgaacgcgaaaaaacgcaaatcgacgcccaacaatcacaaaaaccgacaaaacgttcaaacgaaaacataaccgctaaacccataaaataaaacgcaaccccgtctcataaaccccaacgatctaaacccaaacaccgtctaaatcgaatatttaaaaaaacgttcgcttaataaattaaacctatatattacttaaccgaaaaaaacatcgttttctctttaaataaaaaaaatttcgaaatatcgacgcaaaactccgacgaaaataaaaataaaaataaaataaaaaaaaataaaaaaaacgcgacctaaaatataaaacgcttcttacaatctcccctaaacgataacgcttaatcgaactcctctatttattctttaatacctataaaattaaaacctcgaaatcgaaaacgatctttaatatcccgatcatttttactaatctttaaacct

SEQ ID NO: 19861 - DNA, 536 bp, Artificial Sequence
  chemically treated genomic DNA (Homo sapiens) CpG-island No: 19861
gaggtgttcgtgaattttttttaaaaggttaatagatcgtcgttagatattagatttattaaacgttaaatttgttgtttaattttattttattttatcgttaaattagttttgtttgattcggttaagattgggttacggcggtattaatagcgtataaattgataatttgtatttttttttacgagtagtagtcgagtcgttattatcgttttaaaatcgtcgtttaatttttttcgcgcgatcgagtcgatagttgcgtcgtaatagtagcgcgtcggggtcgtttagtatttttaatacggcgttttatatttttgtgtcgtcgttttgtaatattttttttttatacgcggttcgcggaaacgtatttattgtggggagttacgttttgtagtattttgatcgtaaggaatcggcgttgtttttagtcgcggaaagttcgggtggtttcggttttttttatcgttcggtttagtataattcgttaagttggggggaggtcgttttttttgggtttttaggcgataaatttt

SEQ ID NO: 19862 - DNA, 536 bp, Artificial Sequence
  chemically treated genomic DNA (Homo sapiens) CpG-island No: 19862
aaaatttatcgcctaaaaacccaaaaaaaacgacctccccccaacttaacgaattatactaaaccgaacgataaaaaaaaccgaaaccacccgaactttccgcgactaaaaacaacgccgattccttacgatcaaaatactacaaaacgtaactccccacaataaatacgtttccgcgaaccgcgtataaaaaaaaaatattacaaaacgacgacacaaaaatataaaacgccgtattaaaaatactaaacgaccccgacgcgctactattacgacgcaactatcgactcgatcgcgcgaaaaaaattaaacgacgattttaaaacgataataacgactcgactactactcgtaaaaaaaaatacaaattatcaatttatacgctattaataccgccgtaacccaatcttaaccgaatcaaacaaaactaatttaacgataaaataaaataaaattaaacaacaaatttaacgtttaataaatctaatatctaacgacgatctattaaccttttaaaaaaaattcacgaacacctc

SEQ ID NO: 19863 - DNA, 536 bp, Artificial Sequence
  chemically treated genomic DNA (Homo sapiens) CpG-island No: 19863
ggggtttgtcgtttggaggtttaagaggaacggtttttttttaatttagcgggttatgttggatcgggcggtgaggggaatcgaggttattcggatttttcgcggttgagggtagcgtcggttttttgcggttaagatgttgtaaaacgtgattttttataataagtacgttttcgcgagtcgcgtgtgggaaggggatgttgtagggcggcggtataggggtgtggggcgtcgtgttgggagtattgagcggtttcggcgcgttgttgttgcggcgtagttgtcgattcggtcgcgcggagggaattgagcgacggttttggaacggtggtggcggttcggttattgttcgtggaggggaatataggttgttaatttatacgttattaatgtcgtcgtggtttagttttaatcgagttaggtagagttagtttgacggtggagtggagtgaggttgaatagtaggtttggcgtttggtgggtttggtatttagcggcggtttgttagttttttaggggggatttacggatatttt

SEQ ID NO: 19864 - DNA, 536 bp, Artificial Sequence
  chemically treated genomic DNA (Homo sapiens) CpG-island No: 19864
aaaatatccgtaaatcccccctaaaaaactaacaaaccgccgctaaataccaaacccaccaaacgccaaacctactattcaacctcactccactccaccgtcaaactaactctacctaactcgattaaaactaaaccacgacgacattaataacgtataaattaacaacctatattcccctccacgaacaataaccgaaccgccaccaccgttccaaaaccgtcgctcaattccctccgcgcgaccgaatcgacaactacgccgcaacaacaacgcgccgaaaccgctcaatactcccaacacgacgccccacacccctataccgccgccctacaacatccccttcccacacgcgactcgcgaaaacgtacttattataaaaaatcacgttttacaacatcttaaccgcaaaaaaccgacgctaccctcaaccgcgaaaaatccgaataacctcgattcccctcaccgcccgatccaacataacccgctaaattaaaaaaaaaccgttcctcttaaacctccaaacgacaaacccc

SEQ ID NO: 19865 - DNA, 784 bp, Artificial Sequence
  chemically treated genomic DNA (Homo sapiens) CpG-island No: 19865
ggagggagtgatttttgcgttttttagttttttttacgacgtcgtttttatagtttgcggagaagcggagattgcgcgtttcgttttatagcgaaacgtcgcgtattcggagtcggtacggttcggcggtgagtgaggtgcggcggtcgcgtcgttttttttttttttcgcgtttcgtcgggacggagcggggcggtcgggggtcggcgagggcgttttcgggggcgcgcggcgcggttcggggcggtgagcggaggcgcggcgtgtgcgtgttttcgcgagggagcgcgcgtggggcggggagcgggtcggggagggggcgtgagcgcgcgcggggttggtgcggtcggcggcgttgagcgcgcgtttcgcgggagcgggcgtcgtcgagatttgagtcgaggggcggggagggattcggggcgacgttcggcgcgcgggtcggggcgtttcgaacggtcgggtaggtattggcgggcgcgcgcgcggtttcgggcgttacgcgttagtaggtgtgagttgggggagggttttcgggtgggttggttcggtcgtcgagttcgtttttcgttttcggggggtttcggcgcggggatattttttcggttcgcggaggcgcgttcgtttttggttggcggtggtagagggaggcgttaggtttcggattttcgggtttttgcgtagcgtttcggtttgtgtgtaggatttgcgtgataaggtgaatgcgttttatatttttcgttagggttttgcgtgtgcggttatttggggaggcggtttagat

SEQ ID NO: 19866 - DNA, 784 bp, Artificial Sequence
  chemically treated genomic DNA (Homo sapiens) CpG-island No: 19866
atctaaaccgcctccccaaataaccgcacacgcaaaaccctaacgaaaaatataaaacgcattcaccttatcacgcaaatcctacacacaaaccgaaacgctacgcaaaaacccgaaaatccgaaacctaacgcctccctctaccaccgccaaccaaaaacgaacgcgcctccgcgaaccgaaaaaatatccccgcgccgaaaccccccgaaaacgaaaaacgaactcgacgaccgaaccaacccacccgaaaaccctcccccaactcacacctactaacgcgtaacgcccgaaaccgcgcgcgcgcccgccaatacctacccgaccgttcgaaacgccccgacccgcgcgccgaacgtcgccccgaatccctccccgcccctcgactcaaatctcgacgacgcccgctcccgcgaaacgcgcgctcaacgccgccgaccgcaccaaccccgcgcgcgctcacgccccctccccgacccgctccccgccccacgcgcgctccctcgcgaaaacacgcacacgccgcgcctccgctcaccgccccgaaccgcgccgcgcgcccccgaaaacgccctcgccgacccccgaccgccccgctccgtcccgacgaaacgcgaaaaaaaaaaaaaacgacgcgaccgccgcacctcactcaccgccgaaccgtaccgactccgaatacgcgacgtttcgctataaaacgaaacgcgcaatctccgcttctccgcaaactataaaaacgacgtcgtaaaaaaaactaaaaaacgcaaaaatcactccctcc

SEQ ID NO: 19867 - DNA, 784 bp, Artificial Sequence
  chemically treated genomic DNA (Homo sapiens) CpG-island No: 19867
gtttgagtcgtttttttaagtggtcgtatacgtagggttttggcgaggggtgtggaacgtatttattttgttacgtaggttttgtatataggtcgggacgttgcgtagggattcgaggattcgaggtttgacgtttttttttgttatcgttagttaggggcggacgcgttttcgcgggtcgggaaggtgttttcgcgtcgaggtttttcggagacgggaagcgaattcgacggtcgggttagtttattcggaagtttttttttagtttatatttgttggcgcgtgacgttcggagtcgcgcgcgcgttcgttagtgtttgttcggtcgttcggggcgtttcggttcgcgcgtcggacgtcgtttcgagttttttttcgtttttcgatttaaatttcggcggcgttcgttttcgcggagcgcgcgtttagcgtcgtcggtcgtattagtttcgcgcgcgtttacgtttttttttcggttcgtttttcgttttacgcgcgttttttcgcgaggatacgtatacgtcgcgttttcgtttatcgtttcgggtcgcgtcgcgcgttttcgggggcgttttcgtcgattttcggtcgtttcgtttcgtttcggcggggcgcgggggaggggaaggacggcgcggtcgtcgtattttatttatcgtcgagtcgtgtcggtttcgagtgcgcggcgtttcgttgtgaggcgaggcgcgtagttttcgttttttcgtagattatggaggcgacgtcgtaggggggattgaggggcgtaggggttatttttttt

SEQ ID NO: 19868 - DNA, 784 bp, Artificial Sequence
  chemically treated genomic DNA (Homo sapiens) CpG-island No: 19868
aaaaaaaataacccctacgcccctcaatcccccctacgacgtcgcctccataatctacgaaaaaacgaaaactacgcgcctcgcctcacaacgaaacgccgcgcactcgaaaccgacacgactcgacgataaataaaatacgacgaccgcgccgtccttcccctcccccgcgccccgccgaaacgaaacgaaacgaccgaaaatcgacgaaaacgcccccgaaaacgcgcgacgcgacccgaaacgataaacgaaaacgcgacgtatacgtatcctcgcgaaaaaacgcgcgtaaaacgaaaaacgaaccgaaaaaaaaacgtaaacgcgcgcgaaactaatacgaccgacgacgctaaacgcgcgctccgcgaaaacgaacgccgccgaaatttaaatcgaaaaacgaaaaaaaactcgaaacgacgtccgacgcgcgaaccgaaacgccccgaacgaccgaacaaacactaacgaacgcgcgcgcgactccgaacgtcacgcgccaacaaatataaactaaaaaaaaacttccgaataaactaacccgaccgtcgaattcgcttcccgtctccgaaaaacctcgacgcgaaaacaccttcccgacccgcgaaaacgcgtccgcccctaactaacgataacaaaaaaaaacgtcaaacctcgaatcctcgaatccctacgcaacgtcccgacctatatacaaaacctacgtaacaaaataaatacgttccacacccctcgccaaaaccctacgtatacgaccacttaaaaaaacgactcaaac

SEQ ID NO: 19869 - DNA, 987 bp, Artificial Sequence
  chemically treated genomic DNA (Homo sapiens) CpG-island No: 19869
tttcggtagcgtcgttcgtttttcgcgatttgcggttgttttttgagcgcgtatttcggtcgggaagtcgttggttgggtttcgatcgtcgggtagggacgggtcgcgttattcggggtttggagttcgggttttgtcggggagttagggaagggaggttcgggtcggggcgttcgatttcgaagtgttcgagcgttcggaattcgggtggattttttcgttcgtttagcgtagcgttggatcggtcgggattcgggggattatgcgttcggcgttcgtaatttcgcgtcgatttcgggaggttcgcggggcgtttgtcggggtcggaggagggggttcggggtttagagggtcgtgtcggggtcggggtcgcgcggtatttattgtagtaggcgatgagtaggttggttaggattatgaacgtttagaaagttgaggatatgttgggtagggcggtcgtattttgtcggttgtcggttttgggcgatggcgttattgaagtcgcggcgttcgcgcggggggtagtagcgcgttttagtagtcggttttgttcgcgttttcgcgtcggtttttacgtgcgggtttcgcgcgcgttatttttcgtcgtcgtcgtcgtcgcgttcgggtttcggtttatcgcgtttcgcgtcgcgttcgcgtcgttcgcgttcgcgttcgcgttcgtcgatttcgcgtcggttcgttagggggacgtcggtttcgttttgggcgttattgcgcgtttcggttacgcgcgtttcggtattcgcgagagaggcgcgcgttcgttatcgttgggggttttagtcgttcgtcgattcgggtttggtagaggggacgcggcgtttaagtcgttttttcggatggcgatagagacggtttgacgcgttcgtagtttgggttttttacggggaggacggtcgggttaggtgaagttcgcgtatttgggtttttcgcgtttttatttatcgtagttagggtttggaa

SEQ ID NO: 19870 - DNA, 987 bp, Artificial Sequence
  chemically treated genomic DNA (Homo sapiens) CpG-island No: 19870
ttccaaaccctaactacgataaataaaaacgcgaaaaacccaaatacgcgaacttcacctaacccgaccgtcctccccgtaaaaaacccaaactacgaacgcgtcaaaccgtctctatcgccatccgaaaaaacgacttaaacgccgcgtcccctctaccaaacccgaatcgacgaacgactaaaacccccaacgataacgaacgcgcgcctctctcgcgaataccgaaacgcgcgtaaccgaaacgcgcaataacgcccaaaacgaaaccgacgtccccctaacgaaccgacgcgaaatcgacgaacgcgaacgcgaacgcgaacgacgcgaacgcgacgcgaaacgcgataaaccgaaacccgaacgcgacgacgacgacgacgaaaaataacgcgcgcgaaacccgcacgtaaaaaccgacgcgaaaacgcgaacaaaaccgactactaaaacgcgctactaccccccgcgcgaacgccgcgacttcaataacgccatcgcccaaaaccgacaaccgacaaaatacgaccgccctacccaacatatcctcaactttctaaacgttcataatcctaaccaacctactcatcgcctactacaataaataccgcgcgaccccgaccccgacacgaccctctaaaccccgaaccccctcctccgaccccgacaaacgccccgcgaacctcccgaaatcgacgcgaaattacgaacgccgaacgcataatcccccgaatcccgaccgatccaacgctacgctaaacgaacgaaaaaatccacccgaattccgaacgctcgaacacttcgaaatcgaacgccccgacccgaacctcccttccctaactccccgacaaaacccgaactccaaaccccgaataacgcgacccgtccctacccgacgatcgaaacccaaccaacgacttcccgaccgaaatacgcgctcaaaaaacaaccgcaaatcgcgaaaaacgaacgacgctaccgaaa

SEQ ID NO: 19871 - DNA, 987 bp, Artificial Sequence
  chemically treated genomic DNA (Homo sapiens) CpG-island No: 19871
ttttaggttttggttgcggtggatgggggcgcggaaggtttaagtgcgcgaattttatttggttcggtcgtttttttcgtggggggtttaggttgcgggcgcgttaggtcgtttttgtcgttattcggaggagcggtttgggcgtcgcgttttttttgttaggttcgggtcggcgggcggttggagtttttagcggtggcgggcgcgcgtttttttcgcggatgtcggggcgcgcgtagtcggggcgcgtagtgacgtttagagcggggtcggcgtttttttggcgggtcggcgcggggtcggcgggcgcgggcgcgagcgcgggcggcgcgggcgcggcgcggggcgcggtgggtcggggttcgggcgcggcggcggcggcggcggaggatggcgcgcgcggggttcgtacgtggaggtcggcgcgggggcgcgggtagggtcggttgttgagacgcgttgttgtttttcgcgcgggcgtcgcggttttaatggcgttatcgtttaggatcggtagtcggtaagatgcgatcgttttgtttagtatgtttttaattttttgggcgtttatgattttggttagtttgtttatcgtttattgtagtgagtatcgcgcggtttcggtttcggtacggttttttgggtttcggattttttttttcggtttcggtaggcgtttcgcgggtttttcggagtcggcgcggagttacgagcgtcgggcgtatggtttttcgagtttcggtcggtttaacgttgcgttgggcgggcgagagggtttattcgggtttcgggcgttcgagtatttcggggtcggacgtttcggttcgagttttttttttttgatttttcggtagggttcgggttttaggtttcgggtggcgcggttcgtttttgttcggcggtcggagtttagttagcggtttttcggtcgagatgcgcgtttaggaggtagtcgtaggtcgcggagggcgggcggcgttgtcgggg

SEQ ID NO: 19872 - DNA, 987 bp, Artificial Sequence
  chemically treated genomic DNA (Homo sapiens) CpG-island No: 19872
ccccgacaacgccgcccgccctccgcgacctacgactacctcctaaacgcgcatctcgaccgaaaaaccgctaactaaactccgaccgccgaacaaaaacgaaccgcgccacccgaaacctaaaacccgaaccctaccgaaaaatcaaaaaaaaaaaactcgaaccgaaacgtccgaccccgaaatactcgaacgcccgaaacccgaataaaccctctcgcccgcccaacgcaacgttaaaccgaccgaaactcgaaaaaccatacgcccgacgctcgtaactccgcgccgactccgaaaaacccgcgaaacgcctaccgaaaccgaaaaaaaaaatccgaaacccaaaaaaccgtaccgaaaccgaaaccgcgcgatactcactacaataaacgataaacaaactaaccaaaatcataaacgcccaaaaaattaaaaacatactaaacaaaacgatcgcatcttaccgactaccgatcctaaacgataacgccattaaaaccgcgacgcccgcgcgaaaaacaacaacgcgtctcaacaaccgaccctacccgcgcccccgcgccgacctccacgtacgaaccccgcgcgcgccatcctccgccgccgccgccgccgcgcccgaaccccgacccaccgcgccccgcgccgcgcccgcgccgcccgcgctcgcgcccgcgcccgccgaccccgcgccgacccgccaaaaaaacgccgaccccgctctaaacgtcactacgcgccccgactacgcgcgccccgacatccgcgaaaaaaacgcgcgcccgccaccgctaaaaactccaaccgcccgccgacccgaacctaacaaaaaaaacgcgacgcccaaaccgctcctccgaataacgacaaaaacgacctaacgcgcccgcaacctaaaccccccacgaaaaaaacgaccgaaccaaataaaattcgcgcacttaaaccttccgcgcccccatccaccgcaaccaaaacctaaaa

SEQ ID NO: 19873 - DNA, 902 bp, Artificial Sequence
  chemically treated genomic DNA (Homo sapiens) CpG-island No: 19873
cgagggcgaggattttcgtgttttttcgtttcgcgtagtatagttttgttaggtagtgtataggtgtacgatcgcgttcgttcgttcggttcggttcgggttttagtttcggtatagtgatcgtcgttttgcgatttcggtttcgagggtaggggtagaaggtcggtaagaagagggtaggggacgcgagggtcgtttcgttcgatttttcgaggacgcgcgtagtagggtcgggggggaaaaaggatgttttaggcggggcgaggtcgcggtgggggaggggtttttaattcggatttttatttatcgtttcgcgcggttttcggtcgggtttcgcggttcgttttatttcggttttagtcgttcgcgttttttttcgaggtttattgtttagttcgggcgtacggagttgagaagtcgtcgttagcggagggcgtgtggttagcggtaattaagagggtgggaaagatgggatcgtcgttttcgtcgtcgcggttattatagatattgtcgtcgtcggttttttttagttacggaagttgcgggttcgtttattacgttcgtttttcgttttgaagattgttcgttggagaagtgacggcggcgttagttaattagaggtttgatcggggtcgtgatcggcggattaaagggcgggcggagaaggaagcggtatgaagaaggcgaaaacggcggtttgattttttgtgattgacggtacggcgtagttaatgggtaacggggagatgattttatttttgaggaaagtttggaattggttgagttgcggcgagggggttggcgacgagtcgggggcggagttttgggttttaaagaggtcgtagttttgtggttattttgtgaagggaagggcggtggattttgtcggattttgcgaagtt

SEQ ID NO: 19874 - DNA, 902 bp, Artificial Sequence
  chemically treated genomic DNA (Homo sapiens) CpG-island No: 19874
aacttcgcaaaatccgacaaaatccaccgcccttcccttcacaaaataaccacaaaactacgacctctttaaaacccaaaactccgcccccgactcgtcgccaaccccctcgccgcaactcaaccaattccaaactttcctcaaaaataaaatcatctccccgttacccattaactacgccgtaccgtcaatcacaaaaaatcaaaccgccgttttcgccttcttcataccgcttccttctccgcccgccctttaatccgccgatcacgaccccgatcaaacctctaattaactaacgccgccgtcacttctccaacgaacaatcttcaaaacgaaaaacgaacgtaataaacgaacccgcaacttccgtaactaaaaaaaaccgacgacgacaatatctataataaccgcgacgacgaaaacgacgatcccatctttcccaccctcttaattaccgctaaccacacgccctccgctaacgacgacttctcaactccgtacgcccgaactaaacaataaacctcgaaaaaaaacgcgaacgactaaaaccgaaataaaacgaaccgcgaaacccgaccgaaaaccgcgcgaaacgataaataaaaatccgaattaaaaacccctcccccaccgcgacctcgccccgcctaaaacatcctttttcccccccgaccctactacgcgcgtcctcgaaaaatcgaacgaaacgaccctcgcgtcccctaccctcttcttaccgaccttctacccctaccctcgaaaccgaaatcgcaaaacgacgatcactataccgaaactaaaacccgaaccgaaccgaacgaacgaacgcgatcgtacacctatacactacctaacaaaactatactacgcgaaacgaaaaaacacgaaaatcctcgccctcg

SEQ ID NO: 19875 - DNA, 902 bp, Artificial Sequence
  chemically treated genomic DNA (Homo sapiens) CpG-island No: 19875
aatttcgtaagattcggtagggtttatcgtttttttttttatagggtgattatagggttgcggtttttttaaggtttagagtttcgttttcggttcgtcgttaattttttcgtcgtagtttagttagttttagattttttttagagatgaggttattttttcgttgtttattggttgcgtcgtgtcgttagttataggaagttaggtcgtcgttttcgttttttttatgtcgttttttttttcgttcgttttttagttcgtcgattacgatttcgattaggtttttgattggttagcgtcgtcgttatttttttagcggatagtttttaggacgggaggcgggcgtggtgggcgggttcgtagttttcgtggttgagaggagtcggcggcggtagtgtttgtggtggtcgcggcggcgagagcgacggttttattttttttatttttttggttgtcgttggttatacgtttttcgttggcggcgattttttagtttcgtgcgttcgggttggatagtgagtttcgagaggagacgcgggcggttagagtcggagtggggcgagtcgcggaattcggtcgggagtcgcgcgaggcggtgagtgagagttcgggttggggattttttttttatcgcggtttcgtttcgtttggagtattttttttttttttcgattttgttgcgcgcgttttcggggggtcgggcgaggcggttttcgcgttttttgttttttttttgtcggttttttgtttttgttttcggggtcggagtcgtagagcggcggttattgtgtcggggttgggattcgggtcgggtcgggcgggcgggcgcggtcgtgtatttgtgtattgtttggtagggttgtgttgcgcggggcggggaggtacggaggttttcgttttcg

SEQ ID NO: 19876 - DNA, 902 bp, Artificial Sequence
  chemically treated genomic DNA (Homo sapiens) CpG-island No: 19876
cgaaaacgaaaacctccgtacctccccgccccgcgcaacacaaccctaccaaacaatacacaaatacacgaccgcgcccgcccgcccgacccgacccgaatcccaaccccgacacaataaccgccgctctacgactccgaccccgaaaacaaaaacaaaaaaccgacaaaaaaaaaacaaaaaacgcgaaaaccgcctcgcccgaccccccgaaaacgcgcgcaacaaaatcgaaaaaaaaaaaaaatactccaaacgaaacgaaaccgcgataaaaaaaaaatccccaacccgaactctcactcaccgcctcgcgcgactcccgaccgaattccgcgactcgccccactccgactctaaccgcccgcgtctcctctcgaaactcactatccaacccgaacgcacgaaactaaaaaatcgccgccaacgaaaaacgtataaccaacgacaaccaaaaaaataaaaaaaataaaaccgtcgctctcgccgccgcgaccaccacaaacactaccgccgccgactcctctcaaccacgaaaactacgaacccgcccaccacgcccgcctcccgtcctaaaaactatccgctaaaaaaataacgacgacgctaaccaatcaaaaacctaatcgaaatcgtaatcgacgaactaaaaaacgaacgaaaaaaaaaacgacataaaaaaaacgaaaacgacgacctaacttcctataactaacgacacgacgcaaccaataaacaacgaaaaaataacctcatctctaaaaaaaatctaaaactaactaaactacgacgaaaaaattaacgacgaaccgaaaacgaaactctaaaccttaaaaaaaccgcaaccctataatcaccctataaaaaaaaaaacgataaaccctaccgaatcttacgaaatt

SEQ ID NO: 19877 - DNA, 502 bp, Artificial Sequence
  chemically treated genomic DNA (Homo sapiens) CpG-island No: 19877
gcgcgggcggtattttgcggtgaattaagaaggtttcgtcgaggttaaagcgtaatatcgcgatagtttttaacgtatgcgggagtcggtcgtggtaggttggtttcgttttttattgtttcgttaggttgtgcgttatttgtttttcgtttcgcgtagggtgaagttgtagttatttcggttttggtgggagggaggaggggtttggaaagggttgggtttaggtttttttcgttcggtagaggttttcgcgggatcgcgcggaggcggcggtggttcggttattgattgtagtagtcgcggaggcggcggtaaggttttcggttcgtgtcgttttaagtcggagaattttcgcgggagtagggttacgttttcgtgggattcgttggcggtggttgaggtagttcgcgggtggggggtgggggggtagtgattagggtcggttcgtttgttgttaagatggcggcggaggttgatgtttgttcggttaggatttagtata

SEQ ID NO: 19878 - DNA, 502 bp, Artificial Sequence
  chemically treated genomic DNA (Homo sapiens) CpG-island No: 19878
tatactaaatcctaaccgaacaaacatcaacctccgccgccatcttaacaacaaacgaaccgaccctaatcactacccccccaccccccacccgcgaactacctcaaccaccgccaacgaatcccacgaaaacgtaaccctactcccgcgaaaattctccgacttaaaacgacacgaaccgaaaaccttaccgccgcctccgcgactactacaatcaataaccgaaccaccgccgcctccgcgcgatcccgcgaaaacctctaccgaacgaaaaaaacctaaacccaaccctttccaaacccctcctccctcccaccaaaaccgaaataactacaacttcaccctacgcgaaacgaaaaacaaataacgcacaacctaacgaaacaataaaaaacgaaaccaacctaccacgaccgactcccgcatacgttaaaaactatcgcgatattacgctttaacctcgacgaaaccttcttaattcaccgcaaaataccgcccgcgc

SEQ ID NO: 19879 - DNA, 502 bp, Artificial Sequence
  chemically treated genomic DNA (Homo sapiens) CpG-island No: 19879
tgtgttgggttttggtcggatagatattagttttcgtcgttattttaatagtaggcggatcgattttagttattgtttttttattttttattcgcgagttattttagttatcgttaacgaattttacgaggacgtaattttgttttcgcgagaatttttcggtttagaacggtacgagtcgaagattttgtcgtcgttttcgcggttattgtagttagtaatcgagttatcgtcgttttcgcgcgatttcgcgagaatttttatcggacgggaaaagtttgagtttagttttttttagatttttttttttttttattaaagtcgaagtagttatagttttattttacgcgaagcgaaaagtaaatgacgtataatttaacgaagtagtgaggggcggagttaatttattacggtcggttttcgtatgcgttgagaattatcgcgatattacgttttagtttcggcgagatttttttaatttatcgtaggatgtcgttcgcgt

SEQ ID NO: 19880 - DNA, 502 bp, Artificial Sequence
  chemically treated genomic DNA (Homo sapiens) CpG-island No: 19880
acgcgaacgacatcctacgataaattaaaaaaatctcgccgaaactaaaacgtaatatcgcgataattctcaacgcatacgaaaaccgaccgtaataaattaactccgcccctcactacttcgttaaattatacgtcatttacttttcgcttcgcgtaaaataaaactataactacttcgactttaataaaaaaaaaaaaaaatctaaaaaaaactaaactcaaacttttcccgtccgataaaaattctcgcgaaatcgcgcgaaaacgacgataactcgattactaactacaataaccgcgaaaacgacgacaaaatcttcgactcgtaccgttctaaaccgaaaaattctcgcgaaaacaaaattacgtcctcgtaaaattcgttaacgataactaaaataactcgcgaataaaaaataaaaaaacaataactaaaatcgatccgcctactattaaaataacgacgaaaactaatatctatccgaccaaaacccaacaca

SEQ ID NO: 19881 - DNA, 1301 bp, Artificial Sequence
  chemically treated genomic DNA (Homo sapiens) CpG-island No: 19881
gcgtttcgttagggttcggtaggatttcgtttttaagtcgggaaaagttggtcggcgtttttttttttcgacgaagtcgttttagggttgtttttagaggacgcgcggtaggtaaagagaatgaatttgagcgtttacgaaacgttttgtacggttttcgggagttgggagaaataggtgttttttttcgacgttcgcgggcgacgtttgtcgtattttgttcgttgtcgcgtttttttcgggtatttttcgttttcggcgtttttgtttttatttttagtgttagggcggaggtagtttcggttcgtaggtaattattgttagcggagttcgtcggggagcgggggtgggcgcgtcggcggtgggcgggcgggcgcggcggggcgcgggtataaaggggcgcggcgcggggtttcggagtttggttttcgcgtagtatgttcgttagcgtttcgtcgcgtcgttcgcggtcgtcgtcgtcgtcgttgtcgttgttgttggtgttgttgggtttgggcggtcgtcgtttgcgtgcggagtcgggcgacggcgcgtagatttgggttcgtttttcgcggttttttgttttcgaggtcgcgggttttttttagggtatttttttcgacggttttttttgggtcgtgggtagcgtcgtttattagatcgagggcggttggtagtagtacggtaagggtgcgtttatttgggatacgtttatttattattttttggtattttcgggagattttcggaacgttagtttgtcgttgggcgtttcgtcgtcgttgtagttcgttatcggggacgtagttagcgatagttataataacgtttttcgcgatacggaggcgttgcgcgagttcggggttatttattatcgtttttttatttcgtgggcgcgagtgttttttaatggtagcgcgggcgtttttaatcgcgaggggttgcgttattatcggcgtttgttggagcggttgcgggagttgggcgtgtagttcgtggttattttgtattattgggatttgttttagcgtttgtaggacgtttacggcggttgggttaatcgcgttttggtcgattattttagggattacgcggagttttgttttcgttatttcggcggttaggttaagtattggattattatcgataatttttacgtggtggtttggtacggttacgttatcgggcgtttggttttcggtattcggggtagttcgcggttcgggtatttggtggcgtataatttttttttggtgagtgcgaggggttaggcggagggttacgtaggggagatagag

SEQ ID NO: 19882 - DNA, 1301 bp, Artificial Sequence
  chemically treated genomic DNA (Homo sapiens) CpG-island No: 19882
ctctatctcccctacgtaaccctccgcctaacccctcgcactcaccaaaaaaaaattatacgccaccaaatacccgaaccgcgaactaccccgaataccgaaaaccaaacgcccgataacgtaaccgtaccaaaccaccacgtaaaaattatcgataataatccaatacttaacctaaccgccgaaataacgaaaacaaaactccgcgtaatccctaaaataatcgaccaaaacgcgattaacccaaccgccgtaaacgtcctacaaacgctaaaacaaatcccaataatacaaaataaccacgaactacacgcccaactcccgcaaccgctccaacaaacgccgataataacgcaacccctcgcgattaaaaacgcccgcgctaccattaaaaaacactcgcgcccacgaaataaaaaaacgataataaataaccccgaactcgcgcaacgcctccgtatcgcgaaaaacgttattataactatcgctaactacgtccccgataacgaactacaacgacgacgaaacgcccaacgacaaactaacgttccgaaaatctcccgaaaataccaaaaaataataaataaacgtatcccaaataaacgcacccttaccgtactactaccaaccgccctcgatctaataaacgacgctacccacgacccaaaaaaaaccgtcgaaaaaaataccctaaaaaaaacccgcgacctcgaaaacaaaaaaccgcgaaaaacgaacccaaatctacgcgccgtcgcccgactccgcacgcaaacgacgaccgcccaaacccaacaacaccaacaacaacgacaacgacgacgacgacgaccgcgaacgacgcgacgaaacgctaacgaacatactacgcgaaaaccaaactccgaaaccccgcgccgcgcccctttatacccgcgccccgccgcgcccgcccgcccaccgccgacgcgcccacccccgctccccgacgaactccgctaacaataattacctacgaaccgaaactacctccgccctaacactaaaaataaaaacaaaaacgccgaaaacgaaaaatacccgaaaaaaacgcgacaacgaacaaaatacgacaaacgtcgcccgcgaacgtcgaaaaaaaacacctatttctcccaactcccgaaaaccgtacaaaacgtttcgtaaacgctcaaattcattctctttacctaccgcgcgtcctctaaaaacaaccctaaaacgacttcgtcgaaaaaaaaaaacgccgaccaacttttcccgacttaaaaacgaaatcctaccgaaccctaacgaaacgc

SEQ ID NO: 19883 - DNA, 1301 bp, Artificial Sequence
  chemically treated genomic DNA (Homo sapiens) CpG-island No: 19883
ttttgttttttttgcgtggtttttcgtttggtttttcgtatttattaggaggaggttgtgcgttattaggtattcgagtcgcgggttgtttcggatgtcgggggttaggcgttcggtggcgtagtcgtgttaggttattacgtaggggttgtcgatggtgatttagtatttgatttgatcgtcgaagtggcggaagtagagtttcgcgtaatttttgaagtggtcggttagggcgcggttggtttagtcgtcgtaggcgttttgtaggcgttggggtaggttttagtggtatagggtgattacgggttgtacgtttagttttcgtagtcgttttagtaggcgtcggtagtagcgtagtttttcgcggttggggacgttcgcgttgttattggggagtattcgcgtttacgagatggagaagcggtagtgagtgatttcgagttcgcgtagcgttttcgtgtcgcggaagacgttgttgtagttgtcgttggttacgttttcggtggcgggttgtagcggcgacggggcgtttaacggtagattggcgtttcgggagtttttcgggggtgttagggggtggtgggtgaacgtgttttagatggacgtatttttgtcgtgttgttgttagtcgttttcggtttggtaggcggcgttgtttacggtttagaggaagtcgtcggggaaggtgttttggaagaggttcgcggtttcgggggtaggaggtcgcgagaaacgggtttaggtttgcgcgtcgtcgttcggtttcgtacgtaggcggcggtcgtttaggtttagtagtattagtagtagcgatagcgacggcggcggcggtcgcgggcggcgcggcggggcgttggcgggtatgttgcgcgggagttaggtttcggggtttcgcgtcgcgtttttttatgttcgcgtttcgtcgcgttcgttcgtttatcgtcggcgcgtttattttcgtttttcggcgggtttcgttggtaataattatttgcgagtcgggattgttttcgttttggtattgggggtgggggtaggggcgtcgagggcgaggggtgttcgggaggggcgcggtagcgggtaaggtgcggtaggcgtcgttcgcggacgtcggagaaaggtatttgttttttttagttttcgggagtcgtgtaggacgtttcgtggacgtttaggtttattttttttgtttgtcgcgcgttttttgagagtagttttggagcggtttcgtcggggagaaaaggcgtcgattaatttttttcgatttgggggcgggattttgtcgggttttagcggagcgt

SEQ ID NO: 19884 - DNA, 1301 bp, Artificial Sequence
  chemically treated genomic DNA (Homo sapiens) CpG-island No: 19884
acgctccgctaaaacccgacaaaatcccgcccccaaatcgaaaaaaattaatcgacgccttttctccccgacgaaaccgctccaaaactactctcaaaaaacgcgcgacaaacaaaaaaaataaacctaaacgtccacgaaacgtcctacacgactcccgaaaactaaaaaaaacaaatacctttctccgacgtccgcgaacgacgcctaccgcaccttacccgctaccgcgcccctcccgaacacccctcgccctcgacgcccctacccccacccccaataccaaaacgaaaacaatcccgactcgcaaataattattaccaacgaaacccgccgaaaaacgaaaataaacgcgccgacgataaacgaacgaacgcgacgaaacgcgaacataaaaaaacgcgacgcgaaaccccgaaacctaactcccgcgcaacatacccgccaacgccccgccgcgccgcccgcgaccgccgccgccgtcgctatcgctactactaatactactaaacctaaacgaccgccgcctacgtacgaaaccgaacgacgacgcgcaaacctaaacccgtttctcgcgacctcctacccccgaaaccgcgaacctcttccaaaacaccttccccgacgacttcctctaaaccgtaaacaacgccgcctaccaaaccgaaaacgactaacaacaacacgacaaaaatacgtccatctaaaacacgttcacccaccaccccctaacacccccgaaaaactcccgaaacgccaatctaccgttaaacgccccgtcgccgctacaacccgccaccgaaaacgtaaccaacgacaactacaacaacgtcttccgcgacacgaaaacgctacgcgaactcgaaatcactcactaccgcttctccatctcgtaaacgcgaatactccccaataacaacgcgaacgtccccaaccgcgaaaaactacgctactaccgacgcctactaaaacgactacgaaaactaaacgtacaacccgtaatcaccctataccactaaaacctaccccaacgcctacaaaacgcctacgacgactaaaccaaccgcgccctaaccgaccacttcaaaaattacgcgaaactctacttccgccacttcgacgatcaaatcaaatactaaatcaccatcgacaacccctacgtaataacctaacacgactacgccaccgaacgcctaacccccgacatccgaaacaacccgcgactcgaatacctaataacgcacaacctcctcctaataaatacgaaaaaccaaacgaaaaaccacgcaaaaaaaacaaaa

SEQ ID NO: 19885 - DNA, 532 bp, Artificial Sequence
  chemically treated genomic DNA (Homo sapiens) CpG-island No: 19885
cgcgcgagggacgaagggcggtttattgtaaggggaaatgttgaggattattgggtttttttcggttttttgaacgtaagttagtaagtgggcgggatttggggcgggcggagcggcgaaagtatttgtttttgcgttttgtggttttttgttttcggttttttcgtttgcgacgtcgaagggggcgtggtttgcgtagaggttggtgggggtgcgggcgtcgcgggatttgggtgacgcgtttttttttagtttagcggtgtgtgaggtgtcgcggtttcgtcggcgattggttgttgagaggcgagtacgcggcggtcgttggtcgttggttttacggagtaaggttttcggcgggcggggaggatatggggcggtagtggcggttgtaggaggcgggcgtggacgagtcggtggttgtagcggcggcggttttcggagttttgtgaagcgtttttgttcgcgtttttgtggggtttttagagagggttgttaggacgcgagttattgaggagtcgtttagttagcgtta

SEQ ID NO: 19886 - DNA, 532 bp, Artificial Sequence
  chemically treated genomic DNA (Homo sapiens) CpG-island No: 19886
taacgctaactaaacgactcctcaataactcgcgtcctaacaaccctctctaaaaaccccacaaaaacgcgaacaaaaacgcttcacaaaactccgaaaaccgccgccgctacaaccaccgactcgtccacgcccgcctcctacaaccgccactaccgccccatatcctccccgcccgccgaaaaccttactccgtaaaaccaacgaccaacgaccgccgcgtactcgcctctcaacaaccaatcgccgacgaaaccgcgacacctcacacaccgctaaactaaaaaaaaacgcgtcacccaaatcccgcgacgcccgcacccccaccaacctctacgcaaaccacgcccccttcgacgtcgcaaacgaaaaaaccgaaaacaaaaaaccacaaaacgcaaaaacaaatactttcgccgctccgcccgccccaaatcccgcccacttactaacttacgttcaaaaaaccgaaaaaaacccaataatcctcaacatttccccttacaataaaccgcccttcgtccctcgcgcg

SEQ ID NO: 19887 - DNA, 532 bp, Artificial Sequence
  chemically treated genomic DNA (Homo sapiens) CpG-island No: 19887
tggcgttggttgagcggttttttagtggttcgcgttttggtagttttttttgagggttttatagaggcgcggataggggcgttttataggatttcggggatcgtcgtcgttgtagttatcggttcgtttacgttcgttttttgtagtcgttattgtcgttttatatttttttcgttcgtcgggggttttgtttcgtgaggttagcgattaacggtcgtcgcgtattcgttttttaatagttaatcgtcggcggggtcgcgatattttatatatcgttgagttggaaagggacgcgttatttaagtttcgcggcgttcgtatttttattagtttttgcgtaggttacgtttttttcgacgtcgtaggcggagaagtcggaggtaggagattataaagcgtaggagtagatgttttcgtcgtttcgttcgttttaggtttcgtttatttgttggtttgcgtttagaaagtcgggaggagtttagtgatttttagtatttttttttatagtggatcgtttttcgtttttcgcgcg

SEQ ID NO: 19888 - DNA, 532 bp, Artificial Sequence
  chemically treated genomic DNA (Homo sapiens) CpG-island No: 19888
cgcgcgaaaaacgaaaaacgatccactataaaaaaaaatactaaaaatcactaaactcctcccgactttctaaacgcaaaccaacaaataaacgaaacctaaaacgaacgaaacgacgaaaacatctactcctacgctttataatctcctacctccgacttctccgcctacgacgtcgaaaaaaacgtaacctacgcaaaaactaataaaaatacgaacgccgcgaaacttaaataacgcgtccctttccaactcaacgatatataaaatatcgcgaccccgccgacgattaactattaaaaaacgaatacgcgacgaccgttaatcgctaacctcacgaaacaaaacccccgacgaacgaaaaaaatataaaacgacaataacgactacaaaaaacgaacgtaaacgaaccgataactacaacgacgacgatccccgaaatcctataaaacgcccctatccgcgcctctataaaaccctcaaaaaaaactaccaaaacgcgaaccactaaaaaaccgctcaaccaacgcca

SEQ ID NO: 19889 - DNA, 1139 bp, Artificial Sequence
  chemically treated genomic DNA (Homo sapiens) CpG-island No: 19889
tttagcgtttgggtcgtgggggtttgcgttcgcgtttgtttcgtcgtttgcgtttgtagtatcgtggagcgcggttgttcggtgcgttgcgatcgcgcgggttttttgcgggtgtcggtcgagttttcgtgcgaggcggtttttatcgatttggatcggaacggtttgcgttttttgggcgagcgagttttcggtacgttgtcgtttttgcgtcgtttgtcgttgcgttataataatttgttttttattacgttcggcgtttttaagggtttgtcgcgtttggttgagttgcgtttggcgtataacggcgatttgcgttatttgtacgcgcgtattttcgcggcgtttagtcgtttgcgtcgtttagatttagtagtttgtcgtttttttagcgtgttcgagcgttttttggtcgaattgtcggttttgcgcgaattcgtcgttttcgataatttgtttcgtcgcgtgtcgggcgcgttgcgcggtttggttaatttgacgtacgcgtatttggagcgcggtcgtatcgaggcggtggtttttagttcgttgtagggtttgcgtcgtttgcgttcgtttagtttgtaggttaatcgcgttcgtgtcgtgtacgttggcgttttcggggattgtggcgttttggagtatttgttgtttaacgataatttgttggtcgagttttcggtcgacgtttttcgcggtttgcggcgtttgcgtacgtttaatttgggtggtaacgcgttggatcgcgtggcgcgcgtttggttcgttgatttggtcgagttcgagttgttttatttggatcgtaatagtatcgttttcgtggaggagggcgttttttagaatttttcgggttttttcgcgttgtattttaacggtaatcgttttatcgtgttcgtttgggtcgttttttagttcggtttttttttgggtcgtttttttttttttcgtaattcgtggtgttgcgattgtcgtttggagtggttgagggattggatggagggtttcggacgtgttatcgacgtgtcgtgcgttttttcgggtttcgtggtcggtttggattttagttaggtgattttcgggcgttttttcgatggtttttgtgtggatttcgaggagttgaattttattacgtttag

SEQ ID NO: 19890 - DNA, 1139 bp, Artificial Sequence
  chemically treated genomic DNA (Homo sapiens) CpG-island No: 19890
ctaaacgtaataaaattcaactcctcgaaatccacacaaaaaccatcgaaaaaacgcccgaaaatcacctaactaaaatccaaaccgaccacgaaacccgaaaaaacgcacgacacgtcgataacacgtccgaaaccctccatccaatccctcaaccactccaaacgacaatcgcaacaccacgaattacgaaaaaaaaaaaaacgacccaaaaaaaaaccgaactaaaaaacgacccaaacgaacacgataaaacgattaccgttaaaatacaacgcgaaaaaacccgaaaaattctaaaaaacgccctcctccacgaaaacgatactattacgatccaaataaaacaactcgaactcgaccaaatcaacgaaccaaacgcgcgccacgcgatccaacgcgttaccacccaaattaaacgtacgcaaacgccgcaaaccgcgaaaaacgtcgaccgaaaactcgaccaacaaattatcgttaaacaacaaatactccaaaacgccacaatccccgaaaacgccaacgtacacgacacgaacgcgattaacctacaaactaaacgaacgcaaacgacgcaaaccctacaacgaactaaaaaccaccgcctcgatacgaccgcgctccaaatacgcgtacgtcaaattaaccaaaccgcgcaacgcgcccgacacgcgacgaaacaaattatcgaaaacgacgaattcgcgcaaaaccgacaattcgaccaaaaaacgctcgaacacgctaaaaaaacgacaaactactaaatctaaacgacgcaaacgactaaacgccgcgaaaatacgcgcgtacaaataacgcaaatcgccgttatacgccaaacgcaactcaaccaaacgcgacaaacccttaaaaacgccgaacgtaataaaaaacaaattattataacgcaacgacaaacgacgcaaaaacgacaacgtaccgaaaactcgctcgcccaaaaaacgcaaaccgttccgatccaaatcgataaaaaccgcctcgcacgaaaactcgaccgacacccgcaaaaaacccgcgcgatcgcaacgcaccgaacaaccgcgctccacgatactacaaacgcaaacgacgaaacaaacgcgaacgcaaacccccacgacccaaacgctaaa

SEQ ID NO: 19891 - DNA, 1139 bp, Artificial Sequence
  chemically treated genomic DNA (Homo sapiens) CpG-island No: 19891
ttggacgtggtgaggtttagtttttcggggtttatatagaggttatcggaggagcgttcgaaggttatttggttgaggtttaggtcggttacggagttcggggaggcgtacggtacgtcggtgatacgttcggagttttttatttagttttttagttattttagacggtagtcgtagtattacgggttgcggaagaggaagaggcggtttaggaagaagtcgggttggaaggcgatttaggcgagtacggtgaggcggttgtcgttgaggtgtagcgcgaggagattcgagaggttttggaaggcgtttttttttacgaaggcgatgttgttgcggtttaggtagagtagttcgagttcggttaggttagcgaattaggcgcgcgttacgcggtttagcgcgttgttatttaggttgagcgtgcgtaggcgtcgtaggtcgcggaaggcgtcggtcgggagttcggttagtaggttgtcgttgagtagtagatgttttaggacgttatagttttcgaaggcgttagcgtgtacggtacggacgcggttggtttgtaggttgagcgagcgtaggcggcgtaggttttgtagcgagttggaggttatcgtttcgatgcggtcgcgttttaggtgcgcgtgcgttaggttggttaggtcgcgtagcgcgttcggtacgcggcggaataggttgtcgaaggcggcgagttcgcgtagggtcggtagttcggttaggaggcgttcgggtacgttgaagaggcggtaggttgttaggtttaggcggcgtaggcggttgagcgtcgcgaaggtgcgcgcgtgtaggtagcgtaggtcgtcgttgtgcgttaggcgtagtttagttaggcgcggtaggtttttgaaggcgtcgggcgtgatgaaggataggttgttgtggcgtagcgataggcggcgtaaggacggtagcgtgtcgaaggttcgttcgtttaggaagcgtaggtcgtttcggtttaggtcgatggagatcgtttcgtacgggagttcggtcggtattcgtaggaggttcgcgcggtcgtagcgtatcgagtagtcgcgttttacggtgttgtaggcgtaggcggcgggataagcgcgggcgtaggtttttacggtttaggcgttggg

SEQ ID NO: 19892 - DNA, 1139 bp, Artificial Sequence
  chemically treated genomic DNA (Homo sapiens) CpG-island No: 19892
cccaacgcctaaaccgtaaaaacctacgcccgcgcttatcccgccgcctacgcctacaacaccgtaaaacgcgactactcgatacgctacgaccgcgcgaacctcctacgaataccgaccgaactcccgtacgaaacgatctccatcgacctaaaccgaaacgacctacgcttcctaaacgaacgaaccttcgacacgctaccgtccttacgccgcctatcgctacgccacaacaacctatccttcatcacgcccgacgccttcaaaaacctaccgcgcctaactaaactacgcctaacgcacaacgacgacctacgctacctacacgcgcgcaccttcgcgacgctcaaccgcctacgccgcctaaacctaacaacctaccgcctcttcaacgtacccgaacgcctcctaaccgaactaccgaccctacgcgaactcgccgccttcgacaacctattccgccgcgtaccgaacgcgctacgcgacctaaccaacctaacgcacgcgcacctaaaacgcgaccgcatcgaaacgataacctccaactcgctacaaaacctacgccgcctacgctcgctcaacctacaaaccaaccgcgtccgtaccgtacacgctaacgccttcgaaaactataacgtcctaaaacatctactactcaacgacaacctactaaccgaactcccgaccgacgccttccgcgacctacgacgcctacgcacgctcaacctaaataacaacgcgctaaaccgcgtaacgcgcgcctaattcgctaacctaaccgaactcgaactactctacctaaaccgcaacaacatcgccttcgtaaaaaaaaacgccttccaaaacctctcgaatctcctcgcgctacacctcaacgacaaccgcctcaccgtactcgcctaaatcgccttccaacccgacttcttcctaaaccgcctcttcctcttccgcaacccgtaatactacgactaccgtctaaaataactaaaaaactaaataaaaaactccgaacgtatcaccgacgtaccgtacgcctccccgaactccgtaaccgacctaaacctcaaccaaataaccttcgaacgctcctccgataacctctatataaaccccgaaaaactaaacctcaccacgtccaa

SEQ ID NO: 19893 - DNA, 1474 bp, Artificial Sequence
  chemically treated genomic DNA (Homo sapiens) CpG-island No: 19893
acgcgggtcgcgtagttcgggatttcggaaagatttgggcgttcgatttttagcggtttcgatcgggagcgacgtggcgcggttttcgtagagaagttattcggtttagcgtagtttgttcggggtcgtttcgtcgcgttggggtataaagtgggaatcgttttttaaaggtggtcgtagttggaggaataaatacgcgcgttttcgttcgacggtagaagtcgggcgtatttatttagggtcggtttgttcggggttcgggttttttcgtttcggagatttttggaggtttcggaaagtattttttgagtcggcgacgttttagtttcgttgcgtcgaggaaagggtaagtttcgatgttttcgttcgtgggtttttttttcgaggggataattcgaagatttagagtcgttgcggtttttagattcgattttcgcgtagcgttaaattttagggatagtcgcggattcgggtttcgggtaggtttttagcgttaggagggaggtcgagttgggtttcgagatttttcgtaagagttttcggtgtgtgttttcgtttttcgtttttaggtttttagtcgcgtatttcgggttttcgggttttcgggattcggagatttcgagatttcgggtttcgcgtatgcgtcgtttagtttttgtttttttttcgttcgtcgtttttcgggtttcgggatttgggaagttcggatcgcggattttcgcgcgcgttttcgttcgttcgttcgttcgttttcgggtatttgggtcgcggttcgtcgtttgtcggttcgtggggcgaacgtcgaaggaggcggcgtcgggtagggcgttagcggtcgttttcgttttcgtcgttcgttgttttcgtcgcggggtcgtcgcgtttacggtttatgttcggcgtcgttttcgcgcgttcgtgttagtcgcgttttcgcgatacgtatcgtttttcggttcgttttttgtttcggttcgcgcgagttagtgtttcgaggttcgattcggaagtttcgttcgtttcgcgcgtttttcgggtttcgggtttcggtttcgggatatatttttcggagggcggcgttcgattggttgttcgcggtgggcggggtttcgggagcgtttagcggtttttatttagcgtttcgcggtcgttgtagttaagggaaattgaggtcggagaggtggagggatcgtttaaggttatcgatgggatatcgttgagcgttagcgtttttttagttcggcgtatcggggcggggttgaattcgaggcggggacgcgcggtcgcggggcgggtggaggttttcgtcgggcgttcgtgttacgttggcgagttttttttgttttttcgatgagttcggttttgttattttgtgcgatgagtcggtttagattcgggattcgggatcgggtgtttttgaggtttagaagtgcgtagggtgggaggcggttcgggagggattttgtttttggaa

SEQ ID NO: 19894 - DNA, 1474 bp, Artificial Sequence
  chemically treated genomic DNA (Homo sapiens) CpG-island No: 19894
ttccaaaaacaaaatccctcccgaaccgcctcccaccctacgcacttctaaacctcaaaaacacccgatcccgaatcccgaatctaaaccgactcatcgcacaaaataacaaaaccgaactcatcgaaaaaacaaaaaaaactcgccaacgtaacacgaacgcccgacgaaaacctccacccgccccgcgaccgcgcgtccccgcctcgaattcaaccccgccccgatacgccgaactaaaaaaacgctaacgctcaacgatatcccatcgataaccttaaacgatccctccacctctccgacctcaatttcccttaactacaacgaccgcgaaacgctaaataaaaaccgctaaacgctcccgaaaccccgcccaccgcgaacaaccaatcgaacgccgccctccgaaaaatatatcccgaaaccgaaacccgaaacccgaaaaacgcgcgaaacgaacgaaacttccgaatcgaacctcgaaacactaactcgcgcgaaccgaaacaaaaaacgaaccgaaaaacgatacgtatcgcgaaaacgcgactaacacgaacgcgcgaaaacgacgccgaacataaaccgtaaacgcgacgaccccgcgacgaaaacaacgaacgacgaaaacgaaaacgaccgctaacgccctacccgacgccgcctccttcgacgttcgccccacgaaccgacaaacgacgaaccgcgacccaaatacccgaaaacgaacgaacgaacgaacgaaaacgcgcgcgaaaatccgcgatccgaacttcccaaatcccgaaacccgaaaaacgacgaacgaaaaaaaaacaaaaactaaacgacgcatacgcgaaacccgaaatctcgaaatctccgaatcccgaaaacccgaaaacccgaaatacgcgactaaaaacctaaaaacgaaaaacgaaaacacacaccgaaaactcttacgaaaaatctcgaaacccaactcgacctccctcctaacgctaaaaacctacccgaaacccgaatccgcgactatccctaaaatttaacgctacgcgaaaatcgaatctaaaaaccgcaacgactctaaatcttcgaattatcccctcgaaaaaaaaacccacgaacgaaaacatcgaaacttaccctttcctcgacgcaacgaaactaaaacgtcgccgactcaaaaaatactttccgaaacctccaaaaatctccgaaacgaaaaaacccgaaccccgaacaaaccgaccctaaataaatacgcccgacttctaccgtcgaacgaaaacgcgcgtatttattcctccaactacgaccacctttaaaaaacgattcccactttataccccaacgcgacgaaacgaccccgaacaaactacgctaaaccgaataacttctctacgaaaaccgcgccacgtcgctcccgatcgaaaccgctaaaaatcgaacgcccaaatctttccgaaatcccgaactacgcgacccgcgt

SEQ ID NO: 19895 - DNA, 1474 bp, Artificial Sequence
  chemically treated genomic DNA (Homo sapiens) CpG-island No: 19895
ttttagggataaggtttttttcgggtcgttttttattttacgtatttttgagttttaagggtattcggtttcgggtttcgggtttagatcggtttatcgtatagagtagtagagtcgggtttatcgaggaggtaggaggggttcgttagcgtggtacgggcgttcggcgggaatttttattcgtttcgcggtcgcgcgttttcgtttcgaatttagtttcgtttcggtgcgtcgggttggaggggcgttgacgtttagcggtgttttatcggtgattttggacggtttttttattttttcggttttagttttttttggttgtagcggtcgcggggcgttaggtgggagtcgttgagcgttttcggggtttcgtttatcgcgagtagttaatcgggcgtcgtttttcggggggtgtgtttcggggtcgaggttcggggttcggagggcgcgcggggcgggcggggttttcgggtcgggtttcgggatattggttcgcgcggatcggggtagggggcgggtcgaggggcggtgcgtgtcgcgggggcgcggttggtacggacgcgcggaggcggcgtcgggtatgggtcgtggacgcggcggtttcgcggcgggggtagcgggcggcgggggcggaggcggtcgttagcgttttgttcggcgtcgtttttttcggcgttcgttttacggatcggtaggcggcggatcgcggtttaggtgttcgggggcgggcgggcgggcgggcgggaacgcgcgcgggggttcgcggttcgggttttttaggtttcgggattcggagggcggcggacgggggaggggtaggggttgggcggcgtatgcgcggggttcggggtttcggggttttcgggtttcggggattcgggggttcggggtgcgcggttggggatttgagggcgaggagcgaggatatatatcgaggatttttgcgagggatttcggggtttagttcggttttttttttagcgttgggggtttgttcggaattcgagttcgcggttgtttttggggtttggcgttgcgcggaggtcgggtttggggatcgtagcgattttgggttttcgggttgttttttcggagggagggtttacgggcggggatatcgggatttgtttttttttcggcgtagcggagttggggcgtcgtcgatttagaaggtgtttttcgagatttttagggattttcgaggcgaggaaattcgggtttcggatagatcgattttgggtgggtgcgttcggtttttgtcgtcggacggagacgcgcgtgtttgtttttttagttgcgattatttttgaggaacggtttttattttgtgttttaacgcggcggggcgatttcggataggttgcgttgggtcgggtggtttttttgcggaagtcgcgttacgtcgttttcggtcggggtcgttgagggtcgggcgtttaggttttttcggagtttcgggttgcgcggttcgcgt

SEQ ID NO: 19896 - DNA, 1474 bp, Artificial Sequence
  chemically treated genomic DNA (Homo sapiens) CpG-island No: 19896
acgcgaaccgcgcaacccgaaactccgaaaaaacctaaacgcccgaccctcaacgaccccgaccgaaaacgacgtaacgcgacttccgcaaaaaaaccacccgacccaacgcaacctatccgaaatcgccccgccgcgttaaaacacaaaataaaaaccgttcctcaaaaataatcgcaactaaaaaaacaaacacgcgcgtctccgtccgacgacaaaaaccgaacgcacccacccaaaatcgatctatccgaaacccgaatttcctcgcctcgaaaatccctaaaaatctcgaaaaacaccttctaaatcgacgacgccccaactccgctacgccgaaaaaaaaacaaatcccgatatccccgcccgtaaaccctccctccgaaaaaacaacccgaaaacccaaaatcgctacgatccccaaacccgacctccgcgcaacgccaaaccccaaaaacaaccgcgaactcgaattccgaacaaacccccaacgctaaaaaaaaaaccgaactaaaccccgaaatccctcgcaaaaatcctcgatatatatcctcgctcctcgccctcaaatccccaaccgcgcaccccgaacccccgaatccccgaaacccgaaaaccccgaaaccccgaaccccgcgcatacgccgcccaacccctacccctcccccgtccgccgccctccgaatcccgaaacctaaaaaacccgaaccgcgaacccccgcgcgcgttcccgcccgcccgcccgcccgcccccgaacacctaaaccgcgatccgccgcctaccgatccgtaaaacgaacgccgaaaaaaacgacgccgaacaaaacgctaacgaccgcctccgcccccgccgcccgctacccccgccgcgaaaccgccgcgtccacgacccatacccgacgccgcctccgcgcgtccgtaccaaccgcgcccccgcgacacgcaccgcccctcgacccgccccctaccccgatccgcgcgaaccaatatcccgaaacccgacccgaaaaccccgcccgccccgcgcgccctccgaaccccgaacctcgaccccgaaacacaccccccgaaaaacgacgcccgattaactactcgcgataaacgaaaccccgaaaacgctcaacgactcccacctaacgccccgcgaccgctacaaccaaaaaaaactaaaaccgaaaaaataaaaaaaccgtccaaaatcaccgataaaacaccgctaaacgtcaacgcccctccaacccgacgcaccgaaacgaaactaaattcgaaacgaaaacgcgcgaccgcgaaacgaataaaaattcccgccgaacgcccgtaccacgctaacgaacccctcctacctcctcgataaacccgactctactactctatacgataaaccgatctaaacccgaaacccgaaaccgaatacccttaaaactcaaaaatacgtaaaataaaaaacgacccgaaaaaaaccttatccctaaaa

SEQ ID NO: 19897 - DNA, 1016 bp, Artificial Sequence
  chemically treated genomic DNA (Homo sapiens) CpG-island No: 19897
tttttcgggattatacgaacgaacgagtcgattttttttgtggggcgggtaggacggaggttatgtcggggcgcgtttttagtgttcgtcggtttcggtttttcgttagggaggcggttttttcgtcgcgatcgttgtgacgttcgttgtttacgtaagttttgcggattcgttaggttcggttttagttttcggttttattttgatgcggtttaggatttcgttgttttttagcgtttgtattagtaggtttcgtagtttcgtgtttttttcggttattattgcggtcgtcgtcgtcgttattttgtttttttaagataatcgtcgaagtcgcgttaacggttaacggtcgtagtagggtacgtttcgcgcgcgggttacgcggtcgacgtagttaaagtttcgtttcgacgcgtagcgcgttggttttgttttttggcgtcgggaggcggggtatagagatttcggggttgacgttggatatcgagttttggggagcgtcggattattgagcgtcgaaatttagggtcggcgttgggggcggggttgcggggcgcgggtgggtacgtaaggggcggggcgtcggcggggtttttagtcggtaattcgttggttgtcgtcgtttgaggcgcgagttttgaagtcggcgagcggtgaggaggaggcgttttcgcgtgtggagagcggatttcgtttggattttatcgtttacggtcgtattttatcgtcgtataagatcgtcggagttatattatcgacgtagttaaagtttattagtttaaagtcgggcggattgcggtaaggaggtttcgagatcgaatttgtagtttttgtagtttcgggggggcgtcggggaagggattttcgagaggtcgcgaggggcggaaggttttgtaggttgttattcggaaataacgttttgaggttttttagttaggcgaacgtattttgttcggttacggttttcgaggttaatcggaaaggtgttaggtcgaggtgtaggggcgggatggttt

SEQ ID NO: 19898 - DNA, 1016 bp, Artificial Sequence
  chemically treated genomic DNA (Homo sapiens) CpG-island No: 19898
aaaccatcccgcccctacacctcgacctaacacctttccgattaacctcgaaaaccgtaaccgaacaaaatacgttcgcctaactaaaaaacctcaaaacgttatttccgaataacaacctacaaaaccttccgcccctcgcgacctctcgaaaatcccttccccgacgcccccccgaaactacaaaaactacaaattcgatctcgaaacctccttaccgcaatccgcccgactttaaactaataaactttaactacgtcgataatataactccgacgatcttatacgacgataaaatacgaccgtaaacgataaaatccaaacgaaatccgctctccacacgcgaaaacgcctcctcctcaccgctcgccgacttcaaaactcgcgcctcaaacgacgacaaccaacgaattaccgactaaaaaccccgccgacgccccgccccttacgtacccacccgcgccccgcaaccccgcccccaacgccgaccctaaatttcgacgctcaataatccgacgctccccaaaactcgatatccaacgtcaaccccgaaatctctataccccgcctcccgacgccaaaaaacaaaaccaacgcgctacgcgtcgaaacgaaactttaactacgtcgaccgcgtaacccgcgcgcgaaacgtaccctactacgaccgttaaccgttaacgcgacttcgacgattatcttaaaaaaacaaaataacgacgacgacgaccgcaataataaccgaaaaaaacacgaaactacgaaacctactaatacaaacgctaaaaaacaacgaaatcctaaaccgcatcaaaataaaaccgaaaactaaaaccgaacctaacgaatccgcaaaacttacgtaaacaacgaacgtcacaacgatcgcgacgaaaaaaccgcctccctaacgaaaaaccgaaaccgacgaacactaaaaacgcgccccgacataacctccgtcctacccgccccacaaaaaaaatcgactcgttcgttcgtataatcccgaaaaa

SEQ ID NO: 19899 - DNA, 1016 bp, Artificial Sequence
  chemically treated genomic DNA (Homo sapiens) CpG-island No: 19899
gggttatttcgtttttgtatttcggtttggtattttttcggttagtttcggaggtcgtggtcgagtagggtgcgttcgtttggttggggggttttagaacgttattttcgggtgataatttgtagggtttttcgtttttcgcgatttttcgggagtttttttttcggcgttttttcggggttgtaggggttgtaggttcggtttcggggtttttttatcgtagttcgttcggttttaggttagtgggttttaattacgtcgataatatgatttcggcgattttgtgcggcgatgggatgcggtcgtgggcggtggagtttaggcggagttcgttttttatacgcgagggcgttttttttttatcgttcgtcggttttaaagttcgcgttttaggcgacggtagttaacgggttgtcggttggaggtttcgtcgacgtttcgttttttgcgtgtttattcgcgtttcgtagtttcgtttttagcgtcgattttaagtttcggcgtttagtggttcggcgttttttaaggttcggtgtttagcgttaatttcgaggtttttatgtttcgtttttcgacgttagggggtagggttagcgcgttgcgcgtcggggcggggttttggttgcgtcggtcgcgtagttcgcgcgcggagcgtattttgttgcggtcgttggtcgttagcgcggtttcggcggttgttttggagaagtaagatggcggcgacggcggtcgtagtggtggtcgaggaggatacggagttgcgggatttgttggtgtagacgttggagaatagcggggttttgaatcgtattaaggtgaggtcggaggttggggtcgggtttggcggattcgtagggtttgcgtggatagcgggcgttataacggtcgcggcgaggaggtcgtttttttggcgagggatcggggtcggcgggtattgggggcgcgtttcggtatggttttcgttttgttcgttttatagagggggtcggttcgttcgttcgtgtggtttcggaggg

SEQ ID NO: 19900 - DNA, 1016 bp, Artificial Sequence
  chemically treated genomic DNA (Homo sapiens) CpG-island No: 19900
ccctccgaaaccacacgaacgaacgaaccgaccccctctataaaacgaacaaaacgaaaaccataccgaaacgcgcccccaatacccgccgaccccgatccctcgccaaaaaaacgacctcctcgccgcgaccgttataacgcccgctatccacgcaaaccctacgaatccgccaaacccgaccccaacctccgacctcaccttaatacgattcaaaaccccgctattctccaacgtctacaccaacaaatcccgcaactccgtatcctcctcgaccaccactacgaccgccgtcgccgccatcttacttctccaaaacaaccgccgaaaccgcgctaacgaccaacgaccgcaacaaaatacgctccgcgcgcgaactacgcgaccgacgcaaccaaaaccccgccccgacgcgcaacgcgctaaccctaccccctaacgtcgaaaaacgaaacataaaaacctcgaaattaacgctaaacaccgaaccttaaaaaacgccgaaccactaaacgccgaaacttaaaatcgacgctaaaaacgaaactacgaaacgcgaataaacacgcaaaaaacgaaacgtcgacgaaacctccaaccgacaacccgttaactaccgtcgcctaaaacgcgaactttaaaaccgacgaacgataaaaaaaaaacgccctcgcgtataaaaaacgaactccgcctaaactccaccgcccacgaccgcatcccatcgccgcacaaaatcgccgaaatcatattatcgacgtaattaaaacccactaacctaaaaccgaacgaactacgataaaaaaaccccgaaaccgaacctacaacccctacaaccccgaaaaaacgccgaaaaaaaaactcccgaaaaatcgcgaaaaacgaaaaaccctacaaattatcacccgaaaataacgttctaaaaccccccaaccaaacgaacgcaccctactcgaccacgacctccgaaactaaccgaaaaaataccaaaccgaaatacaaaaacgaaataaccc

SEQ ID NO: 19901 - DNA, 645 bp, Artificial Sequence
  chemically treated genomic DNA (Homo sapiens) CpG-island No: 19901
tcgtttcggttttttggtgtgatgtggtgttggtgcgtgttgttgcgaaggttttgtgtgaaagtcgtttgggttttcgggtgtgatgtggtattggtgtcgtgttgttgcgaaggttttgtgtgaaagtcgtttgggttttcgggtgtgatgtggtgttggcgtcgtgttgttgcgaaggttttgtgtgaaagtcgtttgggttttcgggtgtgatgtggtgttggcgtcgtgttgttgcgaaggttttgtgtgaaagtcgtttcggttttcgggtgtgatgtggtgttggtgtcgtgttgttgcgaaggttttgtgtgaaagtcgtcggggttttcgggtgtgatgtggtgttggtgtcgtgttgttgcgaaggttttgtgtgaaggtcgtttgggttttcgggtgtgatgtggtgttggtgtcgtgttgttgcgaaggttttgtgtgaaggtcgtttgggttttcgggtgtgatgtggtgttggtgtcgtgttgttgcgaaggttttgtgtgaaagtcgtttgggttttcgggtgtgatgtggtgttggcgtcgtgttgttgtaaaggtttgtttttaggtgtacgaggaggtatttttaaatgtaggaatgtgatgtttgggatttgcgttatggtaaaat

SEQ ID NO: 19902 - DNA, 645 bp, Artificial Sequence
  chemically treated genomic DNA (Homo sapiens) CpG-island No: 19902
attttaccataacgcaaatcccaaacatcacattcctacatttaaaaatacctcctcgtacacctaaaaacaaacctttacaacaacacgacgccaacaccacatcacacccgaaaacccaaacgactttcacacaaaaccttcgcaacaacacgacaccaacaccacatcacacccgaaaacccaaacgaccttcacacaaaaccttcgcaacaacacgacaccaacaccacatcacacccgaaaacccaaacgaccttcacacaaaaccttcgcaacaacacgacaccaacaccacatcacacccgaaaaccccgacgactttcacacaaaaccttcgcaacaacacgacaccaacaccacatcacacccgaaaaccgaaacgactttcacacaaaaccttcgcaacaacacgacgccaacaccacatcacacccgaaaacccaaacgactttcacacaaaaccttcgcaacaacacgacgccaacaccacatcacacccgaaaacccaaacgactttcacacaaaaccttcgcaacaacacgacaccaataccacatcacacccgaaaacccaaacgactttcacacaaaaccttcgcaacaacacgcaccaacaccacatcacaccaaaaaaccgaaacga

SEQ ID NO: 19903 - DNA, 645 bp, Artificial Sequence
  chemically treated genomic DNA (Homo sapiens) CpG-island No: 19903
gttttgttatgacgtagattttaggtattatatttttgtatttggaaatgttttttcgtatatttgaagataggtttttgtaataatacgacgttaatattatattatattcgaaaatttaggcgatttttatatagggttttcgtaataatacgatattaatattatattatattcgaaaatttaggcgatttttatatagggttttcgtaataatacgatattaatattatattatattcgaaaatttaggcgatttttatatagggttttcgtaataatacgatattaatattatattatattcgaaaatttcggcgatttttatatagggttttcgtaataatacgatattaatattatattatattcgaaaatcgaggcgatttttatatagggttttcgtaataatacgacgttaatattatattatattcgaaaatttaggcgatttttatatagggttttcgtaataatacgacgttaatattatattatattcgaaaatttaggcgatttttatatagggttttcgtaataatacgatattaatattatattatattcgaaaatttaggcgatttttatatagggttttcgtaataatacgtattaatattatattatattagaaaatcgaggcga

SEQ ID NO: 19904 - DNA, 645 bp, Artificial Sequence
  chemically treated genomic DNA (Homo sapiens) CpG-island No: 19904
tcgcctcgattttctaatataatataatattaatacgtattattacgaaaaccctatataaaaatcgcctaaattttcgaatataatataatattaatatcgtattattacgaaaaccctatataaaaatcgcctaaattttcgaatataatataatattaacgtcgtattattacgaaaaccctatataaaaatcgcctaaattttcgaatataatataatattaacgtcgtattattacgaaaaccctatataaaaatcgcctcgattttcgaatataatataatattaatatcgtattattacgaaaaccctatataaaaatcgccgaaattttcgaatataatataatattaatatcgtattattacgaaaaccctatataaaaatcgcctaaattttcgaatataatataatattaatatcgtattattacgaaaaccctatataaaaatcgcctaaattttcgaatataatataatattaatatcgtattattacgaaaaccctatataaaaatcgcctaaattttcgaatataatataatattaacgtcgtattattacaaaaacctatcttcaaatatacgaaaaaacatttccaaatacaaaaatataatacctaaaatctacgtcataacaaaac

SEQ ID NO: 19905 - DNA, 1067 bp, Artificial Sequence
  chemically treated genomic DNA (Homo sapiens) CpG-island No: 19905
taattgggcgtttcgtttcgcgcggttatttgtatttcgtcgttatcgtcggtcgtcgtttttttagtgcgcggtcgtttgtttaggtcgggatcggtttcgttttttttcgtttcgggtatcggtagttttagtttcgattttcgttttatgtttcgggcggcggcgtcgggttcgagttgaggcggttgatgcggttgggcgtttttcgttattcgttcgcgtttttttcgttttcgggagtcgggcgattcgcgataggttatttttttttgggtttcggtttcgattgtcgcgataggcgggcgcgcgtttgttttcgttttcgcgtgcgtgcgtgcgtgcgcgcgagcggatttcgcgttttttcgcgtttcgcggtcgtcgttttttgtttgatcgtttgtttttcgttcgttcgttcgtcgggttgtcggcgcggggttattggcgggtcgtgatgagtattcgttcgcgttttcgtacgtatacgcgaaattcggttcggttcgtcgcgtcgtttcgtttttcgtattttcggagttcgtttatcggtcgcgttggtttatatttttttttatagtacgtcggtcgagggaggaagggggcggttcgggttttcgaggcgtggggagggttgtttattttggggggaggaggggcgcgaggtaggaacgagttgattggtcgggatttttcgattcgttattgtggtagtatcgggaaggcggggagagagaaagagggagggagggagggatcgggatgtagaattttagttcgcgcgggaggttacggcgaggggggcggtggcggttcgcggggggggcggggttaggttttttcggtaattttcgtagttttttcgttggttgttcgagggaggtcgggaagcgatcggggaagttcgggaattttcggtacgggtttgggattgttttggaggtatagcgcggttggagtgcggggtagcgcggggggggcggggtttgttttttttttgggcggggtcgtattttggagtaggcggggtttgagagattcgaaggttagggagtggtttttgt

SEQ ID NO: 19906 - DNA, 1067 bp, Artificial Sequence
  chemically treated genomic DNA (Homo sapiens) CpG-island No: 19906
acaaaaaccactccctaaccttcgaatctctcaaaccccgcctactccaaaatacgaccccgcccaaaaaaaaaacaaaccccgccccccccgcgctaccccgcactccaaccgcgctatacctccaaaacaatcccaaacccgtaccgaaaattcccgaacttccccgatcgcttcccgacctccctcgaacaaccaacgaaaaaactacgaaaattaccgaaaaaacctaaccccgccccccccgcgaaccgccaccgcccccctcgccgtaacctcccgcgcgaactaaaattctacatcccgatccctccctccctccctctttctctctccccgccttcccgatactaccacaataacgaatcgaaaaatcccgaccaatcaactcgttcctacctcgcgcccctcctccccccaaaataaacaaccctccccacgcctcgaaaacccgaaccgcccccttcctccctcgaccgacgtactataaaaaaaaatataaaccaacgcgaccgataaacgaactccgaaaatacgaaaaacgaaacgacgcgacgaaccgaaccgaatttcgcgtatacgtacgaaaacgcgaacgaatactcatcacgacccgccaataaccccgcgccgacaacccgacgaacgaacgaacgaaaaacaaacgatcaaacaaaaaacgacgaccgcgaaacgcgaaaaaacgcgaaatccgctcgcgcgcacgcacgcacgcacgcgaaaacgaaaacaaacgcgcgcccgcctatcgcgacaatcgaaaccgaaacccaaaaaaaaataacctatcgcgaatcgcccgactcccgaaaacgaaaaaaacgcgaacgaataacgaaaaacgcccaaccgcatcaaccgcctcaactcgaacccgacgccgccgcccgaaacataaaacgaaaatcgaaactaaaactaccgatacccgaaacgaaaaaaaacgaaaccgatcccgacctaaacaaacgaccgcgcactaaaaaaacgacgaccgacgataacgacgaaatacaaataaccgcgcgaaacgaaacgcccaatta

SEQ ID NO: 19907 - DNA, 1067 bp, Artificial Sequence
  chemically treated genomic DNA (Homo sapiens) CpG-island No: 19907
gtaggagttattttttggttttcgggttttttaagtttcgtttgttttaggatacggtttcgtttagaaaggagatagatttcgtttttttcgcgttgtttcgtattttagtcgcgttgtgtttttaggataattttaggttcgtgtcggagattttcgagttttttcgatcgtttttcggtttttttcgggtagttagcgaggagattacggagattgtcgagggggtttggtttcgtttttttcgcgggtcgttatcgtttttttcgtcgtagtttttcgcgcgggttggagttttatatttcggttttttttttttttttttttttttttttttcgttttttcggtgttgttatagtggcgggtcggaggatttcggttagttagttcgtttttgtttcgcgttttttttttttttaaaataaatagttttttttacgtttcgggagttcggatcgttttttttttttttcggtcggcgtgttgtgagggagagtgtgagttagcgcggtcggtgggcgagtttcgggagtgcgagaggcggggcggcgcggcgggtcgggtcgggtttcgcgtgtgcgtgcgggggcgcgagcgagtgtttattacgattcgttagtggtttcgcgtcgataattcggcgggcgggcgggcggggagtaagcggttaggtaaggagcggcggtcgcgaggcgcggaggggcgcggagttcgttcgcgcgtacgtacgtacgtacgcgggggcgggggtaggcgcgcgttcgtttgtcgcgatagtcggggtcgaggtttagggggaggtggtttgtcgcgggtcgttcggttttcggaggcgaggggggcgcgggcggatggcggagggcgtttagtcgtattagtcgttttagttcgggttcggcgtcgtcgttcggggtatgaagcgggagtcggagttggagttgtcggtgttcggagcgggaggagacggagtcgatttcggtttgagtaagcggtcgcgtattgaggaggcggcggtcgacggtggcggcgggatgtaggtgatcgcgcgggacggggcgtttagtta

SEQ ID NO: 19908 - DNA, 1067 bp, Artificial Sequence
  chemically treated genomic DNA (Homo sapiens) CpG-island No: 19908
taactaaacgccccgtcccgcgcgatcacctacatcccgccgccaccgtcgaccgccgcctcctcaatacgcgaccgcttactcaaaccgaaatcgactccgtctcctcccgctccgaacaccgacaactccaactccgactcccgcttcataccccgaacgacgacgccgaacccgaactaaaacgactaatacgactaaacgccctccgccatccgcccgcgcccccctcgcctccgaaaaccgaacgacccgcgacaaaccacctccccctaaacctcgaccccgactatcgcgacaaacgaacgcgcgcctacccccgcccccgcgtacgtacgtacgtacgcgcgaacgaactccgcgcccctccgcgcctcgcgaccgccgctccttacctaaccgcttactccccgcccgcccgcccgccgaattatcgacgcgaaaccactaacgaatcgtaataaacactcgctcgcgcccccgcacgcacacgcgaaacccgacccgacccgccgcgccgccccgcctctcgcactcccgaaactcgcccaccgaccgcgctaactcacactctccctcacaacacgccgaccgaaaaaaaaaaaaaacgatccgaactcccgaaacgtaaaaaaaactatttattttaaaaaaaaaaaaaacgcgaaacaaaaacgaactaactaaccgaaatcctccgacccgccactataacaacaccgaaaaaacgaaaaaaaaaaaaaaaaaaaaaaaaaaaaaaccgaaatataaaactccaacccgcgcgaaaaactacgacgaaaaaaacgataacgacccgcgaaaaaaacgaaaccaaaccccctcgacaatctccgtaatctcctcgctaactacccgaaaaaaaccgaaaaacgatcgaaaaaactcgaaaatctccgacacgaacctaaaattatcctaaaaacacaacgcgactaaaatacgaaacaacgcgaaaaaaacgaaatctatctcctttctaaacgaaaccgtatcctaaaacaaacgaaacttaaaaaacccgaaaaccaaaaaataactcctac

SEQ ID NO: 19909 - DNA, 1226 bp, Artificial Sequence
  chemically treated genomic DNA (Homo sapiens) CpG-island No: 19909
tttcgtagtaaaaggcgttattgaaacgtacgtaaaaatgtagcgagaacgttgttcggtgtttaatatggtagaaagttcgagttggtgcggttatttcggggttgggtattggggggtatcggggttttcggggcgtcgacgtatatttattcggtttcgggggggatgcggggttggtcgcgcgttataaagaggagttcggcgtaatttggtaaaatttaattttttattaggttcgttagggtcgttagatacgttaatagaatttatttttcgaagggtttggaaggcgtcgggtttttcgggtcggggtagaacggtagattcggagattgttcggtgcggtgtttgggcgcggagttcgtcgtgtatcgttttttgcgttcgatgttagtgcgggcggcggttcgaaatttatttcggggttttcgtttcgtcggtcggcgtcgttttttcggtagttttcggtttcgtcggttagtgcgcggcgtcgggaacgggagcggggtttcggcgcgttatacgggcggcggtttcggttcgcgttttcgttttcgttcggtttttttagtcggtttcggttttcgggcgtcgttttgttttcgggagtaggttttttttcgggcgtcgggtttcgttaggcgcgtttagttcggcgcgttttttgcgtttcggtggtagtttcgcgcggggagggcgggggtgatttcggttcgtacgggggcgtcgcggttattatttcgtaatcgcggtcgtcgtttttaggaagtcgcggggtggtcgagtgtgttggaatttttcggtttggtttcgtcgtcggtcgtttgaagggggtgcgtcgcggtgggagtcgtcgtcgtcgttgttatcgagtcgttgtcgtcgtcgtcgttgttggttgtgcgtgagcgtgtgtgcgtttgtgttttggcgagtgtgtgtttgcgtgcggcgttcggtttttattatatatattaaggggtgggaggaggcggggaaggggagggtttgggggaggcggcggaggagggggagtaggaggggggcgaaagggtattcgaggaggcggcggcggaggagggataggtgatttcgtttacggggagggcgtggtcgtgggcggcgcggggtgttaggaagaaggggtgtcggggcggggaggaggattttggggggagcgtcgggggagggtcggaggagttgggattttattgtttttcggt

SEQ ID NO: 19910 - DNA, 1226 bp, Artificial Sequence
  chemically treated genomic DNA (Homo sapiens) CpG-island No: 19910
accgaaaaacaataaaatcccaactcctccgaccctcccccgacgctccccccaaaatcctcctccccgccccgacaccccttcttcctaacaccccgcgccgcccacgaccacgccctccccgtaaacgaaatcacctatccctcctccgccgccgcctcctcgaataccctttcgcccccctcctactccccctcctccgccgcctcccccaaaccctccccttccccgcctcctcccaccccttaatatatataataaaaaccgaacgccgcacgcaaacacacactcgccaaaacacaaacgcacacacgctcacgcacaaccaacaacgacgacgacgacaacgactcgataacaacgacgacgacgactcccaccgcgacgcacccccttcaaacgaccgacgacgaaaccaaaccgaaaaattccaacacactcgaccaccccgcgacttcctaaaaacgacgaccgcgattacgaaataataaccgcgacgcccccgtacgaaccgaaatcacccccgccctccccgcgcgaaactaccaccgaaacgcaaaaaacgcgccgaactaaacgcgcctaacgaaacccgacgcccgaaaaaaaacctactcccgaaaacaaaacgacgcccgaaaaccgaaaccgactaaaaaaaccgaacgaaaacgaaaacgcgaaccgaaaccgccgcccgtataacgcgccgaaaccccgctcccgttcccgacgccgcgcactaaccgacgaaaccgaaaactaccgaaaaaacgacgccgaccgacgaaacgaaaaccccgaaataaatttcgaaccgccgcccgcactaacatcgaacgcaaaaaacgatacacgacgaactccgcgcccaaacaccgcaccgaacaatctccgaatctaccgttctaccccgacccgaaaaacccgacgccttccaaacccttcgaaaaataaattctattaacgtatctaacgaccctaacgaacctaataaaaaattaaattttaccaaattacgccgaactcctctttataacgcgcgaccaaccccgcatcccccccgaaaccgaataaatatacgtcgacgccccgaaaaccccgataccccccaatacccaaccccgaaataaccgcaccaactcgaactttctaccatattaaacaccgaacaacgttctcgctacatttttacgtacgtttcaataacgccttttactacgaaa

SEQ ID NO: 19911 - DNA, 1226 bp, Artificial Sequence
  chemically treated genomic DNA (Homo sapiens) CpG-island No: 19911
gtcgggaggtagtagggttttagttttttcggttttttttcggcgttttttttaaggttttttttttcgtttcgatattttttttttttggtatttcgcgtcgtttacggttacgtttttttcgtgggcgagattatttgtttttttttcgtcgtcgttttttcgggtattttttcgttttttttttgttttttttttttcgtcgttttttttaagtttttttttttttcgtttttttttattttttggtgtatatagtaaaggtcgggcgtcgtacgtagatatatattcgttaggatataggcgtatatacgtttacgtataattagtagcggcggcggcgatagcgattcggtgatagcggcgacggcggtttttatcgcggcgtattttttttaggcggtcggcggcgaggttagatcggagagttttagtatattcgattatttcgcggttttttggaggcggcggtcgcgattgcgaggtagtggtcgcggcgttttcgtgcgggtcggggttattttcgtttttttcgcgcggagttgttatcgggacgtagggggcgcgtcgggttgggcgcgtttggcggggttcggcgttcggggaggggtttgttttcgggggtaggacggcgttcggaggtcggggtcggttgggagggtcgggcgggggcggggacgcgggtcgaggtcgtcgttcgtgtggcgcgtcggggtttcgttttcgttttcggcgtcgcgtattggtcggcggggtcggggattgtcggggaggcggcgtcggtcggcggggcgggggtttcgaagtgggtttcgggtcgtcgttcgtattggtatcgggcgtagagggcggtgtacggcggatttcgcgtttaggtatcgtatcgggtagttttcggatttgtcgttttgtttcggttcggaaaattcggcgttttttaggtttttcgaaagatggattttgttgacgtatttggcggttttggcgagtttggtggaaagttgggttttgttagattgcgtcgggtttttttttgtgacgcgcggttagtttcgtatttttttcggagtcgggtgagtgtgcgtcggcgtttcgggagtttcggtgttttttaatgtttagtttcggggtggtcgtattagttcgggttttttgttatgttaggtatcgagtaacgttttcgttgtatttttgcgtgcgttttagtggcgttttttgttgcggag

SEQ ID NO: 19912 - DNA, 1226 bp, Artificial Sequence
  chemically treated genomic DNA (Homo sapiens) CpG-island No: 19912
ctccgcaacaaaaaacgccactaaaacgcacgcaaaaatacaacgaaaacgttactcgatacctaacataacaaaaaacccgaactaatacgaccaccccgaaactaaacattaaaaaacaccgaaactcccgaaacgccgacgcacactcacccgactccgaaaaaaatacgaaactaaccgcgcgtcacaaaaaaaaacccgacgcaatctaacaaaacccaactttccaccaaactcgccaaaaccgccaaatacgtcaacaaaatccatctttcgaaaaacctaaaaaacgccgaattttccgaaccgaaacaaaacgacaaatccgaaaactacccgatacgatacctaaacgcgaaatccgccgtacaccgccctctacgcccgataccaatacgaacgacgacccgaaacccacttcgaaacccccgccccgccgaccgacgccgcctccccgacaatccccgaccccgccgaccaatacgcgacgccgaaaacgaaaacgaaaccccgacgcgccacacgaacgacgacctcgacccgcgtccccgcccccgcccgaccctcccaaccgaccccgacctccgaacgccgtcctacccccgaaaacaaacccctccccgaacgccgaaccccgccaaacgcgcccaacccgacgcgccccctacgtcccgataacaactccgcgcgaaaaaaacgaaaataaccccgacccgcacgaaaacgccgcgaccactacctcgcaatcgcgaccgccgcctccaaaaaaccgcgaaataatcgaatatactaaaactctccgatctaacctcgccgccgaccgcctaaaaaaaatacgccgcgataaaaaccgccgtcgccgctatcaccgaatcgctatcgccgccgccgctactaattatacgtaaacgtatatacgcctatatcctaacgaatatatatctacgtacgacgcccgacctttactatatacaccaaaaaataaaaaaaaacgaaaaaaaaaaaaacttaaaaaaaacgacgaaaaaaaaaaaacaaaaaaaaaacgaaaaaatacccgaaaaaacgacgacgaaaaaaaaacaaataatctcgcccacgaaaaaaacgtaaccgtaaacgacgcgaaataccaaaaaaaaaaaatatcgaaacgaaaaaaaaaaccttaaaaaaaacgccgaaaaaaaaccgaaaaaactaaaaccctactacctcccgac

SEQ ID NO: 19913 - DNA, 1046 bp, Artificial Sequence
  chemically treated genomic DNA (Homo sapiens) CpG-island No: 19913
aatttgtcgcgggagtatagggttcggaatttttgcgggggcggggaggggatttagtggtcgggtttagtacgggcgagagtggtcggggacggacgggtacgcgtttatcgagttgttcgtgagtttttgtaggatgacgggtttgacgaaggcgtatttggaaagaagggtagagtcgcggttaggtcggatcgttagtttcgtcgttttagttttacgcgtgcgcgcgaggttaggggaaggcggttttgggcggtcggggtagacgggtcggtgaataggacgcgattttcgcgattaggggcgtacgtattgttgtacgaatttcgcgtaggtgaggtcggttcgacgttttatcgtgtagcgtttttttttcgttacggttttcggttcgttcgggcgtttgcgggtatagttgggttagttcgcgtttcgttcgtcgtacgtgattttatcgttcggtttttttcgggtcgtttattattcgtcgtcgtttttcgtttcggagtcgggtagagttatagtcgttagcgtttagagcgcgagtaatcgcgacgtcggcgttatgagtttgtcgtttttaggtagtcgcgttgtacgtcgggaattttgggtttattcgttagttattggtcggtagtttcgtcgtcgtggtaacggtcgggaatcgggacggatttcggaagtgattttttttggttcgtttcggaagaggtttttacgggaggtattgggaaggtcgtttcgagagcgattatgggcgtcgtcggttattatggcgataatttcgtcgaaagttttcgttcgttagttgtttcgcgggtttacggcgagttcgtcgcgttatggggtgatacgtagtgtcgatagcggttttattttttttattgaggttttaagttttagttttcgttcgtttcgggtataagattaggcggggttttgtacgcggtcgttcgggtaagtttagtagatgtttcgttaggagtattcgtagaggtggtcgtagtttgcgggatagtgggagttgttttttagttatt

SEQ ID NO: 19914 - DNA, 1046 bp, Artificial Sequence
  chemically treated genomic DNA (Homo sapiens) CpG-island No: 19914
aataactaaaaaacaactcccactatcccgcaaactacgaccacctctacgaatactcctaacgaaacatctactaaacttacccgaacgaccgcgtacaaaaccccgcctaatcttatacccgaaacgaacgaaaactaaaacttaaaacctcaataaaaaaaataaaaccgctatcgacactacgtatcaccccataacgcgacgaactcgccgtaaacccgcgaaacaactaacgaacgaaaactttcgacgaaattatcgccataataaccgacgacgcccataatcgctctcgaaacgaccttcccaatacctcccgtaaaaacctcttccgaaacgaaccaaaaaaaatcacttccgaaatccgtcccgattcccgaccgttaccacgacgacgaaactaccgaccaataactaacgaataaacccaaaattcccgacgtacaacgcgactacctaaaaacgacaaactcataacgccgacgtcgcgattactcgcgctctaaacgctaacgactataactctacccgactccgaaacgaaaaacgacgacgaataataaacgacccgaaaaaaaccgaacgataaaatcacgtacgacgaacgaaacgcgaactaacccaactatacccgcaaacgcccgaacgaaccgaaaaccgtaacgaaaaaaaaacgctacacgataaaacgtcgaaccgacctcacctacgcgaaattcgtacaacaatacgtacgcccctaatcgcgaaaatcgcgtcctattcaccgacccgtctaccccgaccgcccaaaaccgccttcccctaacctcgcgcgcacgcgtaaaactaaaacgacgaaactaacgatccgacctaaccgcgactctacccttctttccaaatacgccttcgtcaaacccgtcatcctacaaaaactcacgaacaactcgataaacgcgtacccgtccgtccccgaccactctcgcccgtactaaacccgaccactaaatcccctccccgcccccgcaaaaattccgaaccctatactcccgcgacaaatt

SEQ ID NO: 19915 - DNA, 1046 bp, Artificial Sequence
  chemically treated genomic DNA (Homo sapiens) CpG-island No: 19915
agtggttggaaggtagtttttattgtttcgtaggttgcggttatttttgcgagtatttttgacggggtatttgttgggtttgttcgggcggtcgcgtgtagaatttcgtttggttttgtgttcgagacgggcggaggttggaatttgagattttaataaaggaagtagagtcgttgtcggtattgcgtgttattttatagcgcggcgggttcgtcgtaggttcgcggggtagttggcgggcgggggttttcggcggggttgtcgttatggtaatcggcggcgtttatagtcgttttcggggcggtttttttagtgtttttcgtagaggtttttttcggggcgggttaaaggaggttattttcggggttcgtttcggttttcggtcgttgttacgacgacgaagttgtcggttaatggttggcggatgggtttaaggttttcggcgtgtagcgcggttgtttgagggcggtaggtttatggcgtcggcgtcgcggttgttcgcgttttgggcgttggcggttgtggttttattcggtttcggggcggagggcgacggcgggtggtgagcggttcgggaggggtcgggcggtggggttacgtgcggcgggcggggcgcgggttgatttagttgtgttcgtaggcgttcgggcgggtcgggggtcgtggcggaggaggagcgttgtacggtggagcgtcgggtcgattttatttacgcggagttcgtgtagtagtacgtgcgtttttgatcgcggaggtcgcgttttgtttatcggttcgtttgtttcgatcgtttaaggtcgtttttttttgatttcgcgcgtacgcgtggggttggggcggcgaggttggcggttcggtttggtcgcgattttgtttttttttttaggtacgttttcgttaggttcgttattttgtagggatttacggataattcggtgagcgcgtgttcgttcgttttcggttattttcgttcgtgttgggttcggttattaagtttttttttcgttttcgtagaggtttcgggttttgtgttttcgcgataggtt

SEQ ID NO: 19916 - DNA, 1046 bp, Artificial Sequence
  chemically treated genomic DNA (Homo sapiens) CpG-island No: 19916
aacctatcgcgaaaacacaaaacccgaaacctctacgaaaacgaaaaaaaaacttaataaccgaacccaacacgaacgaaaataaccgaaaacgaacgaacacgcgctcaccgaattatccgtaaatccctacaaaataacgaacctaacgaaaacgtacctaaaaaaaaaaacaaaatcgcgaccaaaccgaaccgccaacctcgccgccccaaccccacgcgtacgcgcgaaatcaaaaaaaaacgaccttaaacgatcgaaacaaacgaaccgataaacaaaacgcgacctccgcgatcaaaaacgcacgtactactacacgaactccgcgtaaataaaatcgacccgacgctccaccgtacaacgctcctcctccgccacgacccccgacccgcccgaacgcctacgaacacaactaaatcaacccgcgccccgcccgccgcacgtaaccccaccgcccgacccctcccgaaccgctcaccacccgccgtcgccctccgccccgaaaccgaataaaaccacaaccgccaacgcccaaaacgcgaacaaccgcgacgccgacgccataaacctaccgccctcaaacaaccgcgctacacgccgaaaaccttaaacccatccgccaaccattaaccgacaacttcgtcgtcgtaacaacgaccgaaaaccgaaacgaaccccgaaaataacctcctttaacccgccccgaaaaaaacctctacgaaaaacactaaaaaaaccgccccgaaaacgactataaacgccgccgattaccataacgacaaccccgccgaaaacccccgcccgccaactaccccgcgaacctacgacgaacccgccgcgctataaaataacacgcaataccgacaacgactctacttcctttattaaaatctcaaattccaacctccgcccgtctcgaacacaaaaccaaacgaaattctacacgcgaccgcccgaacaaacccaacaaataccccgtcaaaaatactcgcaaaaataaccgcaacctacgaaacaataaaaactaccttccaaccact

SEQ ID NO: 19917 - DNA, 746 bp, Artificial Sequence
  chemically treated genomic DNA (Homo sapiens) CpG-island No: 19917
tgcggttttgcggtttttattttttaggtttcgagggttttgttcgtcgcgttatagttttagtttcgtcggaagttttcgttttcggtttcgtgtagtttcgtttcgtttcgtttcgtgtagtttcgttcggtttagtttcgttcggcgcggttcgggggcgcgtatttgtcgagtacgagtttttttaggcggtgtaggtcgtaggttacgtattttagcgttatgtcggtgatgcgtgggtattacgagaggttaaggttgcgtagtttgcgtaggttttcggttacgagttttacgtcgtcgtcggtgattttggagtagttcgagaggttgagcgcggtgaggttgggtaggttgtgtattacgttgattacgtcgtggttggtgattttttagtaggagagtaggcgtagcgtgtgcgtgttgtggttttggcgcgtcgtgaagtaggttagcgtcgtgttcgttacgtggtaggtttgtaggtttagtttcgttaggttgggtagtagttgcgagatggtcgcgatggcgtcgtcggttacgttgatgtagttatttacgtttagcgaggtgatgcgcgcgtttaggttggattatagttcggtttcggtgaagtcgttgtagttcgatagttttagacgtattacgttttgtatttgtttaagtataatttgtaggcgggcgggcgtcgggttaggattgtaggagaaggggtggagttcgtagggaggaagtagtat

SEQ ID NO: 19918 - DNA, 746 bp, Artificial Sequence
  chemically treated genomic DNA (Homo sapiens) CpG-island No: 19918
atactacttcctccctacgaactccaccccttctcctacaatcctaacccgacgcccgcccgcctacaaattatacttaaacaaatacaaaacgtaatacgtctaaaactatcgaactacaacgacttcaccgaaaccgaactataatccaacctaaacgcgcgcatcacctcgctaaacgtaaataactacatcaacgtaaccgacgacgccatcgcgaccatctcgcaactactacccaacctaacgaaactaaacctacaaacctaccacgtaacgaacacgacgctaacctacttcacgacgcgccaaaaccacaacacgcacacgctacgcctactctcctactaaaaaatcaccaaccacgacgtaatcaacgtaatacacaacctacccaacctcaccgcgctcaacctctcgaactactccaaaatcaccgacgacgacgtaaaactcgtaaccgaaaacctacgcaaactacgcaaccttaacctctcgtaatacccacgcatcaccgacataacgctaaaatacgtaacctacgacctacaccgcctaaaaaaactcgtactcgacaaatacgcgcccccgaaccgcgccgaacgaaactaaaccgaacgaaactacacgaaacgaaacgaaacgaaactacacgaaaccgaaaacgaaaacttccgacgaaactaaaactataacgcgacgaacaaaaccctcgaaacctaaaaaataaaaaccgcaaaaccgca

SEQ ID NO: 19919 - DNA, 746 bp, Artificial Sequence
  chemically treated genomic DNA (Homo sapiens) CpG-island No: 19919
atattgttttttttttgcgggttttatttttttttttgtaattttgattcggcgttcgttcgtttgtaggttatgtttgaatagatgtagggcgtggtgcgtttggagttgtcgggttgtaacgattttatcgaggtcgggttgtggtttagtttgagcgcgcgtattatttcgttgagcgtgagtgattgtattaacgtggtcgacgacgttatcgcggttatttcgtagttgttgtttaatttggcggagttgagtttgtaggtttattacgtgacggatacggcgttggtttattttacggcgcgttagggttatagtacgtatacgttgcgtttgtttttttgttgggagattattaattacggcgtggttaacgtggtgtatagtttgtttaattttatcgcgtttagtttttcgggttgttttaaggttatcgacgacggcgtggagttcgtggtcgagaatttgcgtaagttgcgtagttttgatttttcgtggtgtttacgtattatcgatatggcgttggagtacgtggtttgcgatttgtatcgtttagaggagttcgtgttcgataggtgcgcgttttcgggtcgcgtcgggcggggttgggtcgggcggggttgtacggggcggggcggggcggggttgtacggggtcgggggcgggggttttcggcggggttggggttgtggcgcggcgggtagagttttcggagtttggggagtgggaatcgtagaatcgta

SEQ ID NO: 19920 - DNA, 746 bp, Artificial Sequence
  chemically treated genomic DNA (Homo sapiens) CpG-island No: 19920
tacgattctacgattcccactccccaaactccgaaaactctacccgccgcgccacaaccccaaccccgccgaaaacccccgcccccgaccccgtacaaccccgccccgccccgccccgtacaaccccgcccgacccaaccccgcccgacgcgacccgaaaacgcgcacctatcgaacacgaactcctctaaacgatacaaatcgcaaaccacgtactccaacgccatatcgataatacgtaaacaccacgaaaaatcaaaactacgcaacttacgcaaattctcgaccacgaactccacgccgtcgtcgataaccttaaaacaacccgaaaaactaaacgcgataaaattaaacaaactatacaccacgttaaccacgccgtaattaataatctcccaacaaaaaaacaaacgcaacgtatacgtactataaccctaacgcgccgtaaaataaaccaacgccgtatccgtcacgtaataaacctacaaactcaactccgccaaattaaacaacaactacgaaataaccgcgataacgtcgtcgaccacgttaatacaatcactcacgctcaacgaaataatacgcgcgctcaaactaaaccacaacccgacctcgataaaatcgttacaacccgacaactccaaacgcaccacgccctacatctattcaaacataacctacaaacgaacgaacgccgaatcaaaattacaaaaaaaaaaataaaacccgcaaaaaaaaaacaatat

SEQ ID NO: 19921 - DNA, 841 bp, Artificial Sequence
  chemically treated genomic DNA (Homo sapiens) CpG-island No: 19921
attaaaatttcggttttattagaggttttaggatttcgatcgggatagcgcggggggcgaggttagggtgagggcgcggcgaaggagagacgtatagcgcggggcgggtaaggagtttttttttcgcgttaaggttttttttaattttcgaggcgtttggatcgtgggatagtttttcggcggcgttcgagtttcggtttcgttttcgtttcgtttcgcgtttgttattggcggaaagtttcgggtcgcgtcgcgattggtcgatacgtcgtaggtttcgtttttttttcgattcgttttaaggcggtttcggcgttggggttgcgcggtaggcggagcggtcgcgggtttgggggtttcgtcggggtcgggcggtcggcgttttcggttgttttcgtcgtcgttcggattcgcgtttcgtcggggtagcggtggtgagagtttcgatttttcggacgtcgttcgtcgtgttatggggttttcggtcgcggcgttgttttgcgcgttgtgttgcggttttttggtttcggttgttcgcgtcggttatttcgaggagcgttgtagttggaggggtaggtacggttcggggggttgttttcgtatttaggacggggtgcgttgcggttaggattttttaggcgtttttcggagcgcgtagagcgttgggtcggtttttttattcgcgaggcggtttcgggagggagcgggggttgcgtcgggcggggattcgttttcgttttagcgtttcgtttcgttttgtttttagcggttttatttaggagttcggtagcgtggggtagttggttttggtttgtgcggagggcgcggttgagtggttgta

SEQ ID NO: 19922 - DNA, 841 bp, Artificial Sequence
  chemically treated genomic DNA (Homo sapiens) CpG-island No: 19922
tacaaccactcaaccgcgccctccgcacaaaccaaaaccaactaccccacgctaccgaactcctaaataaaaccgctaaaaacaaaacgaaacgaaacgctaaaacgaaaacgaatccccgcccgacgcaacccccgctccctcccgaaaccgcctcgcgaataaaaaaaccgacccaacgctctacgcgctccgaaaaacgcctaaaaaatcctaaccgcaacgcaccccgtcctaaatacgaaaacaaccccccgaaccgtacctacccctccaactacaacgctcctcgaaataaccgacgcgaacaaccgaaaccaaaaaaccgcaacacaacgcgcaaaacaacgccgcgaccgaaaaccccataacacgacgaacgacgtccgaaaaatcgaaactctcaccaccgctaccccgacgaaacgcgaatccgaacgacgacgaaaacaaccgaaaacgccgaccgcccgaccccgacgaaacccccaaacccgcgaccgctccgcctaccgcgcaaccccaacgccgaaaccgccttaaaacgaatcgaaaaaaaaacgaaacctacgacgtatcgaccaatcgcgacgcgacccgaaactttccgccaataacaaacgcgaaacgaaacgaaaacgaaaccgaaactcgaacgccgccgaaaaactatcccacgatccaaacgcctcgaaaattaaaaaaaaccttaacgcgaaaaaaaaactccttacccgccccgcgctatacgtctctccttcgccgcgccctcaccctaacctcgccccccgcgctatcccgatcgaaatcctaaaacctctaataaaaccgaaattttaat

SEQ ID NO: 19923 - DNA, 841 bp, Artificial Sequence
  chemically treated genomic DNA (Homo sapiens) CpG-island No: 19923
tatagttatttaatcgcgtttttcgtataggttagggttagttgttttacgttgtcgggtttttgggtgaggtcgttggggataggacgggacggggcgttgagacgggggcgggttttcgttcggcgtagttttcgttttttttcgaggtcgtttcgcggatggggaaatcggtttagcgttttgcgcgtttcgaggggcgtttggggggttttagtcgtagcgtatttcgttttaagtgcggggatagtttttcggatcgtatttgtttttttagttgtagcgtttttcggagtagtcggcgcgggtagtcggggttaggaggtcgtagtatagcgcgtagagtagcgtcgcggtcgggaattttatggtacggcgggcggcgttcggggagtcggggtttttattatcgttgtttcggcggggcgcgggttcgggcggcggcgggagtagtcgggggcgtcggtcgttcggtttcggcgaagtttttaagttcgcggtcgtttcgtttgtcgcgtagttttagcgtcggggtcgttttggagcgggtcgggaagggggcggggtttgcggcgtgtcggttagtcgcggcgcggttcggaatttttcgttaatagtaggcgcggggcggagcgggggcggggtcggagttcgggcgtcgtcggaggattattttacggtttaagcgtttcgagggttggggggggttttggcgcggaagggaggttttttgttcgtttcgcgttgtgcgtttttttttcgtcgcgtttttattttggtttcgtttttcgcgttgtttcgatcggagttttggagtttttgatggagtcgaggttttgat

SEQ ID NO: 19924 - DNA, 841 bp, Artificial Sequence
  chemically treated genomic DNA (Homo sapiens) CpG-island No: 19924
atcaaaacctcgactccatcaaaaactccaaaactccgatcgaaacaacgcgaaaaacgaaaccaaaataaaaacgcgacgaaaaaaaaacgcacaacgcgaaacgaacaaaaaacctcccttccgcgccaaaaccccccccaaccctcgaaacgcttaaaccgtaaaataatcctccgacgacgcccgaactccgaccccgcccccgctccgccccgcgcctactattaacgaaaaattccgaaccgcgccgcgactaaccgacacgccgcaaaccccgcccccttcccgacccgctccaaaacgaccccgacgctaaaactacgcgacaaacgaaacgaccgcgaacttaaaaacttcgccgaaaccgaacgaccgacgcccccgactactcccgccgccgcccgaacccgcgccccgccgaaacaacgataataaaaaccccgactccccgaacgccgcccgccgtaccataaaattcccgaccgcgacgctactctacgcgctatactacgacctcctaaccccgactacccgcgccgactactccgaaaaacgctacaactaaaaaaacaaatacgatccgaaaaactatccccgcacttaaaacgaaatacgctacgactaaaaccccccaaacgcccctcgaaacgcgcaaaacgctaaaccgatttccccatccgcgaaacgacctcgaaaaaaaacgaaaactacgccgaacgaaaacccgcccccgtctcaacgccccgtcccgtcctatccccaacgacctcacccaaaaacccgacaacgtaaaacaactaaccctaacctatacgaaaaacgcgattaaataactata

SEQ ID NO: 19925 - DNA, 780 bp, Artificial Sequence
  chemically treated genomic DNA (Homo sapiens) CpG-island No: 19925
  unsure (314, 675)
ttgtagtttttgttgcgttttgttgcgtttcgcgggggttcgtattcggtcgttatgtttacgattcgagagtcgttttaaaattagtttttttttttatatattttttttttttttttttttagttcgatcgaggtcgcggtattgtaaagcggtttttaattttatttttaattttttcgttgtaaaattcgattcgacggttgcgaagtgtgcgtttgcgcgcggcgcgggtagggcgcgggaatgggggtgggtgtgggaagtttacgggttttcggtcgcggtttgaaaaggtcggagttacggggaancgggggatgggtttgggtttcggtcggaattttttttttttttttagcgggttttcgtttcgggtttggttcggtttttatacgtgcgcgttaaaaatttattttaaagtttgttttcggtacgggggtcgttttttttgcgttattttttgggtaatcgcgcgggcgaataattagtttttaggtttcgtcgttttttttattttaggcgttgcgaaaaggttggaggggtcgagcgagagaggacgttcgttgatgagttttcgggagtcgtaagcggttttcgggtggacgaatgtttttttgtttttaatttttatcgttttagaaaattgaattgaatataaagtttgcggttagncgttacgtagtggttttcggagtttattattgtttgggttcgtattgattttaggttcggattaggtagaggttgatttttgttttatagtttcgtcggtttaat

SEQ ID NO: 19926 - DNA, 780 bp, Artificial Sequence
  chemically treated genomic DNA (Homo sapiens) CpG-island No: 19926
  unsure (106, 467)
attaaaccgacgaaactataaaacaaaaatcaacctctacctaatccgaacctaaaatcaatacgaacccaaacaataataaactccgaaaaccactacgtaacgnctaaccgcaaactttatattcaattcaattttctaaaacgataaaaattaaaaacaaaaaaacattcgtccacccgaaaaccgcttacgactcccgaaaactcatcaacgaacgtcctctctcgctcgacccctccaaccttttcgcaacgcctaaaataaaaaaaacgacgaaacctaaaaactaattattcgcccgcgcgattacccaaaaaataacgcaaaaaaaacgacccccgtaccgaaaacaaactttaaaataaatttttaacgcgcacgtataaaaaccgaaccaaacccgaaacgaaaacccgctaaaaaaaaaaaaaaaattccgaccgaaacccaaacccatcccccgnttccccgtaactccgaccttttcaaaccgcgaccgaaaacccgtaaacttcccacacccacccccattcccgcgccctacccgcgccgcgcgcaaacgcacacttcgcaaccgtcgaatcgaattttacaacgaaaaaattaaaaataaaattaaaaaccgctttacaataccgcgacctcgatcgaactaaaaaaaaaaaaaaaaaaaatatataaaaaaaaaaactaattttaaaacgactctcgaatcgtaaacataacgaccgaatacgaacccccgcgaaacgcaacaaaacgcaacaaaaactacaa

SEQ ID NO: 19927 - DNA, 780 bp, Artificial Sequence
  chemically treated genomic DNA (Homo sapiens) CpG-island No: 19927
  unsure (106, 467)
attaggtcggcggggttgtaaagtaggaattagtttttgtttaattcggatttggggttaatacgagtttaaataatggtgagtttcgaaggttattgcgtagcgnttggtcgtaaattttgtgtttaatttaattttttaaagcggtgggggttgggggtagggaggtattcgtttattcgaaagtcgtttgcggttttcgggggtttattagcgaacgttttttttcgttcggtttttttagttttttcgtagcgtttgggatagagggggcggcgaggtttggggattggttgttcgttcgcgcggttgtttagggggtggcgtaaaaggggcggttttcgtgtcgggaatagattttgaagtgggtttttagcgcgtacgtgtgagagtcgggttaggttcggagcggggattcgttgggaggaaagaggaggtttcggtcggggtttaaatttatttttcgntttttcgtggtttcggtttttttaagtcgcggtcgggggttcgtaggttttttatatttatttttattttcgcgttttgttcgcgtcgcgcgtaggcgtatatttcgtagtcgtcgagtcggattttgtagcgagggggttggggatagagttgaaagtcgttttgtagtgtcgcggtttcggtcgagttgggagggaggggaggggaggtatgtgggaaggggggttggttttggggcggttttcgagtcgtgaatatggcggtcggatgcgaattttcgcggagcgtagtaaagcgtagtaaaggttgtag

SEQ ID NO: 19928 - DNA, 780 bp, Artificial Sequence
  chemically treated genomic DNA (Homo sapiens) CpG-island No: 19928
  unsure (314, 675)
ctacaacctttactacgctttactacgctccgcgaaaattcgcatccgaccgccatattcacgactcgaaaaccgccccaaaaccaaccccccttcccacatacctcccctcccctccctcccaactcgaccgaaaccgcgacactacaaaacgactttcaactctatccccaaccccctcgctacaaaatccgactcgacgactacgaaatatacgcctacgcgcgacgcgaacaaaacgcgaaaataaaaataaatataaaaaacctacgaacccccgaccgcgacttaaaaaaaccgaaaccacgaaaaancgaaaaataaatttaaaccccgaccgaaacctcctctttcctcccaacgaatccccgctccgaacctaacccgactctcacacgtacgcgctaaaaacccacttcaaaatctattcccgacacgaaaaccgccccttttacgccaccccctaaacaaccgcgcgaacgaacaaccaatccccaaacctcgccgccccctctatcccaaacgctacgaaaaaactaaaaaaaccgaacgaaaaaaaacgttcgctaataaacccccgaaaaccgcaaacgactttcgaataaacgaatacctccctacccccaacccccaccgctttaaaaaattaaattaaacacaaaatttacgaccaancgctacgcaataaccttcgaaactcaccattatttaaactcgtattaaccccaaatccgaattaaacaaaaactaattcctactttacaaccccgccgacctaat

SEQ ID NO: 19929 - DNA, 865 bp, Artificial Sequence
  chemically treated genomic DNA (Homo sapiens) CpG-island No: 19929
gcgtcgcgcgtcggttatgtttttttttattttagtttttcgggattcgagagtcgtgcggggtcgagtttcgtgtttcgaggtacgtcgagttaagttatttttgtagttcgcggcgtcggaatttgggggcgtagtgagtgggggtagggcgtcgggtcggcgggcggtggtcgtggttgggtgtcggtttttggttttagaagttttttcgtattttgttgaattcggggttgtattggtttttcgagtttttcggattggtaacgtcgtagagataataggttttgattcgggatagattttatattcgcgtttaggacgtgggtttttttttttttttaggcgagaggttttcggattgggcgtcgcggcgagtttttcgtggtttttgtttgtttttgtacggttttttttttttttattattttgtttcggttttattcgggttttggttttatcgcgaaggggcgaggagttttcggaagggtcgcgatggtcggggagttcgggatttcggttttgggtaggcgcgtttcgcgatttagcggcggcgtgggcgaggggcgttgcgtaaattacgcgttttcgttggggaaacgttagtttaggcgggcggcggcggtgaaggggatgaggattaggatttcgtgttcggcgggattggtttcgtattttacgtcgtttttttgcggtgcgtatcgtatttgcgttttaggtcgaggttaggtttcgatttttttttcgtatcgacgtgattcggatcgcgcggtgttggcgtcgtttttatgcgttttgtttggtttttatttggtttttttttttttttaggtggaggagatgtcgttgtttcgtcggtttgggg

SEQ ID NO: 19930 - DNA, 865 bp, Artificial Sequence
  chemically treated genomic DNA (Homo sapiens) CpG-island No: 19930
ccccaaaccgacgaaacaacgacatctcctccacctaaaaaaaaaaaaaaaccaaataaaaaccaaacaaaacgcataaaaacgacgccaacaccgcgcgatccgaatcacgtcgatacgaaaaaaaaatcgaaacctaacctcgacctaaaacgcaaatacgatacgcaccgcaaaaaaacgacgtaaaatacgaaaccaatcccgccgaacacgaaatcctaatcctcatccccttcaccgccgccgcccgcctaaactaacgtttccccaacgaaaacgcgtaatttacgcaacgcccctcgcccacgccgccgctaaatcgcgaaacgcgcctacccaaaaccgaaatcccgaactccccgaccatcgcgacccttccgaaaactcctcgccccttcgcgataaaaccaaaacccgaataaaaccgaaacaaaataataaaaaaaaaaaaaaccgtacaaaaacaaacaaaaaccacgaaaaactcgccgcgacgcccaatccgaaaacctctcgcctaaaaaaaaaaaaaaacccacgtcctaaacgcgaatataaaatctatcccgaatcaaaacctattatctctacgacgttaccaatccgaaaaactcgaaaaaccaatacaaccccgaattcaacaaaatacgaaaaaacttctaaaaccaaaaaccgacacccaaccacgaccaccgcccgccgacccgacgccctacccccactcactacgcccccaaattccgacgccgcgaactacaaaaataacttaactcgacgtacctcgaaacacgaaactcgaccccgcacgactctcgaatcccgaaaaactaaaataaaaaaaaacataaccgacgcgcgacgc

SEQ ID NO: 19931 - DNA, 865 bp, Artificial Sequence
  chemically treated genomic DNA (Homo sapiens) CpG-island No: 19931
ttttagatcgacgggatagcggtattttttttatttgaaaaggaaagaggattaggtgggggttaggtagggcgtatgaaggcggcgttagtatcgcgcgattcgaattacgtcggtgcgggggaggggtcggagtttggtttcggtttagggcgtagatgcggtgcgtatcgtaggggggcggcgtggggtgcggggttagtttcgtcgggtacggggttttggtttttattttttttatcgtcgtcgttcgtttgggttggcgtttttttagcgagagcgcgtagtttgcgtagcgtttttcgtttacgtcgtcgttgggtcgcggggcgcgtttatttagagtcgaggtttcggatttttcggttatcgcgattttttcggggatttttcgttttttcgcggtgggattaaggttcgggtggggtcgggatagggtggtggggggaagggggatcgtataaaagtaaatagaaattacggggggttcgtcgcgacgtttagttcgagggtttttcgtttggaagagggaagaaatttacgttttggacgcgggtgtggggtttgtttcgggttaggatttgttgtttttgcgacgttgttagttcggagagttcggagggttaatgtagtttcggatttaataagatgcgaaaggatttttaaagttaggaatcggtatttagttacggttatcgttcgtcggttcggcgttttgtttttatttattgcgtttttaagtttcggcgtcgcgggttgtaggggtgatttggttcggcgtgtttcggggtacgaggttcggtttcgtacggttttcgggtttcggggggttggggtgggaagggatatggtcggcgcgcggcgt

SEQ ID NO: 19932 - DNA, 865 bp, Artificial Sequence
  chemically treated genomic DNA (Homo sapiens) CpG-island No: 19932
acgccgcgcgccgaccatatcccttcccaccccaaccccccgaaacccgaaaaccgtacgaaaccgaacctcgtaccccgaaacacgccgaaccaaatcacccctacaacccgcgacgccgaaacttaaaaacgcaataaataaaaacaaaacgccgaaccgacgaacgataaccgtaactaaataccgattcctaactttaaaaatcctttcgcatcttattaaatccgaaactacattaaccctccgaactctccgaactaacaacgtcgcaaaaacaacaaatcctaacccgaaacaaaccccacacccgcgtccaaaacgtaaatttcttccctcttccaaacgaaaaaccctcgaactaaacgtcgcgacgaaccccccgtaatttctatttacttttatacgatcccccttccccccaccaccctatcccgaccccacccgaaccttaatcccaccgcgaaaaaacgaaaaatccccgaaaaaatcgcgataaccgaaaaatccgaaacctcgactctaaataaacgcgccccgcgacccaacgacgacgtaaacgaaaaacgctacgcaaactacgcgctctcgctaaaaaaacgccaacccaaacgaacgacgacgataaaaaaaataaaaaccaaaaccccgtacccgacgaaactaaccccgcaccccacgccgcccccctacgatacgcaccgcatctacgccctaaaccgaaaccaaactccgacccctcccccgcaccgacgtaattcgaatcgcgcgatactaacgccgccttcatacgccctacctaacccccacctaatcctctttccttttcaaataaaaaaaataccgctatcccgtcgatctaaaa

SEQ ID NO: 19933 - DNA, 677 bp, Artificial Sequence
  chemically treated genomic DNA (Homo sapiens) CpG-island No: 19933
gcgttttatttcgtcgtaggtcgaggttggcgtagagagataggaagcgttagttttgggcgtttgggttttcgttttttcggtcgtagtttcgcggcggcgcgttcgcggtgtattgtgggcgttgtagttcggtcggaatttgtttgcgatttcgagttttatgatatcgtttttttttatattttagttcgtagtgtttttttttagtttcggtcgggtttttcgggagtcgggcgtggcgttttagttagtgagtcgttttttttttgggttcggaggcggaagtttgaggggcgcggggaggagtttcgcgtgcggggtgaacgttcgttttacgtgttcgtttttttcgcgatcgttgcgcgcgagtttcgtgtttttacggcgggtagtagcggcggcggcggcggttgaacgcggagggggcggagggagttcgcggcggcggtagtagttatagcgaaatggcggagatcgtggttgatattcggcggttgattattaagtcgtagaatttgaatgacgtttacggattttttagtaattttttcgagatcgatgtgagtaattcgtaaacggtgggggtcggtcggggtcgttttattatttacgaaattagggttaaggtgaggtcgtttttttttttttttaagaaatttttttcgttggttttg

SEQ ID NO: 19934 - DNA, 677 bp, Artificial Sequence
  chemically treated genomic DNA (Homo sapiens) CpG-island No: 19934
caaaaccaacgaaaaaaatttcttaaaaaaaaaaaaaaacgacctcaccttaaccctaatttcgtaaataataaaacgaccccgaccgacccccaccgtttacgaattactcacatcgatctcgaaaaaattactaaaaaatccgtaaacgtcattcaaattctacgacttaataatcaaccgccgaatatcaaccacgatctccgccatttcgctataactactaccgccgccgcgaactccctccgccccctccgcgttcaaccgccgccgccgccgctactacccgccgtaaaaacacgaaactcgcgcgcaacgatcgcgaaaaaaacgaacacgtaaaacgaacgttcaccccgcacgcgaaactcctccccgcgcccctcaaacttccgcctccgaacccaaaaaaaaaacgactcactaactaaaacgccacgcccgactcccgaaaaacccgaccgaaactaaaaaaaaacactacgaactaaaatataaaaaaaaacgatatcataaaactcgaaatcgcaaacaaattccgaccgaactacaacgcccacaatacaccgcgaacgcgccgccgcgaaactacgaccgaaaaaacgaaaacccaaacgcccaaaactaacgcttcctatctctctacgccaacctcgacctacgacgaaataaaacgc

SEQ ID NO: 19935 - DNA, 677 bp, Artificial Sequence
  chemically treated genomic DNA (Homo sapiens) CpG-island No: 19935
tagagttagcgggaggggttttttgggagaggggagagacggttttattttgattttgatttcgtaagtggtgaagcggtttcggtcgatttttatcgtttgcgggttgtttatatcgatttcgaggaagttgttggggggttcgtaggcgttatttaggttttgcggtttggtgattagtcgtcgggtgttagttacggttttcgttatttcgttgtagttgttgtcgtcgtcgcgggtttttttcgtttttttcgcgtttagtcgtcgtcgtcgtcgttgttgttcgtcgtggggatacggggttcgcgcgtagcggtcgcgaagagaacgagtacgtagagcgggcgtttatttcgtacgcgaagttttttttcgcgttttttaagttttcgttttcgagtttaggggagaaacggtttattagttggaacgttacgttcggttttcgggaggttcggtcgaggttggggaggggtattgcggattggggtgtgaggagaagcggtgttatgggattcggggtcgtaaataggtttcggtcggattatagcgtttataatgtatcgcgagcgcgtcgtcgcggggttgcggtcgaggaggcgaggatttagacgtttagagttggcgttttttgtttttttgcgttagtttcggtttgcggcggggtagagcgt

SEQ ID NO: 19936 - DNA, 677 bp, Artificial Sequence
  chemically treated genomic DNA (Homo sapiens) CpG-island No: 19936
acgctctaccccgccgcaaaccgaaactaacgcaaaaaaacaaaaaacgccaactctaaacgtctaaatcctcgcctcctcgaccgcaaccccgcgacgacgcgctcgcgatacattataaacgctataatccgaccgaaacctatttacgaccccgaatcccataacaccgcttctcctcacaccccaatccgcaatacccctccccaacctcgaccgaacctcccgaaaaccgaacgtaacgttccaactaataaaccgtttctcccctaaactcgaaaacgaaaacttaaaaaacgcgaaaaaaaacttcgcgtacgaaataaacgcccgctctacgtactcgttctcttcgcgaccgctacgcgcgaaccccgtatccccacgacgaacaacaacgacgacgacgacgactaaacgcgaaaaaaacgaaaaaaacccgcgacgacgacaacaactacaacgaaataacgaaaaccgtaactaacacccgacgactaatcaccaaaccgcaaaacctaaataacgcctacgaaccccccaacaacttcctcgaaatcgatataaacaacccgcaaacgataaaaatcgaccgaaaccgcttcaccacttacgaaatcaaaatcaaaataaaaccgtctctcccctctcccaaaaaacccctcccgctaactcta

SEQ ID NO: 19937 - DNA, 755 bp, Artificial Sequence
  chemically treated genomic DNA (Homo sapiens) CpG-island No: 19937
gattttcgggatagggattgagtttgatcgtttgatttgttttttcggtttttagcgtttcgtttaggtcggggtttggggagggggcgttttttggacgtttgcggttcgtcgaggggtggggtgagggcgttacgggtcgattcgggtcgtcgggtgattcgggacgttttttgtttcggcgggcgtcgtttatagtttgcgtagtgtttaggggcggaggtcgggagggggtttaagcgttagttttttagtttcggcggattcgggtgggcgtgttcgcggattcgtttgtcgtatttaggcgagttttttttgtagcgtttcgagtttttgggggttgcggcggttgcgggcgttttcgcgcgggttcgaggggcgggacgcggcggagcggggcggggcggggttttcgcggttttttttttcggtttcgggtttcggtttcggtttcggttttggttttgcgcggtggtagcggcggcggcggcgcggggatcgaggtgagcggcggttacgggttcggaggttcggtcggagaggggatcgggtggttggggttggggggcggtacgcgcgattttgcggaagggggggtttcggggcggtgtcggcggagcggcgcgcgcgtgtgtgtgcgcgcgtaggtgcgcgcgcgcgcgacgtcgattgcggggttttagggtggggtaggggtcggacggaatttgcggggtaggggcggtttttttgggtgaaggtttagttttttttat

SEQ ID NO: 19938 - DNA, 755 bp, Artificial Sequence
  chemically treated genomic DNA (Homo sapiens) CpG-island No: 19938
ataaaaaaaactaaaccttcacccaaaaaaaccgcccctaccccgcaaattccgtccgacccctaccccaccctaaaaccccgcaatcgacgtcgcgcgcgcgcgcacctacgcgcgcacacacacgcgcgcgccgctccgccgacaccgccccgaaacccccccttccgcaaaatcgcgcgtaccgccccccaaccccaaccacccgatcccctctccgaccgaacctccgaacccgtaaccgccgctcacctcgatccccgcgccgccgccgccgctaccaccgcgcaaaaccaaaaccgaaaccgaaaccgaaacccgaaaccgaaaaaaaaaaccgcgaaaaccccgccccgccccgctccgccgcgtcccgcccctcgaacccgcgcgaaaacgcccgcaaccgccgcaacccccaaaaactcgaaacgctacaaaaaaaactcgcctaaatacgacaaacgaatccgcgaacacgcccacccgaatccgccgaaactaaaaaactaacgcttaaaccccctcccgacctccgcccctaaacactacgcaaactataaacgacgcccgccgaaacaaaaaacgtcccgaatcacccgacgacccgaatcgacccgtaacgccctcaccccacccctcgacgaaccgcaaacgtccaaaaaacgccccctccccaaaccccgacctaaacgaaacgctaaaaaccgaaaaaacaaatcaaacgatcaaactcaatccctatcccgaaaatc

SEQ ID NO: 19939 - DNA, 755 bp, Artificial Sequence
  chemically treated genomic DNA (Homo sapiens) CpG-island No: 19939
gtgggagaggttggatttttatttaagggggtcgtttttgtttcgtagatttcgttcgatttttattttattttagggtttcgtagtcggcgtcgcgcgcgcgcgtatttacgcgcgtatatatacgcgcgcgtcgtttcgtcggtatcgtttcggggttttttttttcgtagggtcgcgcgtgtcgttttttaattttagttattcggtttttttttcggtcgggttttcggattcgtagtcgtcgtttatttcggttttcgcgtcgtcgtcgtcgttgttatcgcgtagagttagagtcggagtcggagtcggagttcggggtcgggggagggggtcgcggaggtttcgtttcgtttcgtttcgtcgcgtttcgtttttcgggttcgcgcgggggcgttcgtagtcgtcgtagtttttagggattcggggcgttgtaggggagattcgtttaagtgcggtaagcgggttcgcgggtacgtttattcgggttcgtcggagttggggggttggcgtttgggttttttttcggttttcgtttttgagtattgcgtaggttgtgggcggcgttcgtcggggtagggggcgtttcgggttattcggcggttcggatcggttcgtgacgtttttattttatttttcggcgggtcgtaaacgtttagagagcgttttttttttaagtttcgatttgagcggggcgttagaagtcgggaggataaattagacggttagatttagtttttgtttcggggatt

SEQ ID NO: 19940 - DNA, 755 bp, Artificial Sequence
  chemically treated genomic DNA (Homo sapiens) CpG-island No: 19940
aatccccgaaacaaaaactaaatctaaccgtctaatttatcctcccgacttctaacgccccgctcaaatcgaaacttaaaaaaaaaacgctctctaaacgtttacgacccgccgaaaaataaaataaaaacgtcacgaaccgatccgaaccgccgaataacccgaaacgccccctaccccgacgaacgccgcccacaacctacgcaatactcaaaaacgaaaaccgaaaaaaaacccaaacgccaaccccccaactccgacgaacccgaataaacgtacccgcgaacccgcttaccgcacttaaacgaatctcccctacaacgccccgaatccctaaaaactacgacgactacgaacgcccccgcgcgaacccgaaaaacgaaacgcgacgaaacgaaacgaaacgaaacctccgcgaccccctcccccgaccccgaactccgactccgactccgactctaactctacgcgataacaacgacgacgacgacgcgaaaaccgaaataaacgacgactacgaatccgaaaacccgaccgaaaaaaaaaccgaataactaaaattaaaaaacgacacgcgcgaccctacgaaaaaaaaaaccccgaaacgataccgacgaaacgacgcgcgcgtatatatacgcgcgtaaatacgcgcgcgcgcgacgccgactacgaaaccctaaaataaaataaaaatcgaacgaaatctacgaaacaaaaacgacccccttaaataaaaatccaacctctcccac

SEQ ID NO: 19941 - DNA, 1035 bp, Artificial Sequence
  chemically treated genomic DNA (Homo sapiens) CpG-island No: 19941
gaggcgtcgtggtagttgcggtcgcggagacgtcggtttcgttttttgtatacgttttttcgtttgaggtttcgtttcgttcgcgatgttttcgttttttttttcgtttcgtttttcggggcgtcgagattcgtttttgggttcgttttcgggttcgttttcggttttcgtttgcgtcgggtttgtgttggtcgcgcgtttggcgttttacgttgagttttttcgtgtaatgattaattcggcggggcggtcggcgcgggattcgagacggaggcgcggggtcggggcgggatttcgtaggatcgttcggttttttgttttcgtcggagttttcgcgtagagggcgtatcgtcggttcggggtttttggtgcggcgtggcgtagggcgcggcgtggggcgcgcgtgggcgcggcgtaggcggttcgggttattatgaggatttttcgtaggttgaagtttatgagttcgtttagttttagtgatttgggtaagagagagtcggtcgtcgtcgcggacgagcggggtacgtagtagcgtcgggtttgcgttaacgttatttggaataggtaaggtcgcgttttttcggttattcggaggttttggagtcgggggaggggatttttgagtcgttcgcgggttaggggtcgtttcgagttaggaacgttgtcgaaggcggcgcggcgttttatagtttgtaaagaatttgtttcgtcggagtggtgcgggtttggaggaaagtttagtgtagcgtggttttagaatttagggaagggagcgaggttcgttagcgttcggggttggtttagaagcgttcggcgggtgggcggcggggtgggtcgggaagtcgcgtgttcgttttttattcggggtttttttacgtttttattgcggtgttcgtgataatttgggaggttaacggagtaggaagtattttttttattttgcggttgagtacgggagtttcggggtttagtgggtgggtcgcgtaggttttttgtgtttttttaagtttttttcggtttttttttgagagg

SEQ ID NO: 19942 - DNA, 1035 bp, Artificial Sequence
  chemically treated genomic DNA (Homo sapiens) CpG-island No: 19942
cctctcaaaaaaaaaccgaaaaaaacttaaaaaaacacaaaaaacctacgcgacccacccactaaaccccgaaactcccgtactcaaccgcaaaataaaaaaaatacttcctactccgttaacctcccaaattatcacgaacaccgcaataaaaacgtaaaaaaaccccgaataaaaaacgaacacgcgacttcccgacccaccccgccgcccacccgccgaacgcttctaaaccaaccccgaacgctaacgaacctcgctcccttccctaaattctaaaaccacgctacactaaactttcctccaaacccgcaccactccgacgaaacaaattctttacaaactataaaacgccgcgccgccttcgacaacgttcctaactcgaaacgacccctaacccgcgaacgactcaaaaatcccctcccccgactccaaaacctccgaataaccgaaaaaacgcgaccttacctattccaaataacgttaacgcaaacccgacgctactacgtaccccgctcgtccgcgacgacgaccgactctctcttacccaaatcactaaaactaaacgaactcataaacttcaacctacgaaaaatcctcataataacccgaaccgcctacgccgcgcccacgcgcgccccacgccgcgccctacgccacgccgcaccaaaaaccccgaaccgacgatacgccctctacgcgaaaactccgacgaaaacaaaaaaccgaacgatcctacgaaatcccgccccgaccccgcgcctccgtctcgaatcccgcgccgaccgccccgccgaattaatcattacacgaaaaaactcaacgtaaaacgccaaacgcgcgaccaacacaaacccgacgcaaacgaaaaccgaaaacgaacccgaaaacgaacccaaaaacgaatctcgacgccccgaaaaacgaaacgaaaaaaaaaacgaaaacatcgcgaacgaaacgaaacctcaaacgaaaaaacgtatacaaaaaacgaaaccgacgtctccgcgaccgcaactaccacgacgcctc

SEQ ID NO: 19943 - DNA, 1035 bp, Artificial Sequence
  chemically treated genomic DNA (Homo sapiens) CpG-island No: 19943
ttttttaagggaaagtcgaagggagtttaaagagatataggaagtttgcgcgatttatttattgagtttcgaggttttcgtgtttagtcgtaaaatgggaaaaatattttttgtttcgttagttttttaggttgttacgagtatcgtagtggagacgtggaaagatttcgggtaggaggcgggtacgcggtttttcggtttatttcgtcgtttattcgtcgggcgtttttgggttagtttcgggcgttggcgggtttcgtttttttttttgggttttggaattacgttgtattgaatttttttttaggttcgtattatttcggcggggtaagttttttgtaaattgtgaagcgtcgcgtcgttttcggtagcgtttttggttcggggcggtttttagttcgcggacggtttaggggttttttttttcggttttagggttttcgggtggtcgggagggcgcggttttatttgttttaggtggcgttggcgtaggttcggcgttgttgcgtgtttcgttcgttcgcggcggcggtcggtttttttttgtttaggttattgaggttgggcgaatttatgaattttaatttgcggagagtttttatggtgattcgggtcgtttgcgtcgcgtttacgcgcgttttacgtcgcgttttgcgttacgtcgtattaagggtttcgggtcggcgatgcgttttttacgcggaaatttcggcgagagtaggaagtcgagcggttttgcggggtttcgtttcggtttcgcgttttcgtttcgggtttcgcgtcggtcgtttcgtcgggttaattattgtacggagaggtttagcgtggagcgttaggcgcgcggttagtatagattcggcgtaaacggaggtcgggggcggattcgggggcgggtttaggggcgggtttcggcgtttcggggggcggggcggggaagggggcgggggtatcgcgggcggggcggggttttaggcgagggggcgtgtgtaagaggcggagtcggcgttttcgcggtcgtagttgttacgacgtttt

SEQ ID NO: 19944 - DNA, 1035 bp, Artificial Sequence
  chemically treated genomic DNA (Homo sapiens) CpG-island No: 19944
aaaacgtcgtaacaactacgaccgcgaaaacgccgactccgcctcttacacacgccccctcgcctaaaaccccgccccgcccgcgatacccccgcccccttccccgccccgccccccgaaacgccgaaacccgcccctaaacccgcccccgaatccgcccccgacctccgtttacgccgaatctatactaaccgcgcgcctaacgctccacgctaaacctctccgtacaataattaacccgacgaaacgaccgacgcgaaacccgaaacgaaaacgcgaaaccgaaacgaaaccccgcaaaaccgctcgacttcctactctcgccgaaatttccgcgtaaaaaacgcatcgccgacccgaaacccttaatacgacgtaacgcaaaacgcgacgtaaaacgcgcgtaaacgcgacgcaaacgacccgaatcaccataaaaactctccgcaaattaaaattcataaattcgcccaacctcaataacctaaacaaaaaaaaaccgaccgccgccgcgaacgaacgaaacacgcaacaacgccgaacctacgccaacgccacctaaaacaaataaaaccgcgccctcccgaccacccgaaaaccctaaaaccgaaaaaaaaaacccctaaaccgtccgcgaactaaaaaccgccccgaaccaaaaacgctaccgaaaacgacgcgacgcttcacaatttacaaaaaacttaccccgccgaaataatacgaacctaaaaaaaaattcaatacaacgtaattccaaaacccaaaaaaaaaaacgaaacccgccaacgcccgaaactaacccaaaaacgcccgacgaataaacgacgaaataaaccgaaaaaccgcgtacccgcctcctacccgaaatctttccacgtctccactacgatactcgtaacaacctaaaaaactaacgaaacaaaaaatatttttcccattttacgactaaacacgaaaacctcgaaactcaataaataaatcgcgcaaacttcctatatctctttaaactcccttcgactttcccttaaaaaa

SEQ ID NO: 19945 - DNA, 719 bp, Artificial Sequence
  chemically treated genomic DNA (Homo sapiens) CpG-island No: 19945
agcgcggcgtttttcggggatcgaggtttcgggttcggtcgtttttagtagcgagggtaggagaagtggttcgggcggtcggcggattgggagggcgttattcgaggattataattttcggtttgtttcgcgtaggtatcgtttcgagttttcgtttcgtcggcgtcgcgtagttttgtgggagtcgtagttcgggcgcgcgatttatagcgtcgcgtgcgtttcgggcgcgtcgtagtcgcggggttcgggtcgggcgttacgttacgaaggtagcgtaaggcgggcgtcggacgcgggtaggggtcggggtcggagtcgggtcggggcgtttcgcggttgaggagcgggaggtcgttcgggtagcgcggtcggcggcgagaggggtttcgtcgtttttcggaggtagaagttgtggatcggtcggcgggggcgagcgggttcgggggtcggggtcgcgttgttcgggtcgcgaggacgaggcggcgtcgtcgggttgtggaggtgagtttcgtcggtcgggttcggtcgggcgtttagtcggggatttcgggcggggagcgcgggttcggagggcggcggggagcgcgggttcggcggggcgtaggaggtttcgggggtcgggcgcgtcgggtttcgagttagggtagggacggtagggttttcggagtggggttagttcgtcgttcgttggcgtttttaggttggtgggggttagg

SEQ ID NO: 19946 - DNA, 719 bp, Artificial Sequence
  chemically treated genomic DNA (Homo sapiens) CpG-island No: 19946
cctaacccccaccaacctaaaaacgccaacgaacgacgaactaaccccactccgaaaaccctaccgtccctaccctaactcgaaacccgacgcgcccgacccccgaaacctcctacgccccgccgaacccgcgctccccgccgccctccgaacccgcgctccccgcccgaaatccccgactaaacgcccgaccgaacccgaccgacgaaactcacctccacaacccgacgacgccgcctcgtcctcgcgacccgaacaacgcgaccccgacccccgaacccgctcgcccccgccgaccgatccacaacttctacctccgaaaaacgacgaaacccctctcgccgccgaccgcgctacccgaacgacctcccgctcctcaaccgcgaaacgccccgacccgactccgaccccgacccctacccgcgtccgacgcccgccttacgctaccttcgtaacgtaacgcccgacccgaaccccgcgactacgacgcgcccgaaacgcacgcgacgctataaatcgcgcgcccgaactacgactcccacaaaactacgcgacgccgacgaaacgaaaactcgaaacgatacctacgcgaaacaaaccgaaaattataatcctcgaataacgccctcccaatccgccgaccgcccgaaccacttctcctaccctcgctactaaaaacgaccgaacccgaaacctcgatccccgaaaaacgccgcgct

SEQ ID NO: 19947 - DNA, 719 bp, Artificial Sequence
  chemically treated genomic DNA (Homo sapiens) CpG-island No: 19947
tttggtttttattagtttggaggcgttagcgggcggcgggttgattttatttcgggggttttgtcgtttttgttttggttcggagttcggcgcgttcggttttcgaggttttttgcgtttcgtcgagttcgcgtttttcgtcgtttttcgggttcgcgtttttcgttcggggttttcggttgggcgttcggtcgggttcggtcgacgggatttatttttatagttcggcggcgtcgtttcgttttcgcggttcgggtagcgcggtttcggttttcgggttcgttcgttttcgtcggtcgatttataatttttgttttcggagagcggcggggtttttttcgtcgtcggtcgcgttgttcggacggtttttcgttttttagtcgcggggcgtttcgattcggtttcggtttcggtttttgttcgcgttcggcgttcgttttacgttgttttcgtagcgtagcgttcggttcgggtttcgcggttacggcgcgttcggggcgtacgcggcgttgtgaatcgcgcgttcggattacggtttttatagggttgcgcggcgtcgacggggcggaagttcggggcggtgtttgcgcgaggtaggtcgggagttgtagttttcgggtggcgtttttttagttcgtcgatcgttcgggttattttttttgttttcgttgttggagacggtcgggttcgaggtttcggttttcgggaggcgtcgcgtt

SEQ ID NO: 19948 - DNA, 719 bp, Artificial Sequence
  chemically treated genomic DNA (Homo sapiens) CpG-island No: 19948
aacgcgacgcctcccgaaaaccgaaacctcgaacccgaccgtctccaacaacgaaaacaaaaaaaataacccgaacgatcgacgaactaaaaaaacgccacccgaaaactacaactcccgacctacctcgcgcaaacaccgccccgaacttccgccccgtcgacgccgcgcaaccctataaaaaccgtaatccgaacgcgcgattcacaacgccgcgtacgccccgaacgcgccgtaaccgcgaaacccgaaccgaacgctacgctacgaaaacaacgtaaaacgaacgccgaacgcgaacaaaaaccgaaaccgaaaccgaatcgaaacgccccgcgactaaaaaacgaaaaaccgtccgaacaacgcgaccgacgacgaaaaaaaccccgccgctctccgaaaacaaaaattataaatcgaccgacgaaaacgaacgaacccgaaaaccgaaaccgcgctacccgaaccgcgaaaacgaaacgacgccgccgaactataaaaataaatcccgtcgaccgaacccgaccgaacgcccaaccgaaaaccccgaacgaaaaacgcgaacccgaaaaacgacgaaaaacgcgaactcgacgaaacgcaaaaaacctcgaaaaccgaacgcgccgaactccgaaccaaaacaaaaacgacaaaacccccgaaataaaatcaacccgccgcccgctaacgcctccaaactaataaaaaccaaa

SEQ ID NO: 19949 - DNA, 1871 bp, Artificial Sequence
  chemically treated genomic DNA (Homo sapiens) CpG-island No: 19949
ggtaggattatttttacgacggtaggattttttcgttattttagaaagaattacgtgtttatttaattttcgattttacgtcggggttcgcggacgtagtcgtttcgttcgtttacgtatttgcggtagtcgggttcggtagggacgagggttcggcggcgttttcgggaagagcgcggttcgggttttgggttttcgtttaggaggcgtcgttgtcgtagtgagtacgtcgggtcgggttttgagttcgcgtcggtcgcgtttttcgcgtttcgagttgtggcggtcgcgttttcgggcggaaggtttacgttcggtgacgtcgcgttgttttagaattttagcgattttgtagatttattggtgatttaacggtgcgtttcgtcgtcgtcgggcggaagtttcgtttttgtttcggagaggaagtttcgttttatcgagcgtcgattggtcgtatcgttttagagaggacgcgttcggggttatttcgtcgtttttttcgagggttttgcggaagtaggcggtatagtttgcgaggggttttcgtttttcggatttagtcgtatcgtttcggttcgggcgcgtttgtattttgtcgttcgttcgcgcgttgaaggggcggatataaataacgtggattttcgagtttttgattggcgagcgtgtaggaaaggggcggggttagtagagtcgtgatggatatgtaagcgatttaatggcgtcggcgacggggcgggcgaggataacggcgttgtgggtcgggggcggggcggtcggcggttttgggatttttttgggaggtagtcgtagggaagggaatgattttggtgaatttataatcgaattaatggtttcgggaaagtaggaggcgagtggttaatggcgacggcgatgaggtaggcgttcgttgttttcgtaacgtcgtgtgggaaaggcgggggaggggcggttatgatagacgtgtagataggttaatggttgagggaaggagggcggcgggcgatttttggtgattacgggaaggtagggcggggtggtgaagaggcggtgcgatcggaggtttggcggcgtcgtgtggaacgtcgtgagggcggggaagtcgtgacggacgggcgggtgggttaatgggttcgggagggcgggcgaagggtggttaatggcggcggcgcggtcgggggtggggcggcgcggcggttttggtggtgcgggaagcggcggggcggcggcgaggttgaggtgcgttcgggcgcgggcggggcggggtcggcgttgggtttcgggcgcgtttattcggtcgtcgtggggcggacgtaacgggcgtaggtgcggggcgcgggtttttttacgtcgcggttttattcggcggtgtttcggtaggcggtcggcgcggggcgtaggcggcgcggttatgggttcgtagggtagttcggtgaagagttacgattatttgtttaagtttttgttggtgggcgatagcgacgtgggtaagggcgagattttggagagtttgtaggacggcgcggtagagttttcgtacgtttatagtaacggtaaggttcggttcgcggcgcgcgttgttacgcggggttcgagttcggcgagttgggtacggagttcgttttcggttcggtttttttaagcgtcgtcgaacgtttttaggaacgtttttgtttggtttttagattcggtagttcggtggttgcggggtgttcgtgttttagtttcgaggtgacgtcggggggtaggaggacggattagagggacgcgtttagcggggacggtgttatggattcggggtttgggggacggtgttacgggttcgggattttaggggaaggtgttatgggttcgggatttggagtttaggggaa

SEQ ID NO: 19950 - DNA, 1871 bp, Artificial Sequence
  chemically treated genomic DNA (Homo sapiens) CpG-island No: 19950
ttcccctaaactccaaatcccgaacccataacaccttcccctaaaatcccgaacccgtaacaccgtcccccaaaccccgaatccataacaccgtccccgctaaacgcgtccctctaatccgtcctcctaccccccgacgtcacctcgaaactaaaacacgaacaccccgcaaccaccgaactaccgaatctaaaaaccaaacaaaaacgttcctaaaaacgttcgacgacgcttaaaaaaaccgaaccgaaaacgaactccgtacccaactcgccgaactcgaaccccgcgtaacaacgcgcgccgcgaaccgaaccttaccgttactataaacgtacgaaaactctaccgcgccgtcctacaaactctccaaaatctcgcccttacccacgtcgctatcgcccaccaacaaaaacttaaacaaataatcgtaactcttcaccgaactaccctacgaacccataaccgcgccgcctacgccccgcgccgaccgcctaccgaaacaccgccgaataaaaccgcgacgtaaaaaaacccgcgccccgcacctacgcccgttacgtccgccccacgacgaccgaataaacgcgcccgaaacccaacgccgaccccgccccgcccgcgcccgaacgcacctcaacctcgccgccgccccgccgcttcccgcaccaccaaaaccgccgcgccgccccacccccgaccgcgccgccgccattaaccacccttcgcccgccctcccgaacccattaacccacccgcccgtccgtcacgacttccccgccctcacgacgttccacacgacgccgccaaacctccgatcgcaccgcctcttcaccaccccgccctaccttcccgtaatcaccaaaaatcgcccgccgccctccttccctcaaccattaacctatctacacgtctatcataaccgcccctcccccgcctttcccacacgacgttacgaaaacaacgaacgcctacctcatcgccgtcgccattaaccactcgcctcctactttcccgaaaccattaattcgattataaattcaccaaaatcattcccttccctacgactacctcccaaaaaaatcccaaaaccgccgaccgccccgcccccgacccacaacgccgttatcctcgcccgccccgtcgccgacgccattaaatcgcttacatatccatcacgactctactaaccccgcccctttcctacacgctcgccaatcaaaaactcgaaaatccacgttatttatatccgccccttcaacgcgcgaacgaacgacaaaatacaaacgcgcccgaaccgaaacgatacgactaaatccgaaaaacgaaaacccctcgcaaactataccgcctacttccgcaaaaccctcgaaaaaaacgacgaaataaccccgaacgcgtcctctctaaaacgatacgaccaatcgacgctcgataaaacgaaacttcctctccgaaacaaaaacgaaacttccgcccgacgacgacgaaacgcaccgttaaatcaccaataaatctacaaaatcgctaaaattctaaaacaacgcgacgtcaccgaacgtaaaccttccgcccgaaaacgcgaccgccacaactcgaaacgcgaaaaacgcgaccgacgcgaactcaaaacccgacccgacgtactcactacgacaacgacgcctcctaaacgaaaacccaaaacccgaaccgcgctcttcccgaaaacgccgccgaaccctcgtccctaccgaacccgactaccgcaaatacgtaaacgaacgaaacgactacgtccgcgaaccccgacgtaaaatcgaaaattaaataaacacgtaattctttctaaaataacgaaaaaatcctaccgtcgtaaaaataatcctacc

SEQ ID NO: 19951 - DNA, 1871 bp, Artificial Sequence
  chemically treated genomic DNA (Homo sapiens) CpG-island No: 19951
tttttttgggttttagatttcggatttatgatatttttttttgagatttcggattcgtgatatcgttttttagatttcgggtttatggtatcgttttcgttgggcgcgtttttttggttcgtttttttgtttttcggcgttatttcgggattggagtacgggtatttcgtagttatcgagttatcgagtttggaagttaggtaaaggcgtttttgggaacgttcggcggcgtttggaagggtcgggtcgagggcgagtttcgtgtttagttcgtcgggttcgggtttcgcgtagtagcgcgcgtcgcgggtcgggttttatcgttattgtaggcgtacggggattttgtcgcgtcgttttgtaggttttttaggatttcgtttttgtttacgtcgttgtcgtttattagtaggaatttgagtaggtagtcgtagttttttatcggattgttttgcgagtttatggtcgcgtcgtttgcgtttcgcgtcggtcgtttgtcgaagtatcgtcgggtgaggtcgcggcgtgagagagttcgcgtttcgtatttgcgttcgttgcgttcgttttacggcggtcgagtgggcgcgttcgaagtttagcgtcggtttcgtttcgttcgcgttcgggcgtattttagtttcgtcgtcgtttcgtcgtttttcgtattattagggtcgtcgcgtcgttttattttcggtcgcgtcgtcgttattggttatttttcgttcgttttttcgagtttattggtttattcgttcgttcgttacgattttttcgtttttacggcgttttatacggcgtcgttagattttcggtcgtatcgtttttttattatttcgttttgttttttcgtagttattagaggtcgttcgtcgtttttttttttttagttattggtttgtttgtacgtttgttatgatcgtttttttttcgttttttttatacggcgttgcggagatagcggacgtttgttttatcgtcgtcgttattggttattcgttttttgttttttcggaattattggttcgattataagtttattaagattatttttttttttgcggttgttttttagagaaattttagagtcgtcggtcgtttcgttttcggtttataacgtcgttgttttcgttcgtttcgtcgtcggcgttattgggtcgtttgtatgtttattacggttttgttaatttcgttttttttttatacgttcgttaattaggggttcggaagtttacgttgtttgtattcgtttttttaacgcgcggacgggcggtaggatgtaggcgcgttcgagtcgaggcgatgcggttgagttcgggaaacgaaagtttttcgtaggttgtgtcgtttgttttcgtagaattttcggagggagcggcggggtggtttcgggcgcgttttttttaaggcggtgcggttaatcggcgttcgatgaggcggaatttttttttcggggtaggggcgggattttcgttcggcggcggcggggcgtatcgttgggttattagtgagtttgtaaagtcgttgaggttttgggatagcgcggcgttatcgagcgtgagtttttcgttcggggacgcggtcgttatagttcgggacgcggggagcgcggtcggcgcgagtttaagattcggttcgacgtgtttattgcggtagcggcgttttttggacggggatttagggttcggatcgcgtttttttcgggggcgtcgtcgagttttcgtttttgtcgggttcggttgtcgtaggtgcgtgggcgagcgaggcggttgcgttcgcgggtttcggcgtggggtcgggggttgagtgggtacgtggttttttttggggtgacgagaaggttttatcgtcgtggggatggttttgtt

SEQ ID NO: 19952 - DNA, 1871 bp, Artificial Sequence
  chemically treated genomic DNA (Homo sapiens) CpG-island No: 19952
aacaaaaccatccccacgacgataaaaccttctcgtcaccccaaaaaaaaccacgtacccactcaacccccgaccccacgccgaaacccgcgaacgcaaccgcctcgctcgcccacgcacctacgacaaccgaacccgacaaaaacgaaaactcgacgacgcccccgaaaaaaacgcgatccgaaccctaaatccccgtccaaaaaacgccgctaccgcaataaacacgtcgaaccgaatcttaaactcgcgccgaccgcgctccccgcgtcccgaactataacgaccgcgtccccgaacgaaaaactcacgctcgataacgccgcgctatcccaaaacctcaacgactttacaaactcactaataacccaacgatacgccccgccgccgccgaacgaaaatcccgcccctaccccgaaaaaaaaattccgcctcatcgaacgccgattaaccgcaccgccttaaaaaaaacgcgcccgaaaccaccccgccgctccctccgaaaattctacgaaaacaaacgacacaacctacgaaaaactttcgtttcccgaactcaaccgcatcgcctcgactcgaacgcgcctacatcctaccgcccgtccgcgcgttaaaaaaacgaatacaaacaacgtaaacttccgaacccctaattaacgaacgtataaaaaaaaaacgaaattaacaaaaccgtaataaacatacaaacgacccaataacgccgacgacgaaacgaacgaaaacaacgacgttataaaccgaaaacgaaacgaccgacgactctaaaatttctctaaaaaacaaccgcaaaaaaaaaaataatcttaataaacttataatcgaaccaataattccgaaaaaacaaaaaacgaataaccaataacgacgacgataaaacaaacgtccgctatctccgcaacgccgtataaaaaaaacgaaaaaaaaacgatcataacaaacgtacaaacaaaccaataactaaaaaaaaaaaaacgacgaacgacctctaataactacgaaaaaacaaaacgaaataataaaaaaacgatacgaccgaaaatctaacgacgccgtataaaacgccgtaaaaacgaaaaaatcgtaacgaacgaacgaataaaccaataaactcgaaaaaacgaacgaaaaataaccaataacgacgacgcgaccgaaaataaaacgacgcgacgaccctaataatacgaaaaacgacgaaacgacgacgaaactaaaatacgcccgaacgcgaacgaaacgaaaccgacgctaaacttcgaacgcgcccactcgaccgccgtaaaacgaacgcaacgaacgcaaatacgaaacgcgaactctctcacgccgcgacctcacccgacgatacttcgacaaacgaccgacgcgaaacgcaaacgacgcgaccataaactcgcaaaacaatccgataaaaaactacgactacctactcaaattcctactaataaacgacaacgacgtaaacaaaaacgaaatcctaaaaaacctacaaaacgacgcgacaaaatccccgtacgcctacaataacgataaaacccgacccgcgacgcgcgctactacgcgaaacccgaacccgacgaactaaacacgaaactcgccctcgacccgacccttccaaacgccgccgaacgttcccaaaaacgcctttacctaacttccaaactcgataactcgataactacgaaatacccgtactccaatcccgaaataacgccgaaaaacaaaaaaacgaaccaaaaaaacgcgcccaacgaaaacgataccataaacccgaaatctaaaaaacgatatcacgaatccgaaatctcaaaaaaaaatatcataaatccgaaatctaaaacccaaaaaaa

SEQ ID NO: 19953 - DNA, 581 bp, Artificial Sequence
  chemically treated genomic DNA (Homo sapiens) CpG-island No: 19953
tcgcgggggtcgagattaatgtttttattttttttttttttttaatatcgcgggggtcgagattaatgtttttattttttttttttttttaatatcgcgggggtcgagattaatgtttttatttttttttattttttaatatcgcgggggtcgagattaatgtttttattttttttttttttttaatatcgcgggggtcgagattaatgtttttattttttttttttttttaatatcgcgggggtcgagattaatgtttttattttttttttttttttaatatcgcgggggtcgagattaatgtttttatttttttttattttttaatatcgtaggggtcgagattaatgtttttattttttttttttttttaatatcgcgggggtcgagattaatgtttttattttttttttttttttaatatcgcgggggtcgagattaatgtttttattttttttttttttttaatatcgcgggggtcgagattaatgtttttattttttttttttttttaatatcgcgggggtcgagattaatgtttttagtttttagagtttttcgtcgtttagttattttttgat

SEQ ID NO: 19954 - DNA, 581 bp, Artificial Sequence
  chemically treated genomic DNA (Homo sapiens) CpG-island No: 19954
atcaaaaaataactaaacgacgaaaaactctaaaaactaaaaacattaatctcgacccccgcgatattaaaaaaaaaaaaaaaataaaaacattaatctcgacccccgcgatattaaaaaaaaaaaaaaaataaaaacattaatctcgacccccgcgatattaaaaaaaaaaaaaaaataaaaacattaatctcgacccccgcgatattaaaaaaaaaaaaaaaataaaaacattaatctcgacccctacgatattaaaaaataaaaaaaaataaaaacattaatctcgacccccgcgatattaaaaaaaaaaaaaaaataaaaacattaatctcgacccccgcgatattaaaaaaaaaaaaaaaataaaaacattaatctcgacccccgcgatattaaaaaaaaaaaaaaaataaaaacattaatctcgacccccgcgatattaaaaaataaaaaaaaataaaaacattaatctcgacccccgcgatattaaaaaaaaaaaaaaaataaaaacattaatctcgacccccgcgatattaaaaaaaaaaaaaaaataaaaacattaatctcgacccccgcga

SEQ ID NO: 19955 - DNA, 581 bp, Artificial Sequence
  chemically treated genomic DNA (Homo sapiens) CpG-island No: 19955
gttaggaagtggttgagcggcgggaagttttgggggttggaggtattggtttcggttttcgcgatgttggggaaaggaagagagtggaggtattggtttcggttttcgcgatgttggggaaaggaagagagtggaggtattggtttcggttttcgcgatgttggggaaaggaagagagtggaggtattggtttcggttttcgcgatgttggggaaaggaagagagtggaggtattggtttcggtttttgcgatgttggggaatggaagagagtggaggtattggtttcggttttcgcgatgttggggaaaggaagagagtggaggtattggtttcggttttcgcgatgttggggaaaggaagagagtggaggtattggtttcggttttcgcgatgttggggaaaggaagagagtggaggtattggtttcggttttcgcgatgttggggaatggaagagagtggaggtattggtttcggttttcgcgatgttggggaaaggaagagagtggaggtattggtttcggttttcgcgatgttggggaaaggaagagagtggaggtattggtttcggttttcgcga

SEQ ID NO: 19956 - DNA, 581 bp, Artificial Sequence
  chemically treated genomic DNA (Homo sapiens) CpG-island No: 19956
tcgcgaaaaccgaaaccaatacctccactctcttcctttccccaacatcgcgaaaaccgaaaccaatacctccactctcttcctttccccaacatcgcgaaaaccgaaaccaatacctccactctcttccattccccaacatcgcgaaaaccgaaaccaatacctccactctcttcctttccccaacatcgcgaaaaccgaaaccaatacctccactctcttcctttccccaacatcgcgaaaaccgaaaccaatacctccactctcttcctttccccaacatcgcgaaaaccgaaaccaatacctccactctcttccattccccaacatcgcaaaaaccgaaaccaatacctccactctcttcctttccccaacatcgcgaaaaccgaaaccaatacctccactctcttcctttccccaacatcgcgaaaaccgaaaccaatacctccactctcttcctttccccaacatcgcgaaaaccgaaaccaatacctccactctcttcctttccccaacatcgcgaaaaccgaaaccaatacctccaacccccaaaacttcccgccgctcaaccacttcctaac

SEQ ID NO: 19957 - DNA, 1549 bp, Artificial Sequence
  chemically treated genomic DNA (Homo sapiens) CpG-island No: 19957
ttgcgggttataggcggggaaggttgtttataagacggtcgtttttatttttttatcgttcgtttagggagaagtcggttacgcgtcgggtttttcggttaaggttataggggtcgcggtcgttgagttgtgcgaagttgtgtgtagtatatagtattcgggacggcgttgggtcggttaaataaaaatattcgtcgattttattaattatataattatttggcgatagatttttaaaaatagatacgggcggtcgcgttttttggggagacggggtcgtatttcgcggggtagggggtttcgttgttacggatttttagaattttcgcgttcgtttataagagtcgcgtttttcgtgaattgcgttttaatcgtgttattcgttttaaaaggttcggggaagtttcgcgttcgtcgcgaggcgtttttttgtaaacgttcggggaggtcgcggtgtcggtttttaagttcggtcgtcgtaggtcgcgcggtttttgggcgatttcggggcgcgtttttgtttatagggagttttcgttttggtagagttcggcgggtttgtttgttatataaggggcggttcggtcggttcggcggttgttcgaggttcgattcgattcgagcgcggatttcgggtaggcgttcgcggtttaggtcgtcgagatttatagttcgattcggtttttttcgatttttcggtttgatttattcggttttttcgttcggttttttcgttttttcgttcgttttttcggtcgttcggttcgattttttcggttttttcgttcggttttttcggtatttcgggttttcggttcgtagataatgcggagtcgtcgtcgtcgtcgtcgtcgttaaatatggcgtcggtattataatttcgagaggtcgggtcgaggcggcggcggcggtcgggcggttcgcgaggcggcggggaggttttttcggttaggttttcgtttatttattttcggggcgtcgcggtcgcgggagttcggtaagcgggcgggcgcgggggtcggcgcggtcgaggcggtgttaatggcgttcgcggttttttcgttaacggtcgcgtaggtcgggtttcgtcgtcgtttttgggcgcgggtttttttcggtcgcggcggtttcgggttcggtagcggcggtcgcggattttcgggtagcggttcgcgcggcgcgggttcgggttcggggtttagttggaggttcggttcggggggttcggtcggcgggcgcgggcgcgggcgcgggagcgggcggcgggcggcgggcgcgggacgcggggttggttcggattttagggtcgggtcgttcgttcgttttttagcgaagtaaataatgcggcgagcgtttcgttcggcgcgttgcgtgcgagacgcgtttcgttcgtcgtcgttatgacgcgcggatttcgttgtttcggtcgcgcgcgggggagggggcgtcgcgaggagcgggggttaaagggggttttgaggcggcggggatcgggttgggagtggggggtcgggaggatggagagtgggggtttttgagttagggagga

SEQ ID NO: 19958 - DNA, 1549 bp, Artificial Sequence
  chemically treated genomic DNA (Homo sapiens) CpG-island No: 19958
tcctccctaactcaaaaacccccactctccatcctcccgaccccccactcccaacccgatccccgccgcctcaaaaccccctttaacccccgctcctcgcgacgccccctcccccgcgcgcgaccgaaacaacgaaatccgcgcgtcataacgacgacgaacgaaacgcgtctcgcacgcaacgcgccgaacgaaacgctcgccgcattatttacttcgctaaaaaacgaacgaacgacccgaccctaaaatccgaaccaaccccgcgtcccgcgcccgccgcccgccgcccgctcccgcgcccgcgcccgcgcccgccgaccgaaccccccgaaccgaacctccaactaaaccccgaacccgaacccgcgccgcgcgaaccgctacccgaaaatccgcgaccgccgctaccgaacccgaaaccgccgcgaccgaaaaaaacccgcgcccaaaaacgacgacgaaacccgacctacgcgaccgttaacgaaaaaaccgcgaacgccattaacaccgcctcgaccgcgccgacccccgcgcccgcccgcttaccgaactcccgcgaccgcgacgccccgaaaataaataaacgaaaacctaaccgaaaaaacctccccgccgcctcgcgaaccgcccgaccgccgccgccgcctcgacccgacctctcgaaattataataccgacgccatatttaacgacgacgacgacgacgacgactccgcattatctacgaaccgaaaacccgaaataccgaaaaaaccgaacgaaaaaaccgaaaaaatcgaaccgaacgaccgaaaaaacgaacgaaaaaacgaaaaaaccgaacgaaaaaaccgaataaatcaaaccgaaaaatcgaaaaaaaccgaatcgaactataaatctcgacgacctaaaccgcgaacgcctacccgaaatccgcgctcgaatcgaatcgaacctcgaacaaccgccgaaccgaccgaaccgccccttatataacaaacaaacccgccgaactctaccaaaacgaaaactccctataaacaaaaacgcgccccgaaatcgcccaaaaaccgcgcgacctacgacgaccgaacttaaaaaccgacaccgcgacctccccgaacgtttacaaaaaaacgcctcgcgacgaacgcgaaacttccccgaaccttttaaaacgaataacacgattaaaacgcaattcacgaaaaacgcgactcttataaacgaacgcgaaaattctaaaaatccgtaacaacgaaaccccctaccccgcgaaatacgaccccgtctccccaaaaaacgcgaccgcccgtatctatttttaaaaatctatcgccaaataattatataattaataaaatcgacgaatatttttatttaaccgacccaacgccgtcccgaatactatatactacacacaacttcgcacaactcaacgaccgcgacccctataaccttaaccgaaaaacccgacgcgtaaccgacttctccctaaacgaacgataaaaaaataaaaacgaccgtcttataaacaaccttccccgcctataacccgcaa

SEQ ID NO: 19959 - DNA, 1549 bp, Artificial Sequence
  chemically treated genomic DNA (Homo sapiens) CpG-island No: 19959
ttttttttaatttaagggtttttattttttattttttcgattttttatttttagttcggttttcgtcgttttagggttttttttggttttcgtttttcgcggcgttttttttttcgcgcgcggtcgaggtagcggagttcgcgcgttatggcggcggcgggcggggcgcgtttcgtacgtagcgcgtcgggcggagcgttcgtcgtattgtttgtttcgttggggagcgagcgagcgattcggttttggagttcgagttagtttcgcgtttcgcgttcgtcgttcgtcgttcgttttcgcgttcgcgttcgcgttcgtcggtcgggtttttcgagtcgggtttttagttgggtttcgagttcgagttcgcgtcgcgcgagtcgttgttcgagagttcgcggtcgtcgttgtcgggttcggagtcgtcgcggtcgagaggggttcgcgtttaggagcggcggcggggttcggtttgcgcggtcgttggcggaggagtcgcgggcgttattagtatcgtttcggtcgcgtcggttttcgcgttcgttcgtttgtcgggttttcgcggtcgcggcgtttcgaaggtgagtgggcgggggtttggtcggggaggttttttcgtcgtttcgcgggtcgttcggtcgtcgtcgtcgtttcggttcggtttttcggggttgtggtgtcgacgttatgtttggcggcggcggcggcggcggcggtttcgtattgtttgcgggtcgggagttcgggatgtcggggaggtcgggcggggagatcggggaggtcgggtcgggcggtcggggagacgggcgggaagacggggaggtcgggcggggagatcgggtaggttaggtcggggagtcgagggaggtcgagtcgggttgtgggtttcggcggtttgggtcgcgggcgtttgttcggagttcgcgttcgagtcgggtcgggtttcgggtagtcgtcgagtcggtcgggtcgttttttatgtaatagataggttcgtcgagttttgttaagacgggaattttttgtgagtagggacgcgtttcgagatcgtttaggagtcgcgcggtttgcggcggtcgggtttgggaatcggtatcgcggttttttcgggcgtttgtagggagacgtttcgcgacgaacgcgaggttttttcgggttttttaaaacgagtgatacgattgaggcgtagtttacgggaaacgcggtttttgtgagcggacgcgggagttttgagaattcgtagtagcgggattttttgtttcgcggggtgcggtttcgtttttttagaaagcgcggtcgttcgtgtttgtttttgagggtttgtcgttaggtggttgtgtagttagtggaatcggcggatgtttttgtttggtcggtttagcgtcgtttcgagtgttgtgtgttgtatataatttcgtatagtttagcggtcgcggtttttgtggttttgatcgagaggttcggcgcgtggtcggtttttttttgggcgggcggtgggaagatggaagcggtcgttttgtgggtagtttttttcgtttgtggttcgtag

SEQ ID NO: 19960 - DNA, 1549 bp, Artificial Sequence
  chemically treated genomic DNA (Homo sapiens) CpG-island No: 19960
ctacgaaccacaaacgaaaaaaactacccacaaaacgaccgcttccatcttcccaccgcccgcccaaaaaaaaaccgaccacgcgccgaacctctcgatcaaaaccacaaaaaccgcgaccgctaaactatacgaaattatatacaacacacaacactcgaaacgacgctaaaccgaccaaacaaaaacatccgccgattccactaactacacaaccacctaacgacaaaccctcaaaaacaaacacgaacgaccgcgctttctaaaaaaacgaaaccgcaccccgcgaaacaaaaaatcccgctactacgaattctcaaaactcccgcgtccgctcacaaaaaccgcgtttcccgtaaactacgcctcaatcgtatcactcgttttaaaaaacccgaaaaaacctcgcgttcgtcgcgaaacgtctccctacaaacgcccgaaaaaaccgcgataccgattcccaaacccgaccgccgcaaaccgcgcgactcctaaacgatctcgaaacgcgtccctactcacaaaaaattcccgtcttaacaaaactcgacgaacctatctattacataaaaaacgacccgaccgactcgacgactacccgaaacccgacccgactcgaacgcgaactccgaacaaacgcccgcgacccaaaccgccgaaacccacaacccgactcgacctccctcgactccccgacctaacctacccgatctccccgcccgacctccccgtcttcccgcccgtctccccgaccgcccgacccgacctccccgatctccccgcccgacctccccgacatcccgaactcccgacccgcaaacaatacgaaaccgccgccgccgccgccgccgccaaacataacgtcgacaccacaaccccgaaaaaccgaaccgaaacgacgacgacgaccgaacgacccgcgaaacgacgaaaaaacctccccgaccaaacccccgcccactcaccttcgaaacgccgcgaccgcgaaaacccgacaaacgaacgaacgcgaaaaccgacgcgaccgaaacgatactaataacgcccgcgactcctccgccaacgaccgcgcaaaccgaaccccgccgccgctcctaaacgcgaacccctctcgaccgcgacgactccgaacccgacaacgacgaccgcgaactctcgaacaacgactcgcgcgacgcgaactcgaactcgaaacccaactaaaaacccgactcgaaaaacccgaccgacgaacgcgaacgcgaacgcgaaaacgaacgacgaacgacgaacgcgaaacgcgaaactaactcgaactccaaaaccgaatcgctcgctcgctccccaacgaaacaaacaatacgacgaacgctccgcccgacgcgctacgtacgaaacgcgccccgcccgccgccgccataacgcgcgaactccgctacctcgaccgcgcgcgaaaaaaaaaacgccgcgaaaaacgaaaaccaaaaaaaaccctaaaacgacgaaaaccgaactaaaaataaaaaatcgaaaaaataaaaaataaaaacccttaaattaaaaaaaa

SEQ ID NO: 19961 - DNA, 714 bp, Artificial Sequence
  chemically treated genomic DNA (Homo sapiens) CpG-island No: 19961
cgggggcggttgcgggtttcggcgaggcggtcggtcgtggggttggcggtttacggggcgtagagtagcgttcgggcgggatgcgtcggaggggttttaggtcgggttagggggcgggcgggtgggggtttgcgtcgttcgttaagggtcgggttttggagtggttttaaggcgcgagtcggtttggcggggaataaggggcggttacggtcggcgttagaggacgttcggattgaggggcgcggattcgtagtttagaggtagggggtgtggggcggcgttattttagtggaggggcgtcgtacgttcgggaatcgaatcgcggtagttaagcgaagttttcggcgttgattcgggtttcgtttcggcgattattgtttttcgtggcggaggtcgttttatcgtttattttttcgttttatggtgagatcggtaatcgttaggcgtttgcgtattcgagtggcggcgattttcgttttcgtcgcggtttaaaatcgagttcgtttatatttcgtttttagtttcgttttattttcgttttacgatgtcgcgcgtttgcgcgttgggcgcggagtttattatttgttttcgaggagggggcggtaaggagagggagggggcgtagcggggaggaacgtcggggtgaacgttgaaggagtgttagagatttaagtttggaaatttggtaaggttagttttgttttatttgtttag

SEQ ID NO: 19962 - DNA, 714 bp, Artificial Sequence
  chemically treated genomic DNA (Homo sapiens) CpG-island No: 19962
ctaaacaaataaaacaaaactaaccttaccaaatttccaaacttaaatctctaacactccttcaacgttcaccccgacgttcctccccgctacgccccctccctctccttaccgccccctcctcgaaaacaaataataaactccgcgcccaacgcgcaaacgcgcgacatcgtaaaacgaaaataaaacgaaactaaaaacgaaatataaacgaactcgattttaaaccgcgacgaaaacgaaaatcgccgccactcgaatacgcaaacgcctaacgattaccgatctcaccataaaacgaaaaaataaacgataaaacgacctccgccacgaaaaacaataatcgccgaaacgaaacccgaatcaacgccgaaaacttcgcttaactaccgcgattcgattcccgaacgtacgacgcccctccactaaaataacgccgccccacaccccctacctctaaactacgaatccgcgcccctcaatccgaacgtcctctaacgccgaccgtaaccgccccttattccccgccaaaccgactcgcgccttaaaaccactccaaaacccgacccttaacgaacgacgcaaacccccacccgcccgccccctaacccgacctaaaacccctccgacgcatcccgcccgaacgctactctacgccccgtaaaccgccaaccccacgaccgaccgcctcgccgaaacccgcaaccgcccccg

SEQ ID NO: 19963 - DNA, 714 bp, Artificial Sequence
  chemically treated genomic DNA (Homo sapiens) CpG-island No: 19963
ttaaataaatagaataaaattaattttgttaggtttttaagtttggatttttaatatttttttaacgtttatttcggcgttttttttcgttgcgttttttttttttttttgtcgtttttttttcgggagtaggtggtaggtttcgcgtttaacgcgtaagcgcgcggtatcgtggggcgggggtggggcgggattgagggcggagtgtgagcgggttcggttttgggtcgcggcgggagcgggagtcgtcgttattcgagtgcgtaggcgtttggcgattatcggttttattatggagcggaaaggtgagcggtggagcggttttcgttacgaggggtaatggtcgtcggggcgaggttcgggttagcgtcgggagtttcgtttaattgtcgcggttcggttttcggacgtgcggcgtttttttattgaggtggcgtcgttttatattttttgtttttgggttgcgggttcgcgttttttagttcgggcgttttttggcgtcggtcgtagtcgttttttgtttttcgttaggtcggttcgcgttttggggttattttagggttcggtttttggcgggcgacgtagatttttattcgttcgttttttgattcggtttgagattttttcggcgtatttcgttcgggcgttgttttgcgtttcgtgggtcgttagttttacggtcggtcgtttcgtcggagttcgtagtcgttttcg

SEQ ID NO: 19964 - DNA, 714 bp, Artificial Sequence
  chemically treated genomic DNA (Homo sapiens) CpG-island No: 19964
cgaaaacgactacgaactccgacgaaacgaccgaccgtaaaactaacgacccacgaaacgcaaaacaacgcccgaacgaaatacgccgaaaaaatctcaaaccgaatcaaaaaacgaacgaataaaaatctacgtcgcccgccaaaaaccgaaccctaaaataaccccaaaacgcgaaccgacctaacgaaaaacaaaaaacgactacgaccgacgccaaaaaacgcccgaactaaaaaacgcgaacccgcaacccaaaaacaaaaaatataaaacgacgccacctcaataaaaaaacgccgcacgtccgaaaaccgaaccgcgacaattaaacgaaactcccgacgctaacccgaacctcgccccgacgaccattacccctcgtaacgaaaaccgctccaccgctcacctttccgctccataataaaaccgataatcgccaaacgcctacgcactcgaataacgacgactcccgctcccgccgcgacccaaaaccgaacccgctcacactccgccctcaatcccgccccacccccgccccacgataccgcgcgcttacgcgttaaacgcgaaacctaccacctactcccgaaaaaaaaacgacaaaaaaaaaaaaaaaacgcaacgaaaaaaaacgccgaaataaacgttaaaaaaatattaaaaatccaaacttaaaaacctaacaaaattaattttattctatttatttaa

SEQ ID NO: 19965 - DNA, 645 bp, Artificial Sequence
  chemically treated genomic DNA (Homo sapiens) CpG-island No: 19965
ggatcgcgtttttttttcggttttggttttagtcgagtttttcggacgtagagatggaaatttcgaagttgttttcggttcgcgggatattatagggcggcggcggcggcggtattttcgcgggtggcggtcgagtttatcgaggttttgattcgtcggttggttaggtttttacgcgtcgttttttgttgtttcggggtttttaagatggcgggttcgggcggcggcgcgaggaggttagtacggtattacggggttttggtttaagtttgttggcgtcgaggatcgattaatttagcggcggcggcggcggcggcggcgacgatttttttttggtgttgtttgattcggtgggtggcgacgtggagatcgcgggtttcggttaggtcgtagggtttgtgttgagggaggaggtcgaggagggttcggggttttaggggggcgagagcggcgcgaatttcgcggggtttattgcgttaggttttcgttgtttgttcgcggtttttatttcggtttcgattttcgttttcggtttcgtcgcggttttcgcgggtatagttattatttataattaggatttgttgttgcgttttgagaacggcgtttttattttggttacgtttttattatacgtttgggagttag

SEQ ID NO: 19966 - DNA, 645 bp, Artificial Sequence
  chemically treated genomic DNA (Homo sapiens) CpG-island No: 19966
ctaactcccaaacgtataataaaaacgtaaccaaaataaaaacgccgttctcaaaacgcaacaacaaatcctaattataaataataactatacccgcgaaaaccgcgacgaaaccgaaaacgaaaatcgaaaccgaaataaaaaccgcgaacaaacaacgaaaacctaacgcaataaaccccgcgaaattcgcgccgctctcgcccccctaaaaccccgaaccctcctcgacctcctccctcaacacaaaccctacgacctaaccgaaacccgcgatctccacgtcgccacccaccgaatcaaacaacaccaaaaaaaaatcgtcgccgccgccgccgccgccgccgctaaattaatcgatcctcgacgccaacaaacttaaaccaaaaccccgtaataccgtactaacctcctcgcgccgccgcccgaacccgccatcttaaaaaccccgaaacaacaaaaaacgacgcgtaaaaacctaaccaaccgacgaatcaaaacctcgataaactcgaccgccacccgcgaaaataccgccgccgccgccgccctataatatcccgcgaaccgaaaacaacttcgaaatttccatctctacgtccgaaaaactcgactaaaaccaaaaccgaaaaaaaaacgcgatcc

SEQ ID NO: 19967 - DNA, 645 bp, Artificial Sequence
  chemically treated genomic DNA (Homo sapiens) CpG-island No: 19967
ttggtttttaggcgtgtggtgggggcgtggttagggtgaggacgtcgtttttaaagcgtaatagtaggttttggttgtggatagtgattgtgttcgcgaaggtcgcggcggggtcgggggcggagatcggggtcggagtgggaatcgcggataggtagcgggggtttagcgtagtgggtttcgcgggattcgcgtcgttttcgtttttttggagtttcgggtttttttcggtttttttttttaatataggttttgcggtttgatcggagttcgcggtttttacgtcgttatttatcgggttaagtagtattaggaagaagtcgtcgtcgtcgtcgtcgtcgtcgtcgttaggttgatcggttttcggcgttaataggtttgggttagggtttcgtgatgtcgtgttggttttttcgcgtcgtcgttcgggttcgttattttgggggtttcggagtagtaggaggcggcgcgtggggatttggttagtcggcgagttagggtttcggtggattcggtcgttattcgcggggatatcgtcgtcgtcgtcgttttgtagtgtttcgcgagtcgggagtagtttcgggatttttatttttgcgttcgagaggttcggttggaattagagtcgaggaggaggcgcgattt

SEQ ID NO: 19968 - DNA, 645 bp, Artificial Sequence
  chemically treated genomic DNA (Homo sapiens) CpG-island No: 19968
aaatcgcgcctcctcctcgactctaattccaaccgaacctctcgaacgcaaaaataaaaatcccgaaactactcccgactcgcgaaacactacaaaacgacgacgacgacgatatccccgcgaataacgaccgaatccaccgaaaccctaactcgccgactaaccaaatccccacgcgccgcctcctactactccgaaacccccaaaataacgaacccgaacgacgacgcgaaaaaaccaacacgacatcacgaaaccctaacccaaacctattaacgccgaaaaccgatcaacctaacgacgacgacgacgacgacgacgacgacttcttcctaatactacttaacccgataaataacgacgtaaaaaccgcgaactccgatcaaaccgcaaaacctatattaaaaaaaaaaaccgaaaaaaacccgaaactccaaaaaaacgaaaacgacgcgaatcccgcgaaacccactacgctaaacccccgctacctatccgcgattcccactccgaccccgatctccgcccccgaccccgccgcgaccttcgcgaacacaatcactatccacaaccaaaacctactattacgctttaaaaacgacgtcctcaccctaaccacgcccccaccacacgcctaaaaaccaa

SEQ ID NO: 19969 - DNA, 525 bp, Artificial Sequence
  chemically treated genomic DNA (Homo sapiens) CpG-island No: 19969
agggggttcgcggcggcgggcgggtatttggttgatcgcggcgtgtttttttagtgttaggttttagaagtagtagtcgatttggttttcgtattggtcgattgcgatcggaggagaggaaggaaagagaataggatattaagtaggaaatatggtcgttggatttcgcggcgattaggtttttattcgttcggcgtagtttattttgtacgattatcgattgggttatggtggtgcgtcgtcggtttcgggagtttgttagttcgcggtcgtttttgtatttttttagtaacggcgttttgttagagagttgtcgtaagttacgttattgtcgtaagtttttgtcgtcgttaagtacgtttgtaggtttaggttaaggtttttcgttagaaggtcgcgtaagtgtatttgcgtgttatcgttatcgtagcgattgggtttttggattgtatattttagttgttttgttaatattttcgagtatcggtagtttcggaggtcggggtaattggtaggtaattaggt

SEQ ID NO: 19970 - DNA, 525 bp, Artificial Sequence
  chemically treated genomic DNA (Homo sapiens) CpG-island No: 19970
acctaattacctaccaattaccccgacctccgaaactaccgatactcgaaaatattaacaaaacaactaaaatatacaatccaaaaacccaatcgctacgataacgataacacgcaaatacacttacgcgaccttctaacgaaaaaccttaacctaaacctacaaacgtacttaacgacgacaaaaacttacgacaataacgtaacttacgacaactctctaacaaaacgccgttactaaaaaaatacaaaaacgaccgcgaactaacaaactcccgaaaccgacgacgcaccaccataacccaatcgataatcgtacaaaataaactacgccgaacgaataaaaacctaatcgccgcgaaatccaacgaccatatttcctacttaatatcctattctctttccttcctctcctccgatcgcaatcgaccaatacgaaaaccaaatcgactactacttctaaaacctaacactaaaaaaacacgccgcgatcaaccaaatacccgcccgccgccgcgaaccccct

SEQ ID NO: 19971 - DNA, 525 bp, Artificial Sequence
  chemically treated genomic DNA (Homo sapiens) CpG-island No: 19971
gtttagttatttgttagttatttcggttttcggagttgtcgatgttcgaagatgttgataaggtagttaggatatatagtttagaagtttagtcgttacggtaacggtgatacgtaagtgtatttgcgcggttttttgacggaaaattttagtttgaatttatagacgtgtttagcgacggtagaggtttgcggtagtagcgtgatttacggtagttttttagtagagcgtcgttgttgggggaatgtagaagcggtcgcgggttagtaagttttcggagtcggcggcgtattattatgatttagtcggtggtcgtatagggtaagttacgtcgggcgggtagagatttggtcgtcgcggaatttagcggttatgttttttgtttaatgttttatttttttttttttttttttttcggtcgtagtcggttagtgcggaaattagatcggttgttgtttttgggatttggtattaagggagtacgtcgcggttaattaggtattcgttcgtcgtcgcgagtttttt

SEQ ID NO: 19972 - DNA, 525 bp, Artificial Sequence
  chemically treated genomic DNA (Homo sapiens) CpG-island No: 19972
aaaaaactcgcgacgacgaacgaatacctaattaaccgcgacgtactcccttaataccaaatcccaaaaacaacaaccgatctaatttccgcactaaccgactacgaccgaaaaaaaaaaaaaaaaaaaaataaaacattaaacaaaaaacataaccgctaaattccgcgacgaccaaatctctacccgcccgacgtaacttaccctatacgaccaccgactaaatcataataatacgccgccgactccgaaaacttactaacccgcgaccgcttctacattcccccaacaacgacgctctactaaaaaactaccgtaaatcacgctactaccgcaaacctctaccgtcgctaaacacgtctataaattcaaactaaaattttccgtcaaaaaaccgcgcaaatacacttacgtatcaccgttaccgtaacgactaaacttctaaactatatatcctaactaccttatcaacatcttcgaacatcgacaactccgaaaaccgaaataactaacaaataactaaac

SEQ ID NO: 19973 - DNA, 1162 bp, Artificial Sequence
  chemically treated genomic DNA (Homo sapiens) CpG-island No: 19973
ttcgttttatacggtgatttcggttttgttattggtttttaggtatcgggattcgcggttcgcgttgtcgtaaaggtcggggagttgcgggttgaaggttttaggtatttttatattgaattggcgtcgggtcgcgtgttcgggtcgtcggggtatttggaaggttcgagtcgtcgggtggttgagcggggcgggtcgggtcgggcgattggaggtttaggcggtataggggttcggcgcggtagggggcgcgtagatcggcggggtttaggggtaggcgtttagcggcgtaggtaagttcggggatggtcgcggagttcgcgtcgggggttgtcgcggggacggttcgagggcggggaaacgttgatagaagtttcgcggggcggtttttgcggggatagggtagggaagagtgacgtcgcgtcgagtatttaagtttaggattggataaggggtttcggtcggggattgggacggggatcgggtcggggcgggtcgggggcggggttcgttggggcgagggagtcgattggtcgagcggcgggcgcgcggaattgggaatttggcgtttggagttgcggtttcgcgtttcgtagttcgggagttcgtgcgtttaggtgttttgacgttgttcgtattcgttatttatttgcggttttgagcgcggcggttttgaacgtggcgtatttggcgtagtttggttgtagcgttaggttgtcgtcgttttgtagtcgcgggtcgcgcgggggtttcggggcggtcgattttcggggcgcgttgttgaggcgttttttgtttggagcgaggagtgagacgcggttcggttcgatgtttcggtttatttcgttttcgttgttattttttcgtagtttttttttcgaggtcgttcggtgagaatttgggggatcgtttttcgggcgaggttgcgagttaagtttgttttcgtcgtagtttttagcgtttggaatagggtttggtttcgagttacgcgtagcggcggcggtagttagttcggggggtgttatttttatgaacggttcgttcggaggcgacgttcgagttaggcgcggagttttgggatttgttttcgtcgagacgggggatgtttgaggaatagaatttagacggggcgtgggggttgttaagtttgtttgtttttcga

SEQ ID NO: 19974 - DNA, 1162 bp, Artificial Sequence
  chemically treated genomic DNA (Homo sapiens) CpG-island No: 19974
tcgaaaaacaaacaaacttaacaacccccacgccccgtctaaattctattcctcaaacatcccccgtctcgacgaaaacaaatcccaaaactccgcgcctaactcgaacgtcgcctccgaacgaaccgttcataaaaataacaccccccgaactaactaccgccgccgctacgcgtaactcgaaaccaaaccctattccaaacgctaaaaactacgacgaaaacaaacttaactcgcaacctcgcccgaaaaacgatcccccaaattctcaccgaacgacctcgaaaaaaaaactacgaaaaaataacaacgaaaacgaaataaaccgaaacatcgaaccgaaccgcgtctcactcctcgctccaaacaaaaaacgcctcaacaacgcgccccgaaaatcgaccgccccgaaacccccgcgcgacccgcgactacaaaacgacgacaacctaacgctacaaccaaactacgccaaatacgccacgttcaaaaccgccgcgctcaaaaccgcaaataaataacgaatacgaacaacgtcaaaacacctaaacgcacgaactcccgaactacgaaacgcgaaaccgcaactccaaacgccaaattcccaattccgcgcgcccgccgctcgaccaatcgactccctcgccccaacgaaccccgcccccgacccgccccgacccgatccccgtcccaatccccgaccgaaaccccttatccaatcctaaacttaaatactcgacgcgacgtcactcttccctaccctatccccgcaaaaaccgccccgcgaaacttctatcaacgtttccccgccctcgaaccgtccccgcgacaacccccgacgcgaactccgcgaccatccccgaacttacctacgccgctaaacgcctacccctaaaccccgccgatctacgcgccccctaccgcgccgaacccctataccgcctaaacctccaatcgcccgacccgacccgccccgctcaaccacccgacgactcgaaccttccaaataccccgacgacccgaacacgcgacccgacgccaattcaatataaaaatacctaaaaccttcaacccgcaactccccgacctttacgacaacgcgaaccgcgaatcccgatacctaaaaaccaataacaaaaccgaaatcaccgtataaaacgaa

SEQ ID NO: 19975 - DNA, 1162 bp, Artificial Sequence
  chemically treated genomic DNA (Homo sapiens) CpG-island No: 19975
tcgagaggtaggtaggtttggtagtttttacgtttcgtttgggttttgttttttagatatttttcgtttcggcgggagtaggttttaggatttcgcgtttggttcgagcgtcgttttcgggcgagtcgtttatgagggtggtatttttcgggttggttgtcgtcgtcgttgcgcgtgattcggagttaggttttgttttaggcgttggaggttgcggcgaagataggtttggttcgtagtttcgttcggagaacggttttttaggtttttatcgaacggtttcggggagaggattacggagaggtgatagcgagggcggagtgaatcggggtatcggatcgagtcgcgttttatttttcgttttagataagaagcgttttaataacgcgtttcgggggtcggtcgtttcggggttttcgcgcggttcgcggttgtagggcggcggtagtttgacgttgtagttagattacgttaagtacgttacgtttaaggtcgtcgcgtttaaggtcgtaggtgagtggcgggtgcgggtagcgttagggtatttgggcgtacgagttttcggattgcgaagcgcggggtcgtagttttaagcgttaaatttttagtttcgcgcgttcgtcgttcggttaatcggttttttcgttttagcgggtttcgttttcggttcgtttcggttcggttttcgttttagttttcggtcgggattttttgtttagttttgagtttgggtgttcggcgcggcgttatttttttttgttttgttttcgtagaggtcgtttcgcgggatttttgttagcgttttttcgttttcgagtcgttttcgcggtaattttcggcgcgggtttcgcgattattttcggatttgtttgcgtcgttggacgtttgtttttgggtttcgtcggtttacgcgttttttgtcgcgtcgggtttttatgtcgtttggatttttagtcgttcggttcggttcgtttcgtttagttattcgacggttcgggttttttaggtatttcggcgattcgggtacgcggttcggcgttagtttagtgtgaagatgtttgagatttttaattcgtagtttttcggtttttacggtagcgcgggtcgcgggtttcggtatttaaggattaatagtaagatcgaggttatcgtgtgaagcggg

SEQ ID NO: 19976 - DNA, 1162 bp, Artificial Sequence
  chemically treated genomic DNA (Homo sapiens) CpG-island No: 19976
cccgcttcacacgataacctcgatcttactattaatccttaaataccgaaacccgcgacccgcgctaccgtaaaaaccgaaaaactacgaattaaaaatctcaaacatcttcacactaaactaacgccgaaccgcgtacccgaatcgccgaaatacctaaaaaacccgaaccgtcgaataactaaacgaaacgaaccgaaccgaacgactaaaaatccaaacgacataaaaacccgacgcgacaaaaaacgcgtaaaccgacgaaacccaaaaacaaacgtccaacgacgcaaacaaatccgaaaataatcgcgaaacccgcgccgaaaattaccgcgaaaacgactcgaaaacgaaaaaacgctaacaaaaatcccgcgaaacgacctctacgaaaacaaaacaaaaaaaaataacgccgcgccgaacacccaaactcaaaactaaacaaaaaatcccgaccgaaaactaaaacgaaaaccgaaccgaaacgaaccgaaaacgaaacccgctaaaacgaaaaaaccgattaaccgaacgacgaacgcgcgaaactaaaaatttaacgcttaaaactacgaccccgcgcttcgcaatccgaaaactcgtacgcccaaataccctaacgctacccgcacccgccactcacctacgaccttaaacgcgacgaccttaaacgtaacgtacttaacgtaatctaactacaacgtcaaactaccgccgccctacaaccgcgaaccgcgcgaaaaccccgaaacgaccgacccccgaaacgcgttattaaaacgcttcttatctaaaacgaaaaataaaacgcgactcgatccgataccccgattcactccgccctcgctatcacctctccgtaatcctctccccgaaaccgttcgataaaaacctaaaaaaccgttctccgaacgaaactacgaaccaaacctatcttcgccgcaacctccaacgcctaaaacaaaacctaactccgaatcacgcgcaacgacgacgacaaccaacccgaaaaataccaccctcataaacgactcgcccgaaaacgacgctcgaaccaaacgcgaaatcctaaaacctactcccgccgaaacgaaaaatatctaaaaaacaaaacccaaacgaaacgtaaaaactaccaaacctacctacctctcga

SEQ ID NO: 19977 - DNA, 1402 bp, Artificial Sequence
  chemically treated genomic DNA (Homo sapiens) CpG-island No: 19977
cggcgggaaggattagcgggtagggagagtagttcgaggagtaggcgggggtttttgggcggcgcgtgtttatttggttattgtgcgtcgcgcgcgcgggttgtgcgttttttttagttttaggcgcgtttcgatgtcggttagtattagtagcgttgcgacgtcgtatatagcgtagacggtcgtatggttgcgttcgcggtcggggtttcggggcgttgcggtgtcgcgggcgcgggcgggcggtcggtttgtttggatttaggtcggcgtgtcgtagttggaatagcggttttggtcgaggcgtcgcggttcgtcgtggtagtagaagcggtagtcgtacgtgtcgtagtagaagttgtaggtttcggagttgtagttgaagggcgggttttattggtttattacgtcgtagtagtcgcggtagcggtcgttttttttcggggttgtcgtgtcgggcgtcgcgggattttgcgtttcgggggttttcgcgcggttcgacggcggtcgcgttagtagtaacgcgagtcgaagcgcgagcgcgagtcggaggtcgggaggacggcggtcgtcgagtagttttcgcgtttcggttcgcgttatcgggttcgcgtttttcgttattgcgttcggtgtatggtcgggcgtcgcggtttttttcggttcggttttttcgttttcgtagggatcgcgttggttttcggcgtacgtcgtttcggtcgtcggttttttttggggattttagtttcgagtgggttgggtttggagtttcgaggtcgtattttcggtgggcgcgtttttcgttcgggtttatttcggattcgagttgttcggttcgcgttttgagatttttttcgggtcgggcggcgggttttcgtttgcgcgcggttttcggttttttttcggttcggtaggtgtgcgggttttggttttagcggaggtcgcgtcggggtcgcgggtcgttcgattgcgttattttttcgtcgcgtttttagtatagttcgcgttttggtttcggtttcggtttcggttttcgttcgggttcggcgcgggttcgggcgggcgggggagggagagaggagggagggcggaagggaggtagagtcgggggaggagcgcggttgtcgcgaggggcgagaggaggtagtaggtttcgcggagtcgggaggttttatagggaatttttttttataaagattgtttcgaaatatttatcggaattgggcgttcgaaggggattagttttagggttcgcgattagagcgtttttgttttataggtgcggggatttgtattttataggcgcggaggttaaagtagttcggaattgtttcgggacgggtagggttatttttttatttttttttcgttttttttgttcgttttgattataatataagga

SEQ ID NO: 19978 - DNA, 1402 bp, Artificial Sequence
  chemically treated genomic DNA (Homo sapiens) CpG-island No: 19978
tccttatattataatcaaaacgaacaaaaaaaacgaaaaaaaaataaaaaaataaccctacccgtcccgaaacaattccgaactactttaacctccgcgcctataaaatacaaatccccgcacctataaaacaaaaacgctctaatcgcgaaccctaaaactaatccccttcgaacgcccaattccgataaatatttcgaaacaatctttataaaaaaaaattccctataaaacctcccgactccgcgaaacctactacctcctctcgcccctcgcgacaaccgcgctcctcccccgactctacctcccttccgccctccctcctctctccctcccccgcccgcccgaacccgcgccgaacccgaacgaaaaccgaaaccgaaaccgaaaccaaaacgcgaactatactaaaaacgcgacgaaaaaataacgcaatcgaacgacccgcgaccccgacgcgacctccgctaaaaccaaaacccgcacacctaccgaaccgaaaaaaaaccgaaaaccgcgcgcaaacgaaaacccgccgcccgacccgaaaaaaatctcaaaacgcgaaccgaacaactcgaatccgaaataaacccgaacgaaaaacgcgcccaccgaaaatacgacctcgaaactccaaacccaacccactcgaaactaaaatccccaaaaaaaaccgacgaccgaaacgacgtacgccgaaaaccaacgcgatccctacgaaaacgaaaaaaccgaaccgaaaaaaaccgcgacgcccgaccatacaccgaacgcaataacgaaaaacgcgaacccgataacgcgaaccgaaacgcgaaaactactcgacgaccgccgtcctcccgacctccgactcgcgctcgcgcttcgactcgcgttactactaacgcgaccgccgtcgaaccgcgcgaaaacccccgaaacgcaaaatcccgcgacgcccgacacgacaaccccgaaaaaaaacgaccgctaccgcgactactacgacgtaataaaccaataaaacccgcccttcaactacaactccgaaacctacaacttctactacgacacgtacgactaccgcttctactaccacgacgaaccgcgacgcctcgaccaaaaccgctattccaactacgacacgccgacctaaatccaaacaaaccgaccgcccgcccgcgcccgcgacaccgcaacgccccgaaaccccgaccgcgaacgcaaccatacgaccgtctacgctatatacgacgtcgcaacgctactaatactaaccgacatcgaaacgcgcctaaaactaaaaaaaacgcacaacccgcgcgcgcgacgcacaataaccaaataaacacgcgccgcccaaaaacccccgcctactcctcgaactactctccctacccgctaatccttcccgccg

SEQ ID NO: 19979 - DNA, 1402 bp, Artificial Sequence
  chemically treated genomic DNA (Homo sapiens) CpG-island No: 19979
tttttatgttatgattagaacggatagaggggacgggaaggaggtgagagggtggttttgttcgtttcggggtaatttcgggttgttttgattttcgcgtttgtaaggtataggttttcgtatttgtaagatagggacgttttagtcgcgggttttagaattgatttttttcgagcgtttagtttcgatgaatgtttcggggtagtttttgtggaggggggttttttgtggggtttttcggtttcgcggggtttgttgttttttttcgtttttcgcggtagtcgcgtttttttttcggttttgtttttttttcgtttttttttttttttttttttttcgttcgttcgagttcgcgtcgagttcgagcgggagtcggagtcggagtcggagttagagcgcgggttgtattgagagcgcggcgggaaggtagcgtagtcgggcggttcgcggtttcggcgcggttttcgttagggttaagattcgtatatttgtcgggtcggggagaagtcgggggtcgcgcgtaggcgaggattcgtcgttcggttcggggaagattttaggacgcggatcgggtagttcgggttcgaggtgagttcgggcggaggacgcgtttatcggaggtgcggtttcggagttttagatttagtttattcggggttggggtttttagaggaggtcgacggtcgaggcggcgtgcgtcgggagttagcgcgatttttgcgggagcggaggagtcgagtcggagggagtcgcggcgttcggttatgtatcgggcgtagtagcgggaggcgcgggttcgatggcgcgggtcggggcgcggggattgttcggcggtcgtcgttttttcggttttcggttcgcgttcgcgtttcggttcgcgttgttgttggcgcggtcgtcgtcgggtcgcgcgggagttttcgaggcgtagggtttcgcggcgttcggtacgatagtttcggaggggggcgatcgttgtcgcggttattacgacgtgatgggttagtgggattcgttttttaattgtagtttcggagtttatagtttttgttgcggtacgtgcggttatcgtttttgttgttacgacgggtcgcggcgtttcgattagagtcgttgttttaattacgatacgtcggtttgggtttagataggtcggtcgttcgttcgcgttcgcgatatcgtagcgtttcgggatttcggtcgcgagcgtagttatacggtcgtttacgttgtgtgcggcgtcgtagcgttgttggtgttggtcggtatcggggcgcgtttgggattggagagggcgtatagttcgcgcgcgcggcgtatagtgattaggtgagtacgcgtcgtttagggattttcgtttgtttttcggattgttttttttgttcgttgatttttttcgtcg

SEQ ID NO: 19980 - DNA, 1402 bp, Artificial Sequence
  chemically treated genomic DNA (Homo sapiens) CpG-island No: 19980
cgacgaaaaaaatcaacgaacaaaaaaaacaatccgaaaaacaaacgaaaatccctaaacgacgcgtactcacctaatcactatacgccgcgcgcgcgaactatacgccctctccaatcccaaacgcgccccgataccgaccaacaccaacaacgctacgacgccgcacacaacgtaaacgaccgtataactacgctcgcgaccgaaatcccgaaacgctacgatatcgcgaacgcgaacgaacgaccgacctatctaaacccaaaccgacgtatcgtaattaaaacaacgactctaatcgaaacgccgcgacccgtcgtaacaacaaaaacgataaccgcacgtaccgcaacaaaaactataaactccgaaactacaattaaaaaacgaatcccactaacccatcacgtcgtaataaccgcgacaacgatcgcccccctccgaaactatcgtaccgaacgccgcgaaaccctacgcctcgaaaactcccgcgcgacccgacgacgaccgcgccaacaacaacgcgaaccgaaacgcgaacgcgaaccgaaaaccgaaaaaacgacgaccgccgaacaatccccgcgccccgacccgcgccatcgaacccgcgcctcccgctactacgcccgatacataaccgaacgccgcgactccctccgactcgactcctccgctcccgcaaaaatcgcgctaactcccgacgcacgccgcctcgaccgtcgacctcctctaaaaaccccaaccccgaataaactaaatctaaaactccgaaaccgcacctccgataaacgcgtcctccgcccgaactcacctcgaacccgaactacccgatccgcgtcctaaaatcttccccgaaccgaacgacgaatcctcgcctacgcgcgacccccgacttctccccgacccgacaaatatacgaatcttaaccctaacgaaaaccgcgccgaaaccgcgaaccgcccgactacgctaccttcccgccgcgctctcaatacaacccgcgctctaactccgactccgactccgactcccgctcgaactcgacgcgaactcgaacgaacgaaaaaaaaaaaaaaaaaaaaaaacgaaaaaaaaacaaaaccgaaaaaaaaacgcgactaccgcgaaaaacgaaaaaaaacaacaaaccccgcgaaaccgaaaaaccccacaaaaaacccccctccacaaaaactaccccgaaacattcatcgaaactaaacgctcgaaaaaaatcaattctaaaacccgcgactaaaacgtccctatcttacaaatacgaaaacctataccttacaaacgcgaaaatcaaaacaacccgaaattaccccgaaacgaacaaaaccaccctctcacctccttcccgtcccctctatccgttctaatcataacataaaaa

SEQ ID NO: 19981 - DNA, 680 bp, Artificial Sequence
  chemically treated genomic DNA (Homo sapiens) CpG-island No: 19981
ttcggcgggggtttttattttgatttcgtttcgtttttcgggtattgttttattacgtgattcggtttcgtttttttttttttttttttttacgttataattttcgtttttttttttagaatcgcgttttatagttcggcgtaggtttcgtttttttttatttacggggcggtaggaggttcgaagtaagatggcggtgaattagagttatatcgagaatcgtcgcggagtttttatttttaacggtgaaaggtgtttgaggggaagtacggcgtgttgtcggaggagaggagacgaatgagatagatatggcggttcgtaaatttttagcgagttagggattttgtcgttttttttgggcgcggcgtttttagtttcgttttcgatttttgggagcgcgcgttttttattggtgtttcggtatgtggaggtggcggaggtcggaacgcgtggtttcgcgcgtttgaggggtgggggtgggaatgcgtttttttaaggcgcggggtttagacgtatgtttttttagggcggggcggggagggggtgcgagacgcgtgtgtttttcgaagagaggtcggagttgatcggcggttgtgagtagtcgggggttttcggtggtagcgtggttgtttttgggtgtttgcgattttgttggatgaggataggtattgggtgtgtat

SEQ ID NO: 19982 - DNA, 680 bp, Artificial Sequence
  chemically treated genomic DNA (Homo sapiens) CpG-island No: 19982
atacacacccaatacctatcctcatccaacaaaatcgcaaacacccaaaaacaaccacgctaccaccgaaaacccccgactactcacaaccgccgatcaactccgacctctcttcgaaaaacacacgcgtctcgcaccccctccccgccccgccctaaaaaaacatacgtctaaaccccgcgccttaaaaaaacgcattcccacccccacccctcaaacgcgcgaaaccacgcgttccgacctccgccacctccacataccgaaacaccaataaaaaacgcgcgctcccaaaaatcgaaaacgaaactaaaaacgccgcgcccaaaaaaaacgacaaaatccctaactcgctaaaaatttacgaaccgccatatctatctcattcgtctcctctcctccgacaacacgccgtacttcccctcaaacacctttcaccgttaaaaataaaaactccgcgacgattctcgatataactctaattcaccgccatcttacttcgaacctcctaccgccccgtaaataaaaaaaaacgaaacctacgccgaactataaaacgcgattctaaaaaaaaaaacgaaaattataacgtaaaaaaaaaaaaaaaaaaaaacgaaaccgaatcacgtaataaaacaatacccgaaaaacgaaacgaaatcaaaataaaaacccccgccgaa

SEQ ID NO: 19983 - DNA, 680 bp, Artificial Sequence
  chemically treated genomic DNA (Homo sapiens) CpG-island No: 19983
atatatatttagtatttgtttttatttaataaagtcgtaggtatttaagggtagttacgttgttatcgaaggttttcggttgtttataatcgtcggttagtttcggttttttttcgaaggatatacgcgtttcgtatttttttttcgtttcgttttgaggagatatgcgtttgggtttcgcgttttgaaaaggcgtatttttatttttattttttaaacgcgcgaggttacgcgtttcggttttcgttatttttatatgtcggaatattagtgaggggcgcgcgtttttaaaggtcgggggcggagttaagagcgtcgcgtttaaaaaaggcggtaaagtttttgattcgttgagagtttgcgagtcgttatgtttattttattcgttttttttttttcgatagtacgtcgtgtttttttttaggtattttttatcgttagggatgagggtttcgcggcggttttcggtgtggttttgatttatcgttattttgtttcgggttttttgtcgtttcgtagatggaaaggggcgggatttgcgtcgagttgtggggcgcggttttgaaggggagggcggagattatgacgtaaggaggaggaggaggaggagcgagatcgggttacgtggtggggtagtgttcggggagcggggcggagttagggtagaggttttcgtcgag

SEQ ID NO: 19984 - DNA, 680 bp, Artificial Sequence
  chemically treated genomic DNA (Homo sapiens) CpG-island No: 19984
ctcgacgaaaacctctaccctaactccgccccgctccccgaacactaccccaccacgtaacccgatctcgctcctcctcctcctcctccttacgtcataatctccgccctccccttcaaaaccgcgccccacaactcgacgcaaatcccgcccctttccatctacgaaacgacaaaaaacccgaaacaaaataacgataaatcaaaaccacaccgaaaaccgccgcgaaaccctcatccctaacgataaaaaatacctaaaaaaaaacacgacgtactatcgaaaaaaaaaaaacgaataaaataaacataacgactcgcaaactctcaacgaatcaaaaactttaccgccttttttaaacgcgacgctcttaactccgcccccgacctttaaaaacgcgcgcccctcactaatattccgacatataaaaataacgaaaaccgaaacgcgtaacctcgcgcgtttaaaaaataaaaataaaaatacgccttttcaaaacgcgaaacccaaacgcatatctcctcaaaacgaaacgaaaaaaaaatacgaaacgcgtatatccttcgaaaaaaaaccgaaactaaccgacgattataaacaaccgaaaaccttcgataacaacgtaactacccttaaatacctacgactttattaaataaaaacaaatactaaatatatat

SEQ ID NO: 19985 - DNA, 959 bp, Artificial Sequence
  chemically treated genomic DNA (Homo sapiens) CpG-island No: 19985
ttattttttcgtatttgtttttttttcgggtttttttttgtttgttttttcggcgtcggtttttttgttcgtttgtttcgtatttttcgtttcgtttcggtttttcggttcgttttttttttcgtttattttttggcgtgttttttttcgttcgtttcgtttcgcgtttttttttttaggaggagcgtttttttgcgttcggggtttcgtttcgtttaggttcgtacgcggggttttcgggaatcgtcgtttttttttttcgttttcgcgttcgcgttttttttttcggggtttcggtttatttatttttggtgcggtttcgtcggatttaggagtttcggtcgttcgggttgcggggagggggcgtttcgggtcggttttagaagttattttgtaaagaggtagggggcgcggggtcgcgcggggcgagttcgggattcgcggggaagaagtttttcgggatcgcgtttcggtcgttcgagtttttcgcgttcgtcgttttttatttcggtcgggggtttatttgggagttcgttgttttcggttagtcgttcgcgtgtgtttagggttagtagtacgtataagtgttagcgtacggtcgtcgcgtttatgtttaatgcgggtttcgttgggcgtgcgggcgtgcggggcgcggggattcgatcgatcggtcgttttcgtaggcgttgttcgttgttcgtcgtttcgttatcgttcgggttttcgagtcgtttagttagttcggttgatgagttgatagcgcgcgtttattggttcgtggcgtcggaggggcggggcgtcgtttagggtcggttaatgggcgtcggttttcggtttttcgaggaagaggggggttcgggcgtcgtcggggggattttttttttggggcgggcggtaggtggggggtgtgggtttggtcggtcggttcgttaggcgcggggtttaggttaggttggggt

SEQ ID NO: 19986 - DNA, 959 bp, Artificial Sequence
  chemically treated genomic DNA (Homo sapiens) CpG-island No: 19986
accccaacctaacctaaaccccgcgcctaacgaaccgaccgaccaaacccacaccccccacctaccgcccgccccaaaaaaaaaatccccccgacgacgcccgaacccccctcttcctcgaaaaaccgaaaaccgacgcccattaaccgaccctaaacgacgccccgcccctccgacgccacgaaccaataaacgcgcgctatcaactcatcaaccgaactaactaaacgactcgaaaacccgaacgataacgaaacgacgaacaacgaacaacgcctacgaaaacgaccgatcgatcgaatccccgcgccccgcacgcccgcacgcccaacgaaacccgcattaaacataaacgcgacgaccgtacgctaacacttatacgtactactaaccctaaacacacgcgaacgactaaccgaaaacaacgaactcccaaataaacccccgaccgaaataaaaaacgacgaacgcgaaaaactcgaacgaccgaaacgcgatcccgaaaaacttcttccccgcgaatcccgaactcgccccgcgcgaccccgcgccccctacctctttacaaaataacttctaaaaccgacccgaaacgccccctccccgcaacccgaacgaccgaaactcctaaatccgacgaaaccgcaccaaaaataaataaaccgaaaccccgaaaaaaaaaacgcgaacgcgaaaacgaaaaaaaaaaacgacgattcccgaaaaccccgcgtacgaacctaaacgaaacgaaaccccgaacgcaaaaaaacgctcctcctaaaaaaaaaaacgcgaaacgaaacgaacgaaaaaaaacacgccaaaaaataaacgaaaaaaaaaacgaaccgaaaaaccgaaacgaaacgaaaaatacgaaacaaacgaacaaaaaaaccgacgccgaaaaaacaaacaaaaaaaaacccgaaaaaaaaacaaatacgaaaaaataa

SEQ ID NO: 19987 - DNA, 959 bp, Artificial Sequence
  chemically treated genomic DNA (Homo sapiens) CpG-island No: 19987
gttttagtttggtttagatttcgcgtttagcgagtcggtcggttaggtttatattttttatttgtcgttcgttttaggggaagggttttttcgacgacgttcgagtttttttttttttcggagggtcggaggtcggcgtttattggtcggttttgggcgacgtttcgttttttcgacgttacgggttaatgagcgcgcgttgttagtttattagtcgggttggttgggcggttcgggagttcgagcggtggcggagcggcgagtagcgagtagcgtttgcgggagcggtcggtcggtcgggttttcgcgtttcgtacgttcgtacgtttagcggggttcgtattgagtatgggcgcggcggtcgtgcgttggtatttgtgcgtgttgttggttttgggtatacgcgggcggttggtcgggggtagcgggtttttaggtaagttttcgatcgaggtggggggcggcgggcgcggggggttcgggcggtcgaggcgcggtttcggagggtttttttttcgcggatttcgagttcgtttcgcgcggtttcgcgttttttgtttttttgtaaagtaatttttagggtcggttcggggcgtttttttttcgtagttcgggcggtcggggtttttgagttcggcggggtcgtattaggggtgggtgggtcggggtttcgggaggggaagcgcgagcgcgggagcgaggaagaaaggcggcggttttcggggatttcgcgtgcggatttgggcggggcgggatttcgagcgtagaggggcgttttttttgggagagggggcgcggggcggggcgggcggagggggatacgttaggaggtggacggggaaagggacggatcgagagatcgggacggggcgggaggtgcgggatagacggatagaagagtcggcgtcgagggagtagataaaaggaagttcggagaaaagatagatgcggaagggtag

SEQ ID NO: 19988 - DNA, 959 bp, Artificial Sequence
  chemically treated genomic DNA (Homo sapiens) CpG-island No: 19988
ctacccttccgcatctatcttttctccgaacttccttttatctactccctcgacgccgactcttctatccgtctatcccgcacctcccgccccgtcccgatctctcgatccgtccctttccccgtccacctcctaacgtatccccctccgcccgccccgccccgcgccccctctcccaaaaaaaacgcccctctacgctcgaaatcccgccccgcccaaatccgcacgcgaaatccccgaaaaccgccgcctttcttcctcgctcccgcgctcgcgcttcccctcccgaaaccccgacccacccacccctaatacgaccccgccgaactcaaaaaccccgaccgcccgaactacgaaaaaaaaacgccccgaaccgaccctaaaaattactttacaaaaaaacaaaaaacgcgaaaccgcgcgaaacgaactcgaaatccgcgaaaaaaaaaccctccgaaaccgcgcctcgaccgcccgaaccccccgcgcccgccgccccccacctcgatcgaaaacttacctaaaaacccgctacccccgaccaaccgcccgcgtatacccaaaaccaacaacacgcacaaataccaacgcacgaccgccgcgcccatactcaatacgaaccccgctaaacgtacgaacgtacgaaacgcgaaaacccgaccgaccgaccgctcccgcaaacgctactcgctactcgccgctccgccaccgctcgaactcccgaaccgcccaaccaacccgactaataaactaacaacgcgcgctcattaacccgtaacgtcgaaaaaacgaaacgtcgcccaaaaccgaccaataaacgccgacctccgaccctccgaaaaaaaaaaaaactcgaacgtcgtcgaaaaaacccttcccctaaaacgaacgacaaataaaaaatataaacctaaccgaccgactcgctaaacgcgaaatctaaaccaaactaaaac

SEQ ID NO: 19989 - DNA, 587 bp, Artificial Sequence
  chemically treated genomic DNA (Homo sapiens) CpG-island No: 19989
gagaaaaaaaaaaaaaagagtggaaggaggtgagcgtagcgaggatcgaggcgaaggagggttagtgcggaaattcggtgtgaggggtcgagtgaggaaggtttttgtagggcggcgatcgggttttaggaggtcgcggttttgtttttatcggagggcgagttttcgttaagttcgggttttggagatggatcgaagaggggagggaggattaggtatagaaataaatcgcggagtaagaagtatatagtgtcgaagatagaaagtcggaggagaagtcgaaatcgtttttttagtttttgcgggagcgtggtaggggaagagttatagattgattttgcgtttttcgtcgggaattaattgtagtggtatattttacggaaagttacgtttttttatcgattgcgtacgtttttaatagattataatttttagaagttttcgttcgcgtttcggcgattgcgtggtagtacgggtcgtttttttattcggtaaagtgcgggggttgggtgggagggaaattttaagcgtttgcgttggttcgaataggtttttgggaattataattttcggcgtgttttggggtt

SEQ ID NO: 19990 - DNA, 587 bp, Artificial Sequence
  chemically treated genomic DNA (Homo sapiens) CpG-island No: 19990
aaccccaaaacacgccgaaaattataattcccaaaaacctattcgaaccaacgcaaacgcttaaaatttccctcccacccaacccccgcactttaccgaataaaaaaacgacccgtactaccacgcaatcgccgaaacgcgaacgaaaacttctaaaaattataatctattaaaaacgtacgcaatcgataaaaaaacgtaactttccgtaaaatataccactacaattaattcccgacgaaaaacgcaaaatcaatctataactcttcccctaccacgctcccgcaaaaactaaaaaaacgatttcgacttctcctccgactttctatcttcgacactatatacttcttactccgcgatttatttctatacctaatcctccctcccctcttcgatccatctccaaaacccgaacttaacgaaaactcgccctccgataaaaacaaaaccgcgacctcctaaaacccgatcgccgccctacaaaaaccttcctcactcgacccctcacaccgaatttccgcactaaccctccttcgcctcgatcctcgctacgctcacctccttccactcttttttttttttttctc

SEQ ID NO: 19991 - DNA, 587 bp, Artificial Sequence
  chemically treated genomic DNA (Homo sapiens) CpG-island No: 19991
agttttagagtacgtcgggagttgtagtttttaaaggtttgttcgggttagcgtaggcgtttggggttttttttttatttaattttcgtattttatcggataaggaagcggttcgtgttgttacgtagtcgtcggaacgcgggcgggggtttttgggagttgtagtttgttgggggcgtgcgtagtcggtaaggagacgtagtttttcgtggggtgtattattgtagttggttttcggcgggagacgtagggttagtttgtgattttttttttattacgttttcgtagaggttgaggaggcggtttcgatttttttttcggttttttgttttcggtattgtgtgttttttgtttcgcggtttatttttgtatttagttttttttttttttttcggtttatttttaaagttcgggtttggcggggattcgtttttcggtaaaggtagggtcgcgattttttaaaattcggtcgtcgttttgtaggaattttttttattcggttttttatatcgggttttcgtattgattttttttcgtttcggttttcgttgcgtttatttttttttatttttttttttttttttttt

SEQ ID NO: 19992 - DNA, 587 bp, Artificial Sequence
  chemically treated genomic DNA (Homo sapiens) CpG-island No: 19992
aaaaaaaaaaaaaaaaaaaataaaaaaaaataaacgcaacgaaaaccgaaacgaaaaaaaatcaatacgaaaacccgatataaaaaaccgaataaaaaaaattcctacaaaacgacgaccgaattttaaaaaatcgcgaccctacctttaccgaaaaacgaatccccgccaaacccgaactttaaaaataaaccgaaaaaaaaaaaaaaaactaaatacaaaaataaaccgcgaaacaaaaaacacacaataccgaaaacaaaaaaccgaaaaaaaaatcgaaaccgcctcctcaacctctacgaaaacgtaataaaaaaaaaatcacaaactaaccctacgtctcccgccgaaaaccaactacaataatacaccccacgaaaaactacgtctccttaccgactacgcacgcccccaacaaactacaactcccaaaaacccccgcccgcgttccgacgactacgtaacaacacgaaccgcttccttatccgataaaatacgaaaattaaataaaaaaaaaaccccaaacgcctacgctaacccgaacaaacctttaaaaactacaactcccgacgtactctaaaact

SEQ ID NO: 19993 - DNA, 645 bp, Artificial Sequence
  chemically treated genomic DNA (Homo sapiens) CpG-island No: 19993
ttttcgttggtttttattttcgtagtttttttagtagtcgtttttagtaggcgcgttttcgttttggcgttttcgcgagttttcggtaggtagatttcggtagagggtggagggatcggttgggggcgtttcggtttcggttatttcgtataggtggttggaggagttgttgtcgcgggcgcggttgttcggtcgcgtgggtgtcgcgggcggatacgtttggaagtcggtttcgcggagcgcgcgtaggtttcggttttggcgtttcgggggggtggcgtaggttacgtcggagttggatacgcgcgcgcgttggaattaggtttagagcggtcgcgcgcggtagtcgtacgtttaggggttagcgttgagtcgtaggaattcgagcgagggtaggtcggcgagcgtttcgtcgggtagcgaggttaggttgttgttgaataggtagaggatggtgaggcggttgaggtcgcggaaggtcgcgcggtgtacgttttgtagtcggttttcgtgtagtagtagtcggtttaggttgtttaggtcgcgaaatacgtgttttgtgagtagtcgtaggcggttttcgtggaggaagaggtggtttaggttggttaggttcgcgaataagttattttgggtggggtggag

SEQ ID NO: 19994 - DNA, 645 bp, Artificial Sequence
  chemically treated genomic DNA (Homo sapiens) CpG-island No: 19994
ctccaccccacccaaaataacttattcgcgaacctaaccaacctaaaccacctcttcctccacgaaaaccgcctacgactactcacaaaacacgtatttcgcgacctaaacaacctaaaccgactactactacacgaaaaccgactacaaaacgtacaccgcgcgaccttccgcgacctcaaccgcctcaccatcctctacctattcaacaacaacctaacctcgctacccgacgaaacgctcgccgacctaccctcgctcgaattcctacgactcaacgctaacccctaaacgtacgactaccgcgcgcgaccgctctaaacctaattccaacgcgcgcgcgtatccaactccgacgtaacctacgccacccccccgaaacgccaaaaccgaaacctacgcgcgctccgcgaaaccgacttccaaacgtatccgcccgcgacacccacgcgaccgaacaaccgcgcccgcgacaacaactcctccaaccacctatacgaaataaccgaaaccgaaacgcccccaaccgatccctccaccctctaccgaaatctacctaccgaaaactcgcgaaaacgccaaaacgaaaacgcgcctactaaaaacgactactaaaaaaactacgaaaataaaaaccaacgaaaa

SEQ ID NO: 19995 - DNA, 645 bp, Artificial Sequence
  chemically treated genomic DNA (Homo sapiens) CpG-island No: 19995
ttttattttatttaggatgatttgttcgcggatttggttaatttgagttatttttttttttacgggaatcgtttgcggttgtttatagagtacgtgtttcgcggtttgggtagtttggatcggttgttgttgtacgggaatcggttgtagggcgtgtatcgcgcggtttttcgcggttttagtcgttttattattttttatttgtttaataatagtttggtttcgttgttcggcgaggcgttcgtcgatttgttttcgttcgagtttttgcggtttaacgttaatttttgggcgtgcgattgtcgcgcgcggtcgttttgggtttggttttagcgcgcgcgcgtgtttagtttcgacgtgatttgcgttattttttcggagcgttagggtcgagatttgcgcgcgtttcgcgaggtcgatttttaggcgtgttcgttcgcggtatttacgcggtcgggtagtcgcgttcgcggtaatagtttttttaattatttgtacggggtggtcgaggtcggggcgtttttagtcgatttttttattttttatcgagatttgtttgtcgaagattcgcgggggcgttagggcggggacgcgtttattgaggacgattattgggggggttacgggggtgaggattagcgaggg

SEQ ID NO: 19996 - DNA, 645 bp, Artificial Sequence
  chemically treated genomic DNA (Homo sapiens) CpG-island No: 19996
ccctcgctaatcctcacccccgtaacccccccaataatcgtcctcaataaacgcgtccccgccctaacgcccccgcgaatcttcgacaaacaaatctcgataaaaaataaaaaaatcgactaaaaacgccccgacctcgaccaccccgtacaaataattaaaaaaactattaccgcgaacgcgactacccgaccgcgtaaataccgcgaacgaacacgcctaaaaatcgacctcgcgaaacgcgcgcaaatctcgaccctaacgctccgaaaaaataacgcaaatcacgtcgaaactaaacacgcgcgcgcgctaaaaccaaacccaaaacgaccgcgcgcgacaatcgcacgcccaaaaattaacgttaaaccgcaaaaactcgaacgaaaacaaatcgacgaacgcctcgccgaacaacgaaaccaaactattattaaacaaataaaaaataataaaacgactaaaaccgcgaaaaaccgcgcgatacacgccctacaaccgattcccgtacaacaacaaccgatccaaactacccaaaccgcgaaacacgtactctataaacaaccgcaaacgattcccgtaaaaaaaaaaataactcaaattaaccaaatccgcgaacaaatcatcctaaataaaataaaa

SEQ ID NO: 19997 - DNA, 776 bp, Artificial Sequence
  chemically treated genomic DNA (Homo sapiens) CpG-island No: 19997
gattttatcgaatttggggaggtgatttttaaagaggttacggaaaagcgtgaatcgtcgatttttcgcgcgttttttagcgtagggtcgttttttcggtttgtcggtgtttttagttcggtcgtttttttcgaggtcgttattagtattttcgttcgtttttttaggttcggatttggttcgttttttttcgttttttaattcggagtttgtattttttttgtttcgtgttcggttcgttaaggattgcgttttgggttgtcggtttcgaggtcgtcgtcgtcgtcgtcgtttttttttttttttgttgttgtttagtcgacgcgcgagtagatcggattgggcgcggggacgcgggacgcggggacgcgggttcggttcgcgcgggatttgggtcggagcgggaggaggcgtcgtcgttggggtatcggggacgttttgttacgttttttgcgtagtaaattcggtgtttttttcgcggatcggtcgttattcgcgtttttttcgcggttattttttttgcgtcggggtggattcggggttatttggtattgtttttatttttacgttatttatatagtgtttcgcgagttttagtttcgcgtcgttttttcggggttacgtttttagttgattttttcgggtcgttttcggagataatggtttatcgcgtttttcggtttttcgagttttagttcggttatcgtttttattttttgggtagtgagtgtcgtgattgtttcgttttatagaagtgtagattaaggtcggggaga

SEQ ID NO: 19998 - DNA, 776 bp, Artificial Sequence
  chemically treated genomic DNA (Homo sapiens) CpG-island No: 19998
tctccccgaccttaatctacacttctataaaacgaaacaatcacgacactcactacccaaaaaataaaaacgataaccgaactaaaactcgaaaaaccgaaaaacgcgataaaccattatctccgaaaacgacccgaaaaaatcaactaaaaacgtaaccccgaaaaaacgacgcgaaactaaaactcgcgaaacactatataaataacgtaaaaataaaaacaataccaaataaccccgaatccaccccgacgcaaaaaaaataaccgcgaaaaaaacgcgaataacgaccgatccgcgaaaaaaacaccgaatttactacgcaaaaaacgtaacaaaacgtccccgataccccaacgacgacgcctcctcccgctccgacccaaatcccgcgcgaaccgaacccgcgtccccgcgtcccgcgtccccgcgcccaatccgatctactcgcgcgtcgactaaacaacaacaaaaaaaaaaaaaaacgacgacgacgacgacgacctcgaaaccgacaacccaaaacgcaatccttaacgaaccgaacacgaaacaaaaaaaatacaaactccgaattaaaaaacgaaaaaaaacgaaccaaatccgaacctaaaaaaacgaacgaaaatactaataacgacctcgaaaaaaacgaccgaactaaaaacaccgacaaaccgaaaaaacgaccctacgctaaaaaacgcgcgaaaaatcgacgattcacgcttttccgtaacctctttaaaaatcacctccccaaattcgataaaatc

SEQ ID NO: 19999 - DNA, 776 bp, Artificial Sequence
  chemically treated genomic DNA (Homo sapiens) CpG-island No: 19999
ttttttcggttttggtttatatttttgtgaaacggggtagttacggtatttattgtttagggagtggggacggtggtcgagttgaagttcggaggatcgggaggcgcggtgagttattgttttcggggacgattcgggagggttagttgggaacgtggtttcgggggggcggcgcggggttggggttcgcggggtattgtgtgggtggcgtggaggtggaggtagtgttaggtggtttcgagtttatttcggcgtagagggggtggtcgcgggagaggcgcgggtggcgatcggttcgcgggaggggtatcgggtttgttgcgtagggggcgtgatagggcgttttcggtattttagcggcggcgttttttttcgtttcggtttagatttcgcgcgagtcgggttcgcgttttcgcgtttcgcgttttcgcgtttagttcggtttgttcgcgcgtcggttgagtagtagtaggaggaggaggaggcggcggcggcggcggcggtttcggggtcggtagtttagagcgtagtttttagcgggtcgggtacggggtagggaggatgtagatttcgggttggagagcggaggagggcgggttaggttcgggtttggagaggcgggcgggggtgttggtggcggtttcggggaggacggtcgggttggggatatcgataggtcgggggagcggttttgcgttgggggacgcgcgggaggtcggcggtttacgttttttcgtggtttttttgaaaattatttttttagattcggtgagatt

SEQ ID NO: 20000 - DNA, 776 bp, Artificial Sequence
  chemically treated genomic DNA (Homo sapiens) CpG-island No: 20000
aatctcaccgaatctaaaaaaataattttcaaaaaaaccacgaaaaaacgtaaaccgccgacctcccgcgcgtcccccaacgcaaaaccgctcccccgacctatcgatatccccaacccgaccgtcctccccgaaaccgccaccaacacccccgcccgcctctccaaacccgaacctaacccgccctcctccgctctccaacccgaaatctacatcctccctaccccgtacccgacccgctaaaaactacgctctaaactaccgaccccgaaaccgccgccgccgccgccgcctcctcctcctcctactactactcaaccgacgcgcgaacaaaccgaactaaacgcgaaaacgcgaaacgcgaaaacgcgaacccgactcgcgcgaaatctaaaccgaaacgaaaaaaaacgccgccgctaaaataccgaaaacgccctatcacgccccctacgcaacaaacccgatacccctcccgcgaaccgatcgccacccgcgcctctcccgcgaccaccccctctacgccgaaataaactcgaaaccacctaacactacctccacctccacgccacccacacaataccccgcgaaccccaaccccgcgccgcccccccgaaaccacgttcccaactaaccctcccgaatcgtccccgaaaacaataactcaccgcgcctcccgatcctccgaacttcaactcgaccaccgtccccactccctaaacaataaataccgtaactaccccgtttcacaaaaatataaaccaaaaccgaaaaaa

SEQ ID NO: 20001 - DNA, 1282 bp, Artificial Sequence
  chemically treated genomic DNA (Homo sapiens) CpG-island No: 20001
ttcggttttcggggtaagagttttcgtttacgttattttcgtcgtcgttttttcggttttttagcgaaagagataaagagtcggcgttttaattcgcgaagtcgcggttgtcgggagcggtagatcgggggattttgttttaaaacgaggggcgggcgtagggagggcgaggtggtggtattcgggttaagttgtcgcgcgttcggttgcgcgggtagcgggatacgcggatgtggggcgggtagtttcggcgtatggaagtagtggttttaggcgagagtttgcgggtttcgacggacggacgggcgggtattagcgcgcggtggtcggagttcggtagtttcgcggcgggtcggtcgagcgtttggggtagcgtcgttgggcgggtcggtcgtagttgtatttatcggatcggaagaaggtcgcgatgtcggttaggtttttggtcgttttttttgttttttcgtcggtatcgttttcgtagttcgagttagtcgcgttggtcgtcgcggcggggtcggaggacgcggcgggggcggcggtttcgtcgttgttgtcgtttatggttgcggcggcgttcgcggtcgcgttcgtttcgggtttcgcgtttttagcgtcgcgtgtcgttcgtttcgcgtcgggtttggcggcgtcgagtatttagttgttcgcgttcggcgcgcggacgtagagtttcggggcggcggggggcggcggcggcggttcggtttaaggagcgcgtttatatagacgaggatttcgttcggtagtcgcgagttggtcgaggggcggaggcgcggagttacggtttttcgggcgtcggtcggagcgcgggtagtagtacgcgtttttcggacgcgtagtcgcgagggcgggggttcgtggtcggcgagattttcgggattacgggcgtcggcggttgtcgcgagtttttattttgattttaatggggaaggaaggaggggggagggggaaattacggtcgagggaattcgggtgaaaggaaaagggagaatagggaacggagaggaaggaaaaaaaagaggggtttcggtaattttcggcgaatttcgttaagggtcgagtttgggttcggcggtgggcggagtttgggggaggggcggggtcgcgttgggcggatgggttttcgtagggttggcggggaggttgtaggaacgttcggtttggttcggtttgttttttcggggtagttttaagttttggaaggcgtaggaaagttttgattagtcggggcggatttttttaggttcggtattgcgtt

SEQ ID NO: 20002 - DNA, 1282 bp, Artificial Sequence
  chemically treated genomic DNA (Homo sapiens) CpG-island No: 20002
aacgcaataccgaacctaaaaaaatccgccccgactaatcaaaactttcctacgccttccaaaacttaaaactaccccgaaaaaacaaaccgaaccaaaccgaacgttcctacaacctccccgccaaccctacgaaaacccatccgcccaacgcgaccccgcccctcccccaaactccgcccaccgccgaacccaaactcgacccttaacgaaattcgccgaaaattaccgaaacccctcttttttttccttcctctccgttccctattctcccttttcctttcacccgaattccctcgaccgtaatttccccctcccccctccttccttccccattaaaatcaaaataaaaactcgcgacaaccgccgacgcccgtaatcccgaaaatctcgccgaccacgaacccccgccctcgcgactacgcgtccgaaaaacgcgtactactacccgcgctccgaccgacgcccgaaaaaccgtaactccgcgcctccgcccctcgaccaactcgcgactaccgaacgaaatcctcgtctatataaacgcgctccttaaaccgaaccgccgccgccgccccccgccgccccgaaactctacgtccgcgcgccgaacgcgaacaactaaatactcgacgccgccaaacccgacgcgaaacgaacgacacgcgacgctaaaaacgcgaaacccgaaacgaacgcgaccgcgaacgccgccgcaaccataaacgacaacaacgacgaaaccgccgcccccgccgcgtcctccgaccccgccgcgacgaccaacgcgactaactcgaactacgaaaacgataccgacgaaaaaacaaaaaaaacgaccaaaaacctaaccgacatcgcgaccttcttccgatccgataaatacaactacgaccgacccgcccaacgacgctaccccaaacgctcgaccgacccgccgcgaaactaccgaactccgaccaccgcgcgctaatacccgcccgtccgtccgtcgaaacccgcaaactctcgcctaaaaccactacttccatacgccgaaactacccgccccacatccgcgtatcccgctacccgcgcaaccgaacgcgcgacaacttaacccgaataccaccacctcgccctccctacgcccgcccctcgttttaaaacaaaatcccccgatctaccgctcccgacaaccgcgacttcgcgaattaaaacgccgactctttatctctttcgctaaaaaaccgaaaaaacgacgacgaaaataacgtaaacgaaaactcttaccccgaaaaccgaa

SEQ ID NO: 20003 - DNA, 1282 bp, Artificial Sequence
  chemically treated genomic DNA (Homo sapiens) CpG-island No: 20003
ggcgtaatgtcgggtttgggaaggttcgtttcggttggttagagtttttttgcgttttttaaggtttggagttgtttcggggaagtagatcgaattaaatcgaacgtttttgtagttttttcgttagttttgcgggagtttattcgtttaacgcggtttcgttttttttttaggtttcgtttatcgtcgagtttaggttcggtttttgacgaagttcgtcggaaattatcgaagttttttttttttttttttttttttcgttttttgtttttttttttttttttattcgggttttttcggtcgtgattttttttttttttttttttttttttttattgaaattaagatggaggttcgcggtagtcgtcggcgttcgtgatttcggaggtttcgtcggttacgggttttcgttttcgcgattgcgcgttcgggaggcgcgtgttgttgttcgcgtttcggtcggcgttcgggaggtcgtggtttcgcgttttcgtttttcggttagttcgcggttatcgggcggagttttcgtttatgtgggcgcgttttttgggtcgagtcgtcgtcgtcgtttttcgtcgtttcggggttttgcgttcgcgcgtcgggcgcgggtagttgggtgttcggcgtcgttaggttcggcgcggagcgggcggtacgcggcgttaggggcgcggggttcgaggcgggcgcggtcgcgggcgtcgtcgtagttatgagcggtagtagcggcggagtcgtcgttttcgtcgcgtttttcggtttcgtcgcggcggttagcgcggttggttcgggttgcgggggcggtgtcggcgagggggtagaggaggcggttaaggatttggtcgatatcgcggttttttttcgattcggtgagtgtaattgcggtcggttcgtttagcggcgttgttttaagcgttcggtcgattcgtcgcggagttgtcgagtttcggttatcgcgcgttggtgttcgttcgttcgttcgtcggggttcgtaggttttcgtttgggattattgtttttatgcgtcggggttgttcgttttatattcgcgtgtttcgttgttcgcgtagtcgggcgcgcggtagtttggttcgaatgttattatttcgttttttttgcgttcgtttttcgttttagggtagaatttttcggtttgtcgttttcggtagtcgcggtttcgcgggttggggcgtcggttttttgtttttttcgttggaggatcgaggaggcggcggcggagatggcgtgggcggaggtttttatttcggaggtcgag

SEQ ID NO: 20004 - DNA, 1282 bp, Artificial Sequence
  chemically treated genomic DNA (Homo sapiens) CpG-island No: 20004
ctcgacctccgaaataaaaacctccgcccacgccatctccgccgccgcctcctcgatcctccaacgaaaaaaacaaaaaaccgacgccccaacccgcgaaaccgcgactaccgaaaacgacaaaccgaaaaattctaccctaaaacgaaaaacgaacgcaaaaaaaacgaaataataacattcgaaccaaactaccgcgcgcccgactacgcgaacaacgaaacacgcgaatataaaacgaacaaccccgacgcataaaaacaataatcccaaacgaaaacctacgaaccccgacgaacgaacgaacgaacaccaacgcgcgataaccgaaactcgacaactccgcgacgaatcgaccgaacgcttaaaacaacgccgctaaacgaaccgaccgcaattacactcaccgaatcgaaaaaaaaccgcgatatcgaccaaatccttaaccgcctcctctaccccctcgccgacaccgcccccgcaacccgaaccaaccgcgctaaccgccgcgacgaaaccgaaaaacgcgacgaaaacgacgactccgccgctactaccgctcataactacgacgacgcccgcgaccgcgcccgcctcgaaccccgcgcccctaacgccgcgtaccgcccgctccgcgccgaacctaacgacgccgaacacccaactacccgcgcccgacgcgcgaacgcaaaaccccgaaacgacgaaaaacgacgacgacgactcgacccaaaaaacgcgcccacataaacgaaaactccgcccgataaccgcgaactaaccgaaaaacgaaaacgcgaaaccacgacctcccgaacgccgaccgaaacgcgaacaacaacacgcgcctcccgaacgcgcaatcgcgaaaacgaaaacccgtaaccgacgaaacctccgaaatcacgaacgccgacgactaccgcgaacctccatcttaatttcaataaaaaaaaaaaaaaaaaaaaaaaaaaaatcacgaccgaaaaaacccgaataaaaaaaaaaaaaaaaacaaaaaacgaaaaaaaaaaaaaaaaaaaaaaaacttcgataatttccgacgaacttcgtcaaaaaccgaacctaaactcgacgataaacgaaacctaaaaaaaaaacgaaaccgcgttaaacgaataaactcccgcaaaactaacgaaaaaactacaaaaacgttcgatttaattcgatctacttccccgaaacaactccaaaccttaaaaaacgcaaaaaaactctaaccaaccgaaacgaaccttcccaaacccgacattacgcc

SEQ ID NO: 20005 - DNA, 667 bp, Artificial Sequence
  chemically treated genomic DNA (Homo sapiens) CpG-island No: 20005
tagacgcggagtttatttcgttagaaattttgggtttttttttttacgttggtaggttgggttcggttttatcgtcgcggtttcgtttatttttttagggagcgcgggtagagcgtcgagcgcggcgtagggattggagttttcgttagtttcgggtttttttttttcggagttgttcggggggtttcggtttcgggcgttttcgtcgtcgttttgttttttttagggtttatgttttgttttcggggttttagaggtttcgtttgagagcggttttcgcgagtttgggtgtcgcggaattatcgttgtcggaagtcgaggttatataaacgttacgggtaggagcgggagggtatcggcggcggttgcgaggtcgggttttgatatgtcgttgtgttcgtagtgaaggaggagggcgatcgcgagatttttagttttagggatagtttttcggtgcgtttgaaaaagttacgtaaggcgcgtacggtttttatcgattattagttggcgtagttggagcgtagtttcgagcggtagaagtatttgagcgtgtaggatcgtatggagttcgtcgtttcgtttaattttatcgatacgtaggttaagatttggtattagaatcgtaggtgaggtttggttgcgggggtagaggtagaaagggaatttt

SEQ ID NO: 20006 - DNA, 667 bp, Artificial Sequence
  chemically treated genomic DNA (Homo sapiens) CpG-island No: 20006
aaaattccctttctacctctacccccgcaaccaaacctcacctacgattctaataccaaatcttaacctacgtatcgataaaattaaacgaaacgacgaactccatacgatcctacacgctcaaatacttctaccgctcgaaactacgctccaactacgccaactaataatcgataaaaaccgtacgcgccttacgtaactttttcaaacgcaccgaaaaactatccctaaaactaaaaatctcgcgatcgccctcctccttcactacgaacacaacgacatatcaaaacccgacctcgcaaccgccgccgataccctcccgctcctacccgtaacgtttatataacctcgacttccgacaacgataattccgcgacacccaaactcgcgaaaaccgctctcaaacgaaacctctaaaaccccgaaaacaaaacataaaccctaaaaaaaacaaaacgacgacgaaaacgcccgaaaccgaaaccccccgaacaactccgaaaaaaaaaaacccgaaactaacgaaaactccaatccctacgccgcgctcgacgctctacccgcgctccctaaaaaaataaacgaaaccgcgacgataaaaccgaacccaacctaccaacgtaaaaaaaaaaacccaaaatttctaacgaaataaactccgcgtcta

SEQ ID NO: 20007 - DNA, 667 bp, Artificial Sequence
  chemically treated genomic DNA (Homo sapiens) CpG-island No: 20007
gaagttttttttttgtttttattttcgtagttaggttttatttgcggttttggtattaggttttgatttgcgtgtcggtgaggttgagcgaggcggcgagttttatgcggttttgtacgtttaggtatttttgtcgttcgaagttgcgttttagttgcgttagttgatggtcggtgaaggtcgtgcgcgttttgcgtggtttttttaggcgtatcgggggattgtttttggagttggagatttcgcggtcgttttttttttttattgcggatatagcggtatgttagggttcggtttcgtagtcgtcgtcggtgttttttcgtttttgttcgtggcgtttgtgtaatttcggttttcgatagcggtggtttcgcgatatttaagttcgcgggggtcgtttttagacgggatttttggggtttcgggaataggatatgaattttgaggggaataggacggcggcgggagcgttcgaggtcgagatttttcgggtagtttcggggagaaagaattcgaagttggcgagaattttagtttttgcgtcgcgttcggcgttttgttcgcgttttttggagggataaacggagtcgcgacgatggaatcggatttagtttgttagcgtaggggaagggatttagggtttttggcggagtgagtttcgcgtttg

SEQ ID NO: 20008 - DNA, 667 bp, Artificial Sequence
  chemically treated genomic DNA (Homo sapiens) CpG-island No: 20008
caaacgcgaaactcactccgccaaaaaccctaaatcccttcccctacgctaacaaactaaatccgattccatcgtcgcgactccgtttatccctccaaaaaacgcgaacaaaacgccgaacgcgacgcaaaaactaaaattctcgccaacttcgaattctttctccccgaaactacccgaaaaatctcgacctcgaacgctcccgccgccgtcctattcccctcaaaattcatatcctattcccgaaaccccaaaaatcccgtctaaaaacgacccccgcgaacttaaatatcgcgaaaccaccgctatcgaaaaccgaaattacacaaacgccacgaacaaaaacgaaaaaacaccgacgacgactacgaaaccgaaccctaacataccgctatatccgcaataaaaaaaaaaaacgaccgcgaaatctccaactccaaaaacaatcccccgatacgcctaaaaaaaccacgcaaaacgcgcacgaccttcaccgaccatcaactaacgcaactaaaacgcaacttcgaacgacaaaaatacctaaacgtacaaaaccgcataaaactcgccgcctcgctcaacctcaccgacacgcaaatcaaaacctaataccaaaaccgcaaataaaacctaactacgaaaataaaaacaaaaaaaaaacttc

SEQ ID NO: 20009 - DNA, 720 bp, Artificial Sequence
  chemically treated genomic DNA (Homo sapiens) CpG-island No: 20009
ttcgtttttttatatcgttttatttttcgtttttaggcgtatttttgcgggtggtgtttcggttagagatacgtgtttcggcgtaatttgtttcgaagttgttcggtgtttttttttcgtttaatttcgtgaatgattcgaaattcgattttaaggtacggttgtagttcgcggcgcgtttatagtcgggtcgcgggtggggacggagttgaagtcgggttagaatttattcgattcgtttgggttgggggacgtttggagaacgttttggggttgtcgaagagcgaatcgtcggcggttgttatggtttgcgtgggtgacgcgtggtgtagtagcgagttcggtgcgtagattgttgggttcgggattttacgtgggacgcgcgaggattttgcgttatcgtttttttcgggttcggaacggttttagttgtacggattcgtttcgaggggagtcggggacggcggtatcgggcgggtagggataagattatcgcgcgtgttttcgtttggtggtagtttttttttgcgtttttcgcggtttggtaaaattatattcggtcgagagtttacgttggggaagttttttgaatgtttttgagaagcgagattcggcgttattttatcgacgagttttttttttatcgtttcgtgcgtttttttagtattttaggaattaaagtttgtttgggtagttttttaataggttttggagtttaat

SEQ ID NO: 20010 - DNA, 720 bp, Artificial Sequence
  chemically treated genomic DNA (Homo sapiens) CpG-island No: 20010
attaaactccaaaacctattaaaaaactacccaaacaaactttaattcctaaaatactaaaaaaacgcacgaaacgataaaaaaaaaactcgtcgataaaataacgccgaatctcgcttctcaaaaacattcaaaaaacttccccaacgtaaactctcgaccgaatataattttaccaaaccgcgaaaaacgcaaaaaaaaactaccaccaaacgaaaacacgcgcgataatcttatccctacccgcccgataccgccgtccccgactcccctcgaaacgaatccgtacaactaaaaccgttccgaacccgaaaaaaacgataacgcaaaatcctcgcgcgtcccacgtaaaatcccgaacccaacaatctacgcaccgaactcgctactacaccacgcgtcacccacgcaaaccataacaaccgccgacgattcgctcttcgacaaccccaaaacgttctccaaacgtcccccaacccaaacgaatcgaataaattctaacccgacttcaactccgtccccacccgcgacccgactataaacgcgccgcgaactacaaccgtaccttaaaatcgaatttcgaatcattcacgaaattaaacgaaaaaaaaacaccgaacaacttcgaaacaaattacgccgaaacacgtatctctaaccgaaacaccacccgcaaaaatacgcctaaaaacgaaaaataaaacgatataaaaaaacgaa

SEQ ID NO: 20011 - DNA, 720 bp, Artificial Sequence
  chemically treated genomic DNA (Homo sapiens) CpG-island No: 20011
attgagttttagagtttgttagggagttatttagataggttttagtttttaaagtgttgaggaaacgtacggggcggtaaaggggaggttcgtcggtgagatggcgtcggatttcgttttttagaggtatttagagagtttttttagcgtgaattttcggtcgaatgtaattttgttaggtcgcgagggacgtagagaggggttgttattaggcgggggtacgcgcggtagttttgtttttattcgttcggtgtcgtcgttttcggtttttttcgggacgagttcgtatagttggagtcgtttcggattcggaaggggcggtggcgtagggttttcgcgcgttttacgtggggtttcgggtttagtagtttgcgtatcgggttcgttgttgtattacgcgttatttacgtagattatggtagtcgtcgacggttcgtttttcgataattttaggacgttttttagacgttttttagtttaggcgagtcgggtgagttttgattcggttttagtttcgtttttattcgcggttcggttgtgggcgcgtcgcgagttgtagtcgtgttttggagtcgggtttcgagttatttacggagttaagcgggagaaagatatcgggtagtttcgggataagttgcgtcgaaatacgtgtttttaatcggaatattattcgtagggatgcgtttggaagcggggagtggagcggtgtggaggggcggg

SEQ ID NO: 20012 - DNA, 720 bp, Artificial Sequence
  chemically treated genomic DNA (Homo sapiens) CpG-island No: 20012
cccgcccctccacaccgctccactccccgcttccaaacgcatccctacgaataatattccgattaaaaacacgtatttcgacgcaacttatcccgaaactacccgatatctttctcccgcttaactccgtaaataactcgaaacccgactccaaaacacgactacaactcgcgacgcgcccacaaccgaaccgcgaataaaaacgaaactaaaaccgaatcaaaactcacccgactcgcctaaactaaaaaacgtctaaaaaacgtcctaaaattatcgaaaaacgaaccgtcgacgactaccataatctacgtaaataacgcgtaatacaacaacgaacccgatacgcaaactactaaacccgaaaccccacgtaaaacgcgcgaaaaccctacgccaccgccccttccgaatccgaaacgactccaactatacgaactcgtcccgaaaaaaaccgaaaacgacgacaccgaacgaataaaaacaaaactaccgcgcgtacccccgcctaataacaacccctctctacgtccctcgcgacctaacaaaattacattcgaccgaaaattcacgctaaaaaaactctctaaatacctctaaaaaacgaaatccgacgccatctcaccgacgaacctcccctttaccgccccgtacgtttcctcaacactttaaaaactaaaacctatctaaataactccctaacaaactctaaaactcaat

SEQ ID NO: 20013 - DNA, 536 bp, Artificial Sequence
  chemically treated genomic DNA (Homo sapiens) CpG-island No: 20013
ggcggggttttttttggttcggcggcgttcggggtttgaggggagaaaatcgtcgcggagggcgttgggggtggcggcggcggttcgggaggtggtcgcgcgattgcgtggagcgttagggcgttcgatttttgtatttgagagaagatgaatacggtcgattaggttcgggtggggttcgcggacgacgggtttgcgtcgtttggggaggaggagggagaggggggcggcgaggcgggcgggaaggagttagtagcggacgcggtttcggggtttagcgttgtatttcgttttatggtgattcggcgggagtcggtcgtgaagttgtagtatgcggtgagcggtttggaatcgttggtttggttcgaggattatcgcgtgtttgtgtttacggttcgtagtatcgttgtgttggagtttatttgcgacgtgtataattcgggttaggatttggttatttatcgtatttcggtgttcgtatcgtttaatagttgtttttttaaagtaagttatttttcgttatttttggggttttt

SEQ ID NO: 20014 - DNA, 536 bp, Artificial Sequence
  chemically treated genomic DNA (Homo sapiens) CpG-island No: 20014
aaaaaccccaaaaataacgaaaaataacttactttaaaaaaacaactattaaacgatacgaacaccgaaatacgataaataaccaaatcctaacccgaattatacacgtcgcaaataaactccaacacaacgatactacgaaccgtaaacacaaacacgcgataatcctcgaaccaaaccaacgattccaaaccgctcaccgcatactacaacttcacgaccgactcccgccgaatcaccataaaacgaaatacaacgctaaaccccgaaaccgcgtccgctactaactccttcccgcccgcctcgccgcccccctctccctcctcctccccaaacgacgcaaacccgtcgtccgcgaaccccacccgaacctaatcgaccgtattcatcttctctcaaatacaaaaatcgaacgccctaacgctccacgcaatcgcgcgaccacctcccgaaccgccgccgccacccccaacgccctccgcgacgattttctcccctcaaaccccgaacgccgccgaaccaaaaaaaaccccgcc

SEQ ID NO: 20015 - DNA, 536 bp, Artificial Sequence
  chemically treated genomic DNA (Homo sapiens) CpG-island No: 20015
gaagattttagggatggcgggggatgatttattttgaggagatagttgttgagcggtgcgggtatcgaggtgcggtggataattaggttttggttcgggttgtgtacgtcgtagatgagttttagtatagcgatgttgcgggtcgtggatatagatacgcggtggttttcggattaagttagcggttttaggtcgtttatcgtatattgtagttttacggtcggttttcgtcgagttattatgaggcggaatgtagcgttgggtttcggggtcgcgttcgttgttggttttttttcgttcgtttcgtcgtttttttttttttttttttttttagacggcgtaggttcgtcgttcgcgggttttattcgggtttggtcggtcgtgtttatttttttttaggtgtagaggtcggacgttttggcgttttacgtagtcgcgcgattatttttcggatcgtcgtcgttatttttagcgtttttcgcggcggttttttttttttaggtttcgagcgtcgtcgagttaagaaggatttcgtt

SEQ ID NO: 20016 - DNA, 536 bp, Artificial Sequence
  chemically treated genomic DNA (Homo sapiens) CpG-island No: 20016
aacgaaatccttcttaactcgacgacgctcgaaacctaaaaaaaaaaaaccgccgcgaaaaacgctaaaaataacgacgacgatccgaaaaataatcgcgcgactacgtaaaacgccaaaacgtccgacctctacacctaaaaaaaaataaacacgaccgaccaaacccgaataaaacccgcgaacgacgaacctacgccgtctaaaaaaaaaaaaaaaaaaaaaaacgacgaaacgaacgaaaaaaaaccaacaacgaacgcgaccccgaaacccaacgctacattccgcctcataataactcgacgaaaaccgaccgtaaaactacaatatacgataaacgacctaaaaccgctaacttaatccgaaaaccaccgcgtatctatatccacgacccgcaacatcgctatactaaaactcatctacgacgtacacaacccgaaccaaaacctaattatccaccgcacctcgatacccgcaccgctcaacaactatctcctcaaaataaatcatcccccgccatccctaaaatcttc

SEQ ID NO: 20017 - DNA, 704 bp, Artificial Sequence
  chemically treated genomic DNA (Homo sapiens) CpG-island No: 20017
atggtcgtttttaagggagtgggcgggtttgcggggcggaagtgacgtacgagaggaagttcgttttgtcgtttggtcgcggggcgtttggtttagtggtttttgcgggtttcgaggagcgggatgttgcgggttgggtggtttcggggcgcggcggcgttggcgttgttgttggcggttcgagtggtggcggcgttcgagtttattatcgtgggtttagttatcggggtcgcgtcggttattatcggttatttgttttataatgatatttattgtcgtttcgtcgagtgttgtcgcgaggagcggtcgtttaacgtttcgggtacggcgcgcgcgcgagttgtgggtcggcgttgcggggggcgcgggggcgcgggggcgcggagggacggtttcgtgggcgtttggtacggatcgggttcgtggtatttagacggcggtggttttagttggggtgggcggggagcggatggggcggtttcggaatcgttcgcgggaacgtagaagcggtgttttcgtaaatagtttttagatcgtggggttgttttagcgtttttttaaagttttcgttttttgggattataggtggaagaaacggaaagtaggcgggcggtttttttgcgttttgttaattttattaagtagtttttagacgtgttgcgtcgtttagaaagtttatatttggtttttggtttttttgtagg

SEQ ID NO: 20018 - DNA, 704 bp, Artificial Sequence
  chemically treated genomic DNA (Homo sapiens) CpG-island No: 20018
cctacaaaaaaaccaaaaaccaaatataaactttctaaacgacgcaacacgtctaaaaactacttaataaaattaacaaaacgcaaaaaaaccgcccgcctactttccgtttcttccacctataatcccaaaaaacgaaaactttaaaaaaacgctaaaacaaccccacgatctaaaaactatttacgaaaacaccgcttctacgttcccgcgaacgattccgaaaccgccccatccgctccccgcccaccccaactaaaaccaccgccgtctaaataccacgaacccgatccgtaccaaacgcccacgaaaccgtccctccgcgcccccgcgcccccgcgccccccgcaacgccgacccacaactcgcgcgcgcgccgtacccgaaacgttaaacgaccgctcctcgcgacaacactcgacgaaacgacaataaatatcattataaaacaaataaccgataataaccgacgcgaccccgataactaaacccacgataataaactcgaacgccgccaccactcgaaccgccaacaacaacgccaacgccgccgcgccccgaaaccacccaacccgcaacatcccgctcctcgaaacccgcaaaaaccactaaaccaaacgccccgcgaccaaacgacaaaacgaacttcctctcgtacgtcacttccgccccgcaaacccgcccactcccttaaaaacgaccat

SEQ ID NO: 20019 - DNA, 704 bp, Artificial Sequence
  chemically treated genomic DNA (Homo sapiens) CpG-island No: 20019
tttgtaggaaaattaggggttaaatgtgggttttttgggcgacgtagtacgtttgaaaattatttaatagggttggtagggcgtagaagggtcgttcgtttatttttcgttttttttatttgtgattttaaggaacgggagttttagaaaggcgttggggtagttttacgatttggagattgtttgcgaaggtatcgtttttgcgttttcgcgaacggtttcggggtcgttttattcgtttttcgtttattttagttgggattatcgtcgtttagatgttacgggttcggttcgtgttaggcgtttacgaggtcgttttttcgcgttttcgcgttttcgcgtttttcgtagcgtcgatttatagttcgcgcgcgcgtcgtattcgaagcgttgagcggtcgtttttcgcggtagtattcggcgaagcggtagtagatgttattgtaggataggtagtcggtgatggtcgacgcggtttcgatggttaggtttacggtgatgggttcgaacgtcgttattattcgggtcgttagtagtagcgttagcgtcgtcgcgtttcggagttatttagttcgtaatatttcgtttttcgaagttcgtagaagttattgagttaggcgtttcgcggttaagcggtaggacggattttttttcgtgcgttattttcgtttcgtagattcgtttatttttttgggggcggttat

SEQ ID NO: 20020 - DNA, 704 bp, Artificial Sequence
  chemically treated genomic DNA (Homo sapiens) CpG-island No: 20020
ataaccgcccccaaaaaaataaacgaatctacgaaacgaaaataacgcacgaaaaaaaatccgtcctaccgcttaaccgcgaaacgcctaactcaataacttctacgaacttcgaaaaacgaaatattacgaactaaataactccgaaacgcgacgacgctaacgctactactaacgacccgaataataacgacgttcgaacccatcaccgtaaacctaaccatcgaaaccgcgtcgaccatcaccgactacctatcctacaataacatctactaccgcttcgccgaatactaccgcgaaaaacgaccgctcaacgcttcgaatacgacgcgcgcgcgaactataaatcgacgctacgaaaaacgcgaaaacgcgaaaacgcgaaaaaacgacctcgtaaacgcctaacacgaaccgaacccgtaacatctaaacgacgataatcccaactaaaataaacgaaaaacgaataaaacgaccccgaaaccgttcgcgaaaacgcaaaaacgataccttcgcaaacaatctccaaatcgtaaaactaccccaacgcctttctaaaactcccgttccttaaaatcacaaataaaaaaaacgaaaaataaacgaacgacccttctacgccctaccaaccctattaaataattttcaaacgtactacgtcgcccaaaaaacccacatttaacccctaattttcctacaaa

SEQ ID NO: 20021 - DNA, 793 bp, Artificial Sequence
  chemically treated genomic DNA (Homo sapiens) CpG-island No: 20021
aggagagggcggaggagaggacggggggcgaggtttgttttaagaaggggcgtgtggtcggcgtagcgcgtgtattagcggtttcggagcgagcggtcgtggttgagaaggggagggcggaaagtttgttttttcgacgttagcgtcgggcgggtcgcgaggttaggaggcggcgggagttgggtagagcgcggggcggtcggggttttcgtttcgattcgcgttcgcgattttttttgggattcgagttcgagattttcgtcggttttttcggggtcgttcgcgggtatggatagcgcggtcgtcgttttcgttttggataagtcggcgttgggttcggggtcgtcgtcgtttttattcgcgttggggttcggcgattgcgtttaggcgcgtaagaatttttcggtgagttattttttggatttggaagaggtggcggcggtcgggcggttggcggcgcgtttcggggttagggtcgaggcgcgggagggcgtagtacgggagtcgttcgggggtagtagcggtagcgaggcggcgtcgtaggatggtgagtacggtcggttagggacgggggtggcggggtcggggtcggggtcggggtcggggcgcggggttcggggagtcggcgcggggcgggcgaagatgtagggcgcgtggtcggcggtaggatttttgggggcgcgtgtaagtgacggtggacggcggttgattagtattttgggttgggggagggggatttttttcgggttttggggtgcgtttttacggggaagtgcgttgttttcgtttttta

SEQ ID NO: 20022 - DNA, 793 bp, Artificial Sequence
  chemically treated genomic DNA (Homo sapiens) CpG-island No: 20022
taaaaaacgaaaacaacgcacttccccgtaaaaacgcaccccaaaacccgaaaaaaatccccctcccccaacccaaaatactaatcaaccgccgtccaccgtcacttacacgcgcccccaaaaatcctaccgccgaccacgcgccctacatcttcgcccgccccgcgccgactccccgaaccccgcgccccgaccccgaccccgaccccgaccccgccacccccgtccctaaccgaccgtactcaccatcctacgacgccgcctcgctaccgctactacccccgaacgactcccgtactacgccctcccgcgcctcgaccctaaccccgaaacgcgccgccaaccgcccgaccgccgccacctcttccaaatccaaaaaataactcaccgaaaaattcttacgcgcctaaacgcaatcgccgaaccccaacgcgaataaaaacgacgacgaccccgaacccaacgccgacttatccaaaacgaaaacgacgaccgcgctatccatacccgcgaacgaccccgaaaaaaccgacgaaaatctcgaactcgaatcccaaaaaaaatcgcgaacgcgaatcgaaacgaaaaccccgaccgccccgcgctctacccaactcccgccgcctcctaacctcgcgacccgcccgacgctaacgtcgaaaaaacaaactttccgccctccccttctcaaccacgaccgctcgctccgaaaccgctaatacacgcgctacgccgaccacacgccccttcttaaaacaaacctcgccccccgtcctctcctccgccctctcct

SEQ ID NO: 20023 - DNA, 793 bp, Artificial Sequence
  chemically treated genomic DNA (Homo sapiens) CpG-island No: 20023
tggggagcgaaggtagcgtattttttcgtggggacgtattttaagattcgaagagggttttttttttttagtttagagtgttggttaatcgtcgtttatcgttatttatacgcgtttttagaagttttgtcgtcgattacgcgttttgtattttcgttcgtttcgcgtcggtttttcggatttcgcgtttcggtttcggtttcggtttcggtttcgttattttcgtttttggtcggtcgtatttattattttgcggcgtcgtttcgttgtcgttgttgttttcggacggttttcgtgttgcgttttttcgcgtttcggttttggtttcggggcgcgtcgttagtcgttcggtcgtcgttattttttttaggtttaggaggtggtttatcgagaagtttttgcgcgtttgggcgtagtcgtcgggttttagcgcgggtggaggcggcggcggtttcgggtttagcgtcggtttgtttagggcgaaggcggcggtcgcgttgtttatgttcgcgagcggtttcgggggggtcggcgggggtttcgggttcgggttttaggaagggtcgcgggcgcgggtcggagcgagagtttcggtcgtttcgcgttttgtttagttttcgtcgttttttagtttcgcggttcgttcggcgttgacgtcggggaaataaatttttcgtttttttttttttagttacggtcgttcgtttcggagtcgttggtgtacgcgttgcgtcggttatacgtttttttttgaagtaaatttcgtttttcgttttttttttcgttttttttt

SEQ ID NO: 20024 - DNA, 793 bp, Artificial Sequence
  chemically treated genomic DNA (Homo sapiens) CpG-island No: 20024
aaaaaaaaacgaaaaaaaaaacgaaaaacgaaatttacttcaaaaaaaaacgtataaccgacgcaacgcgtacaccaacgactccgaaacgaacgaccgtaactaaaaaaaaaaaaacgaaaaatttatttccccgacgtcaacgccgaacgaaccgcgaaactaaaaaacgacgaaaactaaacaaaacgcgaaacgaccgaaactctcgctccgacccgcgcccgcgacccttcctaaaacccgaacccgaaacccccgccgacccccccgaaaccgctcgcgaacataaacaacgcgaccgccgccttcgccctaaacaaaccgacgctaaacccgaaaccgccgccgcctccacccgcgctaaaacccgacgactacgcccaaacgcgcaaaaacttctcgataaaccacctcctaaacctaaaaaaaataacgacgaccgaacgactaacgacgcgccccgaaaccaaaaccgaaacgcgaaaaaacgcaacacgaaaaccgtccgaaaacaacaacgacaacgaaacgacgccgcaaaataataaatacgaccgaccaaaaacgaaaataacgaaaccgaaaccgaaaccgaaaccgaaacgcgaaatccgaaaaaccgacgcgaaacgaacgaaaatacaaaacgcgtaatcgacgacaaaacttctaaaaacgcgtataaataacgataaacgacgattaaccaacactctaaactaaaaaaaaaaaaccctcttcgaatcttaaaatacgtccccacgaaaaaatacgctaccttcgctcccca

SEQ ID NO: 20025 - DNA, 901 bp, Artificial Sequence
  chemically treated genomic DNA (Homo sapiens) CpG-island No: 20025
gaacgagcgtcggggaaggagtaagtcgagcgagttatttattttaagttttttgttgcggatttttacgtagttttgtttgattatgtcgttaaagttggaggttatggttagcgcgatcgggtttttgcgtttcgcgattcgtttttcggagtcgagagtcgtcgttcgtcgtcgggtttgcgcgggtttcgtatttagtcggtcgtcgttagtagtagcgtcgtcgttcgttttttttcgagttttcgtcggtggggacgcggggtcgtttgtagggtcgtcgcggacggggaacggggttcggcgtcgcgagtcgcgttagtttttcgcgttttggcgtttattttcgtttttcgtcgcgagtttagcgtcgcggttcgcgttttcgttagttgcgggagtttttatcgcgtcgtcgttttcggtagtatttacgggttggcgtttcgttcggcggcgtatagttggtcggagcgtattatcgcggtttttcggcgcggggggagggggcgggtcggggggggcgggttgatgcgtcggtttcgttttttttttttggttcgtggggtggttgggttcggagacgttcgtaagacgcgttttattttttttcgcgcgggtgggagcgttttcgtcgtcgggcgtttcgaggttcgttttttattcggtttttcggttttttagcgtttttcgggcgcgagatttttaaggatacggcgttttattttcgggttttaaatttttattcgtaagttgtgtagcggggaaagggtagtggggatatttttaacgcggaaggttagcgggagcgagatatttattttattggttttgtttatagtatatttttatttttaagtattcgcggtcgttttaggtttttgtttcgttaggaagt

SEQ ID NO: 20026 - DNA, 901 bp, Artificial Sequence
  chemically treated genomic DNA (Homo sapiens) CpG-island No: 20026
acttcctaacgaaacaaaaacctaaaacgaccgcgaatacttaaaaataaaaatatactataaacaaaaccaataaaataaatatctcgctcccgctaaccttccgcgttaaaaatatccccactaccctttccccgctacacaacttacgaataaaaatttaaaacccgaaaataaaacgccgtatccttaaaaatctcgcgcccgaaaaacgctaaaaaaccgaaaaaccgaataaaaaacgaacctcgaaacgcccgacgacgaaaacgctcccacccgcgcgaaaaaaaataaaacgcgtcttacgaacgtctccgaacccaaccaccccacgaaccaaaaaaaaaaaacgaaaccgacgcatcaacccgccccccccgacccgccccctccccccgcgccgaaaaaccgcgataatacgctccgaccaactatacgccgccgaacgaaacgccaacccgtaaatactaccgaaaacgacgacgcgataaaaactcccgcaactaacgaaaacgcgaaccgcgacgctaaactcgcgacgaaaaacgaaaataaacgccaaaacgcgaaaaactaacgcgactcgcgacgccgaaccccgttccccgtccgcgacgaccctacaaacgaccccgcgtccccaccgacgaaaactcgaaaaaaaacgaacgacgacgctactactaacgacgaccgactaaatacgaaacccgcgcaaacccgacgacgaacgacgactctcgactccgaaaaacgaatcgcgaaacgcaaaaacccgatcgcgctaaccataacctccaactttaacgacataatcaaacaaaactacgtaaaaatccgcaacaaaaaacttaaaataaataactcgctcgacttactccttccccgacgctcgttc

SEQ ID NO: 20027 - DNA, 901 bp, Artificial Sequence
  chemically treated genomic DNA (Homo sapiens) CpG-island No: 20027
attttttaacggggtagagatttggaacggtcgcgagtgtttgggaataaaaatgtattgtaaataaggttaatgaaataagtgtttcgttttcgttggtttttcgcgttggaagtgtttttattgtttttttttcgttgtatagtttgcgagtggagatttagagttcgggaatgaggcgtcgtgtttttaggaatttcgcgttcggggagcgttgagggatcggggagtcgggtggggagcgggtttcggggcgttcggcggcggaggcgtttttattcgcgcggagagggatggagcgcgttttgcgagcgttttcgagtttagttattttacgggttagggggagggagcggggtcggcgtattagttcgtttttttcggttcgtttttttttttcgcgtcggggagtcgcggtggtgcgtttcggttagttgtgcgtcgtcgagcgaggcgttagttcgtgggtgttgtcgggggcggcggcgcggtgggggttttcgtagttggcggaggcgcgggtcgcggcgttgggttcgcggcggggagcgaaggtgagcgttagaacgcggagggttggcgcggttcgcggcgtcgggtttcgtttttcgttcgcggcggttttgtaggcgatttcgcgtttttatcggcgggagttcggggaagagcgggcggcggcgttgttgttggcggcggtcggttggatgcgagattcgcgtagattcggcggcggacggcggttttcgatttcggagagcggatcgcggggcgtaggagttcgatcgcgttggttatggtttttaattttaacgatatagttaagtagggttacgtgaaaattcgtagtaggaagtttggggtgagtggttcgttcggtttgtttttttttcggcgttcgttt

SEQ ID NO: 20028 - DNA, 901 bp, Artificial Sequence
  chemically treated genomic DNA (Homo sapiens) CpG-island No: 20028
aaacgaacgccgaaaaaaaaacaaaccgaacgaaccactcaccccaaacttcctactacgaattttcacgtaaccctacttaactatatcgttaaaattaaaaaccataaccaacgcgatcgaactcctacgccccgcgatccgctctccgaaatcgaaaaccgccgtccgccgccgaatctacgcgaatctcgcatccaaccgaccgccgccaacaacaacgccgccgcccgctcttccccgaactcccgccgataaaaacgcgaaatcgcctacaaaaccgccgcgaacgaaaaacgaaacccgacgccgcgaaccgcgccaaccctccgcgttctaacgctcaccttcgctccccgccgcgaacccaacgccgcgacccgcgcctccgccaactacgaaaacccccaccgcgccgccgcccccgacaacacccacgaactaacgcctcgctcgacgacgcacaactaaccgaaacgcaccaccgcgactccccgacgcgaaaaaaaaaaacgaaccgaaaaaaacgaactaatacgccgaccccgctccctccccctaacccgtaaaataactaaactcgaaaacgctcgcaaaacgcgctccatccctctccgcgcgaataaaaacgcctccgccgccgaacgccccgaaacccgctccccacccgactccccgatccctcaacgctccccgaacgcgaaattcctaaaaacacgacgcctcattcccgaactctaaatctccactcgcaaactatacaacgaaaaaaaaacaataaaaacacttccaacgcgaaaaaccaacgaaaacgaaacacttatttcattaaccttatttacaatacatttttattcccaaacactcgcgaccgttccaaatctctaccccgttaaaaaat

SEQ ID NO: 20029 - DNA, 880 bp, Artificial Sequence
  chemically treated genomic DNA (Homo sapiens) CpG-island No: 20029
gaagtttacggggcgaagggtatttgttcgggcgttaggaggttcggtttagggtcgtcgtggcgtttttatttacggtggatttgtaggtttcgtagaaggtgtcgtcggtgaagcgttttattaggttggttttgtttacgtcgcgggagtcgataatgatgatttgtaatttgaagtcggtcggtttggggggttgtttttttcggcggttttggtcgttcgatagcgtcggggagttcgcgtttagatcgtcgtcgttttcggttcgtttttgtagcgcggcgttcggatttatatacgtatgcggttttcgttcggttcgtcgttcgtcgtcgttcgtttttcggttgcgcgtttcgggtttcggcgttttttcggttttcgtcgcgcgcggggggtcggttttcgggttcggttttcgttcgttggagcggtttcggcggttcgtgggtttcgcgttgtaattgcgtcgtcggtcggttttttgcgttcgggtttttttttttttttttttcgtcgttgtcgtcgtcgtcgtcgggagaggaggaagggaagtagttatttcgtagtagcggtagtagtatttcggacgaggaggggtaggaagcgtaggcgcgggcggggcggttggtcgcgaggggtcggaggcgggcgggtgggcgttttttgtcggcgggaggatcgcgcgttcgggtttcggttgggtattgcgcgcggagttttttcgtaattcgcgtcgttttttttttgtttttgttcgtttgttcgttttcgtttttttttttttttcgtcggtttttttatttttttttttttttatttttttttttttttttttttttatttttttttattcggtttttattttgattcgtat

SEQ ID NO: 20030 - DNA, 880 bp, Artificial Sequence
  chemically treated genomic DNA (Homo sapiens) CpG-island No: 20030
atacgaatcaaaataaaaaccgaataaaaaaaaataaaaaaaaaaaaaaaaaaaaaaataaaaaaaaaaaaaaataaaaaaaccgacgaaaaaaaaaaaaaaacgaaaacgaacaaacgaacaaaaacaaaaaaaaaacgacgcgaattacgaaaaaactccgcgcgcaatacccaaccgaaacccgaacgcgcgatcctcccgccgacaaaaaacgcccacccgcccgcctccgacccctcgcgaccaaccgccccgcccgcgcctacgcttcctacccctcctcgtccgaaatactactaccgctactacgaaataactacttcccttcctcctctcccgacgacgacgacgacaacgacgaaaaaaaaaaaaaaaaaaacccgaacgcaaaaaaccgaccgacgacgcaattacaacgcgaaacccacgaaccgccgaaaccgctccaacgaacgaaaaccgaacccgaaaaccgaccccccgcgcgcgacgaaaaccgaaaaaacgccgaaacccgaaacgcgcaaccgaaaaacgaacgacgacgaacgacgaaccgaacgaaaaccgcatacgtatataaatccgaacgccgcgctacaaaaacgaaccgaaaacgacgacgatctaaacgcgaactccccgacgctatcgaacgaccaaaaccgccgaaaaaaacaaccccccaaaccgaccgacttcaaattacaaatcatcattatcgactcccgcgacgtaaacaaaaccaacctaataaaacgcttcaccgacgacaccttctacgaaacctacaaatccaccgtaaataaaaacgccacgacgaccctaaaccgaacctcctaacgcccgaacaaatacccttcgccccgtaaacttc

SEQ ID NO: 20031 - DNA, 880 bp, Artificial Sequence
  chemically treated genomic DNA (Homo sapiens) CpG-island No: 20031
atgcgggttagagtgaaagtcgagtagggaggagtgaaaagggggaaaagggaagagataagaggaagaaaagatgaaagagtcggcggaagagggagggaagcgggggcgggtaggcgagtagaggtagggaaagagcggcgcgggttgcgggaaagtttcgcgcgtagtatttaatcgaggttcgggcgcgcggttttttcgtcggtagggggcgtttattcgttcgttttcggtttttcgcggttagtcgtttcgttcgcgtttgcgttttttgttttttttcgttcgggatgttgttgtcgttattgcggagtagttgttttttttttttttttttcggcggcggcggcggtagcggcggaggaggaggaggaggggattcgggcgtagagagtcggtcggcggcgtagttgtagcgcggagtttacgggtcgtcggggtcgttttagcgggcggaagtcgagttcgggggtcgatttttcgcgcgcggcggaggtcgagggggcgtcggggttcggggcgcgtagtcggggggcgggcggcggcgggcggcgggtcgagcgggagtcgtatgcgtgtatggattcgggcgtcgcgttgtagaggcgggtcgggggcggcggcggtttgggcgcgggtttttcggcgttgtcgggcggttagggtcgtcggaggaagtagttttttaggtcggtcgattttaagttgtaggttattattatcggttttcgcggcgtgggtaagattagtttgatggagcgttttatcgacgatattttttgcgaggtttgtaagtttatcgtgggtaagggcgttacggcgattttgggtcgggttttttggcgttcgggtaggtgtttttcgtttcgtgggtttt

SEQ ID NO: 20032 - DNA, 880 bp, Artificial Sequence
  chemically treated genomic DNA (Homo sapiens) CpG-island No: 20032
aaaacccacgaaacgaaaaacacctacccgaacgccaaaaaacccgacccaaaatcgccgtaacgcccttacccacgataaacttacaaacctcgcaaaaaatatcgtcgataaaacgctccatcaaactaatcttacccacgccgcgaaaaccgataataataacctacaacttaaaatcgaccgacctaaaaaactacttcctccgacgaccctaaccgcccgacaacgccgaaaaacccgcgcccaaaccgccgccgcccccgacccgcctctacaacgcgacgcccgaatccatacacgcatacgactcccgctcgacccgccgcccgccgccgcccgccccccgactacgcgccccgaaccccgacgccccctcgacctccgccgcgcgcgaaaaatcgacccccgaactcgacttccgcccgctaaaacgaccccgacgacccgtaaactccgcgctacaactacgccgccgaccgactctctacgcccgaatcccctcctcctcctcctccgccgctaccgccgccgccgccgaaaaaaaaaaaaaaaaaacaactactccgcaataacgacaacaacatcccgaacgaaaaaaaacaaaaaacgcaaacgcgaacgaaacgactaaccgcgaaaaaccgaaaacgaacgaataaacgccccctaccgacgaaaaaaccgcgcgcccgaacctcgattaaatactacgcgcgaaactttcccgcaacccgcgccgctctttccctacctctactcgcctacccgcccccgcttccctccctcttccgccgactctttcatcttttcttcctcttatctcttcccttttcccccttttcactcctccctactcgactttcactctaacccgcat

SEQ ID NO: 20033 - DNA, 662 bp, Artificial Sequence
  chemically treated genomic DNA (Homo sapiens) CpG-island No: 20033
tgcggggcggggagttgttggagtatattcgtaagaagcggtattttagcgagtcggaagtaagttagattttgcgtagtttcgtgtcggtcgtgagttttatgtacgaggaggcgggcgtggtgtatcgcgattttaagtcggaggtgggcgagttgtttcggcggcggggcggagcggtggcgtcgggggttgtttttgattattatttcgtcgttttcgtagaatattttgtacgtcgacgatacgttcggggtttcggtgaaaattatcgatttcgggttcgcgcggttgcggtcgtagagtttcggggtgtttatgtagacgttttgttttacgttgtagtacgttgttttcgagttgttggcgtagtagggttacgacgagttttgcgatttttggagtttgggcgttattttggtatgggacgcggtttttgaggcggggttagggtcgttcggatttggcgtttttttgatgtgtagtagtacgagggaggggataggggttattttggtgggggcggttgggtttcgttcgaagttgggatcggggtggtttaaatatagaggtggggtcgttttggtgttagagtcggagtattcgggtattgggggttagaagttagggtttattacgcgtgggttttaggagtgttttta

SEQ ID NO: 20034 - DNA, 662 bp, Artificial Sequence
  chemically treated genomic DNA (Homo sapiens) CpG-island No: 20034
taaaaacactcctaaaacccacgcgtaataaaccctaacttctaacccccaatacccgaatactccgactctaacaccaaaacgaccccacctctatatttaaaccaccccgatcccaacttcgaacgaaacccaaccgcccccaccaaaataacccctatcccctccctcgtactactacacatcaaaaaaacgccaaatccgaacgaccctaaccccgcctcaaaaaccgcgtcccataccaaaataacgcccaaactccaaaaatcgcaaaactcgtcgtaaccctactacgccaacaactcgaaaacaacgtactacaacgtaaaacaaaacgtctacataaacaccccgaaactctacgaccgcaaccgcgcgaacccgaaatcgataattttcaccgaaaccccgaacgtatcgtcgacgtacaaaatattctacgaaaacgacgaaataataatcaaaaacaacccccgacgccaccgctccgccccgccgccgaaacaactcgcccacctccgacttaaaatcgcgatacaccacgcccgcctcctcgtacataaaactcacgaccgacacgaaactacgcaaaatctaacttacttccgactcgctaaaataccgcttcttacgaatatactccaacaactccccgccccgca

SEQ ID NO: 20035 - DNA, 662 bp, Artificial Sequence
  chemically treated genomic DNA (Homo sapiens) CpG-island No: 20035
taggggtatttttgagatttacgcgtggtgaattttgatttttaatttttaatattcggatgtttcgattttagtattagagcgattttatttttgtatttgaattatttcgattttagtttcggacgaaatttagtcgtttttattaagatgatttttgttttttttttcgtgttgttgtatattaggaagacgttaggttcgagcgattttgatttcgttttaaggatcgcgttttatattagaatgacgtttaggttttagaggtcgtaggattcgtcgtagttttgttgcgttagtagttcgggggtagcgtattgtagcgtgaagtagggcgtttgtatgggtatttcgggattttgcggtcgtaatcgcgcgaattcgaagtcgatgatttttatcggggtttcgggcgtgtcgtcggcgtataggatgttttgcgagggcggcggggtagtggttagaggtagttttcggcgttatcgtttcgtttcgtcgtcgaggtagttcgtttattttcggtttgaggtcgcggtgtattacgttcgttttttcgtgtatgaagtttacggtcgatacgaggttgcgtaggatttggtttgttttcgattcgttgaagtgtcgttttttgcggatgtgttttagtagtttttcgtttcgta

SEQ ID NO: 20036 - DNA, 662 bp, Artificial Sequence
  chemically treated genomic DNA (Homo sapiens) CpG-island No: 20036
tacgaaacgaaaaactactaaaacacatccgcaaaaaacgacacttcaacgaatcgaaaacaaaccaaatcctacgcaacctcgtatcgaccgtaaacttcatacacgaaaaaacgaacgtaatacaccgcgacctcaaaccgaaaataaacgaactacctcgacgacgaaacgaaacgataacgccgaaaactacctctaaccactaccccgccgccctcgcaaaacatcctatacgccgacgacacgcccgaaaccccgataaaaatcatcgacttcgaattcgcgcgattacgaccgcaaaatcccgaaatacccatacaaacgccctacttcacgctacaatacgctacccccgaactactaacgcaacaaaactacgacgaatcctacgacctctaaaacctaaacgtcattctaatataaaacgcgatccttaaaacgaaatcaaaatcgctcgaacctaacgtcttcctaatatacaacaacacgaaaaaaaaaacaaaaatcatcttaataaaaacgactaaatttcgtccgaaactaaaatcgaaataattcaaatacaaaaataaaatcgctctaatactaaaatcgaaacatccgaatattaaaaattaaaaatcaaaattcaccacgcgtaaatctcaaaaataccccta

SEQ ID NO: 20037 - DNA, 681 bp, Artificial Sequence
  chemically treated genomic DNA (Homo sapiens) CpG-island No: 20037
gcgcggtaggggcggcgggcgagggcgcgagttcggaggacgcggcgggttttttttcggcggtcgggttcgaggcgggggtcggtttttatagtcgatcgggtcgcgcgtcgtttttgaagtggtcgtagttgcgtttcggttcgcggttaattttcgtcgacgcgggcgtttcgttttttcgtttttttcgtatagtaatagtgttcgcgttgaatggcgttggttaattatttcgttcgtattatcgcgggtgaatgagagaattcggtattgtgcgcggcgaatggagaaaataagatagttattgttttcgtacgttaaacgagggtttgatgtcgttggggcgagcgaggtattatttttcgttatttttttttttagagtttcggattttttagttgggttcggtttcggcgtattcgcggcggcggagggaaattgaggaagcggtgtttgttttttcgaggaaataggttttttatttttcgtggaagttgggcggatacgcgcggttttcggattcgttttcgttttttttttcgggttttttttcgagttttttttatttgtagatttttaggggcgttttaattgagcgcgtagttgtttttaatttaggaaaaacgggtacggttttgtatttaaagatttaattttatttcgtcgatatatattaaa

SEQ ID NO: 20038 - DNA, 681 bp, Artificial Sequence
  chemically treated genomic DNA (Homo sapiens) CpG-island No: 20038
tttaatatatatcgacgaaataaaattaaatctttaaatacaaaaccgtacccgtttttcctaaattaaaaacaactacgcgctcaattaaaacgcccctaaaaatctacaaataaaaaaaactcgaaaaaaaacccgaaaaaaaaaacgaaaacgaatccgaaaaccgcgcgtatccgcccaacttccacgaaaaataaaaaacctatttcctcgaaaaaacaaacaccgcttcctcaatttccctccgccgccgcgaatacgccgaaaccgaacccaactaaaaaatccgaaactctaaaaaaaaaaataacgaaaaataatacctcgctcgccccaacgacatcaaaccctcgtttaacgtacgaaaacaataactatcttattttctccattcgccgcgcacaataccgaattctctcattcacccgcgataatacgaacgaaataattaaccaacgccattcaacgcgaacactattactatacgaaaaaaacgaaaaaacgaaacgcccgcgtcgacgaaaattaaccgcgaaccgaaacgcaactacgaccacttcaaaaacgacgcgcgacccgatcgactataaaaaccgacccccgcctcgaacccgaccgccgaaaaaaaacccgccgcgtcctccgaactcgcgccctcgcccgccgcccctaccgcgc

SEQ ID NO: 20039 - DNA, 681 bp, Artificial Sequence
  chemically treated genomic DNA (Homo sapiens) CpG-island No: 20039
tttggtgtgtatcggcgaaatgggattaggtttttgaatgtagagtcgtgttcgttttttttgaattaaggataattgcgcgtttagttagagcgtttttgagaatttgtaggtggagaaggttcggggaggggttcggagggagggacgagggcgagttcgggggtcgcgcgtgttcgtttagtttttacggaaggtgaagggtttattttttcggggagataggtatcgtttttttagttttttttcgtcgtcgcgagtgcgtcggggtcgggtttagttggggaattcgaggttttgggggagggggtggcgggaaatggtgtttcgttcgttttagcgatattaaattttcgtttggcgtgcgaggataatggttgttttattttttttattcgtcgcgtataatgtcggatttttttatttattcgcggtggtgcgagcgaggtaattagttagcgttatttagcgcggatattattgttatgcgggaggggcgggggggcgggacgttcgcgtcggcggggattagtcgcgggtcggggcgtagttgcggttattttaaaggcggcgcgcggttcggtcggttgtgggaatcggttttcgtttcgggttcggtcgtcgggaaggggttcgtcgcgtttttcgggttcgcgttttcgttcgtcgtttttgtcgcgt

SEQ ID NO: 20040 - DNA, 681 bp, Artificial Sequence
  chemically treated genomic DNA (Homo sapiens) CpG-island No: 20040
acgcgacaaaaacgacgaacgaaaacgcgaacccgaaaaacgcgacgaaccccttcccgacgaccgaacccgaaacgaaaaccgattcccacaaccgaccgaaccgcgcgccgcctttaaaataaccgcaactacgccccgacccgcgactaatccccgccgacgcgaacgtcccgcccccccgcccctcccgcataacaataatatccgcgctaaataacgctaactaattacctcgctcgcaccaccgcgaataaataaaaaaatccgacattatacgcgacgaataaaaaaaataaaacaaccattatcctcgcacgccaaacgaaaatttaatatcgctaaaacgaacgaaacaccatttcccgccaccccctcccccaaaacctcgaattccccaactaaacccgaccccgacgcactcgcgacgacgaaaaaaaactaaaaaaacgatacctatctccccgaaaaaataaacccttcaccttccgtaaaaactaaacgaacacgcgcgacccccgaactcgccctcgtccctccctccgaacccctccccgaaccttctccacctacaaattctcaaaaacgctctaactaaacgcgcaattatccttaattcaaaaaaaacgaacacgactctacattcaaaaacctaatcccatttcgccgatacacaccaaa

SEQ ID NO: 20041 - DNA, 1063 bp, Artificial Sequence
  chemically treated genomic DNA (Homo sapiens) CpG-island No: 20041
ggcgtggtcggttcgaatttgttttttaggtttagaacggagttcgtagttcgtaattcgttgtggtcgtagcgggtcgcgtttttcgttttcgttttaggagcggtcgaggatttgtttagttgcgggcgttaagttttggtcgtattttttttttcggcggagggagtcggttggcgttgcggtttttaaggcgcgcggacgtcgcggagggtagttagtcgcgcgggagcgggtagcgcgcgcgagggcgttgggcgtcgtcgcgaggcggggaagcgcggggtcgcggcggtgcgggttttagggcggcggtcgtcgtcgtcgtagtagcgtttcgagcggggagggtcgaggaggttcgacgagttggggatggagagtatcgggttttttattgttttagagcgcgtgtgcggttttgggcgcgtatagtgacggtgacggtatttttggttcggtagcgtcgaggtcgtttcgttagatagttagcggtcggcggtaggtcgggttatgagcggtaggggtcgggtcgggtttcgttgattttggtttcgcgcggtagtttttttagttttcgtttcggtttttcggtatgagagttcgttcgggttcggggttgcggttgttttagattcgtcgtacgttggcgcgtttcgggttcgcggagtcgcggtgttgatatttgcgtcgtattgcgtcgttcgttcgttcgttgtgtgtttcgggggcgcggttatggaggtggtgggtgatttcgagtatagtaagagggatttcgtgggatacggggttttcgtcgtggtttttcgggggcggtatcgttaggtgagcgtcggtcggggcgaggtcgggtttcgggcggtaggtacggggttaggtggttttgaaatttggcgtagtcgcgagtcgagattttcgattcggttagtcgttcgggtatgttattgtgcgcgtagttcgtttcgtcgtttgttttggttttgtgagggttgttgtgaggtttaagtttttggtagcgtttcgtttatcgatcggttgttgttgatttttttgtgtgttt

SEQ ID NO: 20042 - DNA, 1063 bp, Artificial Sequence
  chemically treated genomic DNA (Homo sapiens) CpG-island No: 20042
aaacacacaaaaaaatcaacaacaaccgatcgataaacgaaacgctaccaaaaacttaaacctcacaacaaccctcacaaaaccaaaacaaacgacgaaacgaactacgcgcacaataacatacccgaacgactaaccgaatcgaaaatctcgactcgcgactacgccaaatttcaaaaccacctaaccccgtacctaccgcccgaaacccgacctcgccccgaccgacgctcacctaacgataccgcccccgaaaaaccacgacgaaaaccccgtatcccacgaaatccctcttactatactcgaaatcacccaccacctccataaccgcgcccccgaaacacacaacgaacgaacgaacgacgcaatacgacgcaaatatcaacaccgcgactccgcgaacccgaaacgcgccaacgtacgacgaatctaaaacaaccgcaaccccgaacccgaacgaactctcataccgaaaaaccgaaacgaaaactaaaaaaactaccgcgcgaaaccaaaatcaacgaaacccgacccgacccctaccgctcataacccgacctaccgccgaccgctaactatctaacgaaacgacctcgacgctaccgaaccaaaaataccgtcaccgtcactatacgcgcccaaaaccgcacacgcgctctaaaacaataaaaaacccgatactctccatccccaactcgtcgaacctcctcgaccctccccgctcgaaacgctactacgacgacgacgaccgccgccctaaaacccgcaccgccgcgaccccgcgcttccccgcctcgcgacgacgcccaacgccctcgcgcgcgctacccgctcccgcgcgactaactaccctccgcgacgtccgcgcgccttaaaaaccgcaacgccaaccgactccctccgccgaaaaaaaaaatacgaccaaaacttaacgcccgcaactaaacaaatcctcgaccgctcctaaaacgaaaacgaaaaacgcgacccgctacgaccacaacgaattacgaactacgaactccgttctaaacctaaaaaacaaattcgaaccgaccacgcc

SEQ ID NO: 20043 - DNA, 1063 bp, Artificial Sequence
  chemically treated genomic DNA (Homo sapiens) CpG-island No: 20043
gggtatataggaggattagtagtagtcggtcggtaggcggagcgttgttagaggtttgggttttataataatttttataggattaaaataaacggcgagacgggttgcgcgtataatagtatattcgggcggttagtcgagtcgggggtttcggttcgcggttgcgttaagttttagaattatttagtttcgtgtttgtcgttcggggttcggtttcgtttcggtcggcgtttatttggcggtgtcgttttcggaagattacggcgaaggtttcgtgttttacgagattttttttgttgtattcgaagttatttattatttttatggtcgcgttttcggggtatatagcggacgggcgggcggcgtagtgcggcgtaggtattagtatcgcggtttcgcgggttcggagcgcgttagcgtgcggcgggtttggggtagtcgtagtttcgggttcgggcggatttttatgtcgagagatcggagcggaaattggggaagttgtcgcgcggagttagggttagcgaggttcggttcggtttttgtcgtttatggttcggtttgtcgtcggtcgttggttgtttggcgaagcggtttcggcgttgtcgggttaggggtgtcgttatcgttattgtgcgcgtttagagtcgtatacgcgttttgaggtagtgaggggttcggtattttttatttttagttcgtcgggttttttcggtttttttcgttcggggcgttgttgcgacggcgacggtcgtcgttttagaattcgtatcgtcgcggtttcgcgttttttcgtttcgcggcggcgtttaacgttttcgcgcgcgttattcgttttcgcgcgattggttgtttttcgcgacgttcgcgcgttttgaaggtcgtagcgttagtcggtttttttcgtcggggaaaggagtgcggttagggtttggcgttcgtagttgggtagattttcggtcgtttttgaggcggggacgaagggcgcgattcgttgcggttatagcgggttacgggttgcgggtttcgttttgggtttggggagtagattcgagtcgattacgtt

SEQ ID NO: 20044 - DNA, 1063 bp, Artificial Sequence
  chemically treated genomic DNA (Homo sapiens) CpG-island No: 20044
aacgtaatcgactcgaatctactccccaaacccaaaacgaaacccgcaacccgtaacccgctataaccgcaacgaatcgcgcccttcgtccccgcctcaaaaacgaccgaaaatctacccaactacgaacgccaaaccctaaccgcactcctttccccgacgaaaaaaaccgactaacgctacgaccttcaaaacgcgcgaacgtcgcgaaaaacaaccaatcgcgcgaaaacgaataacgcgcgcgaaaacgttaaacgccgccgcgaaacgaaaaaacgcgaaaccgcgacgatacgaattctaaaacgacgaccgtcgccgtcgcaacaacgccccgaacgaaaaaaaccgaaaaaacccgacgaactaaaaataaaaaataccgaacccctcactacctcaaaacgcgtatacgactctaaacgcgcacaataacgataacgacacccctaacccgacaacgccgaaaccgcttcgccaaacaaccaacgaccgacgacaaaccgaaccataaacgacaaaaaccgaaccgaacctcgctaaccctaactccgcgcgacaacttccccaatttccgctccgatctctcgacataaaaatccgcccgaacccgaaactacgactaccccaaacccgccgcacgctaacgcgctccgaacccgcgaaaccgcgatactaatacctacgccgcactacgccgcccgcccgtccgctatataccccgaaaacgcgaccataaaaataataaataacttcgaatacaacaaaaaaaatctcgtaaaacacgaaaccttcgccgtaatcttccgaaaacgacaccgccaaataaacgccgaccgaaacgaaaccgaaccccgaacgacaaacacgaaactaaataattctaaaacttaacgcaaccgcgaaccgaaacccccgactcgactaaccgcccgaatatactattatacgcgcaacccgtctcgccgtttattttaatcctataaaaattattataaaacccaaacctctaacaacgctccgcctaccgaccgactactactaatcctcctatataccc

SEQ ID NO: 20045 - DNA, 979 bp, Artificial Sequence
  chemically treated genomic DNA (Homo sapiens) CpG-island No: 20045
acggagtatcggggaggaatcgtggggtgcgtaggcgtcggagcgttcgggttcggttcggatcgaaggtttgcgcggtgaaggtgtggtgtttgtgtttcggggaaagggttgttttttcgggggattgtttcgtagcgaggtttgttttgttcgtagttgggcgttttttggggagcgattgagcgtaagggcgggtcgggaggcgcgaggcgagtacgatgttttagggttttaaggattcgtgtgcgtgtgcgtgtgtaaagtggggcggtgtagggcgtgtgtacggtacgggcgagacgcgcgtcggtgcgggcgtcgggcgtcgtcgggcgtaattatagtataaagttcgggcgtcgcggggcgttggttcggagaatttatcggacgcgtagaatcggatcggtatttttttcgttagtattttaacgcggagttatagcgtttagggatcggagggtaggcggcggcggtaaaggatattacgtaagtttttacgtaattttttcgagtagtgtaagtttttaggattggcgcgcgtttcggttattcggagcgcgtatcgttcgtatttcggcgcgtttttcgcgcggtgtagggaattatagcgcgggcgggtattaaggggaaaggaggaggcgtggtttggtcgaggagttaatgggtcgggaggggcgcgcgggggaggagtttaggtgtagagtgtcgattggttagttcgtttttcggtatgtagatacggtgggagttacgtgttaggggtcgggacgattttttgttggaggttaacgcggggcggggaagggggcgcgagcgtttcgtttggttgaagcggggggaggggggtttttgttagttagagtaataagatggtcgcggtggtagttttttattttagcgcgacggtttcggggagtcgtagtcgttcgtcggtcgggttcgtcggcggggtaattttgagcgtcgtttcggt

SEQ ID NO: 20046 - DNA, 979 bp, Artificial Sequence
  chemically treated genomic DNA (Homo sapiens) CpG-island No: 20046
accgaaacgacgctcaaaattaccccgccgacgaacccgaccgacgaacgactacgactccccgaaaccgtcgcgctaaaataaaaaactaccaccgcgaccatcttattactctaactaacaaaaacccccctccccccgcttcaaccaaacgaaacgctcgcgcccccttccccgccccgcgttaacctccaacaaaaaatcgtcccgacccctaacacgtaactcccaccgtatctacataccgaaaaacgaactaaccaatcgacactctacacctaaactcctcccccgcgcgcccctcccgacccattaactcctcgaccaaaccacgcctcctcctttccccttaatacccgcccgcgctataattccctacaccgcgcgaaaaacgcgccgaaatacgaacgatacgcgctccgaataaccgaaacgcgcgccaatcctaaaaacttacactactcgaaaaaattacgtaaaaacttacgtaatatcctttaccgccgccgcctaccctccgatccctaaacgctataactccgcgttaaaatactaacgaaaaaaataccgatccgattctacgcgtccgataaattctccgaaccaacgccccgcgacgcccgaactttatactataattacgcccgacgacgcccgacgcccgcaccgacgcgcgtctcgcccgtaccgtacacacgccctacaccgccccactttacacacgcacacgcacacgaatccttaaaaccctaaaacatcgtactcgcctcgcgcctcccgacccgcccttacgctcaatcgctccccaaaaaacgcccaactacgaacaaaacaaacctcgctacgaaacaatcccccgaaaaaacaaccctttccccgaaacacaaacaccacaccttcaccgcgcaaaccttcgatccgaaccgaacccgaacgctccgacgcctacgcaccccacgattcctccccgatactccgt

SEQ ID NO: 20047 - DNA, 979 bp, Artificial Sequence
  chemically treated genomic DNA (Homo sapiens) CpG-island No: 20047
gtcggggcggcgtttaagattgtttcgtcggcgggttcggtcggcgggcggttacggtttttcggggtcgtcgcgttgaggtggggagttgttatcgcggttattttgttgttttaattgataagaattttttttttttcgttttagttagacggggcgttcgcgttttttttttcgtttcgcgttggtttttaataggaagtcgtttcggtttttagtacgtgatttttatcgtatttgtatatcggagggcgaattggttaatcggtattttgtatttgagtttttttttcgcgcgtttttttcggtttattggtttttcggttaggttacgtttttttttttttttttaatattcgttcgcgttgtggttttttgtatcgcgcggggagcgcgtcggggtgcgagcggtgcgcgtttcgagtggtcgggacgcgcgttagttttgggagtttgtattgttcgggggggttacgtggagatttgcgtggtgttttttatcgtcgtcgtttgtttttcggtttttgggcgttgtggtttcgcgttagggtgttggcgggaggggtgtcgattcggttttgcgcgttcggtgggtttttcgggttagcgtttcgcggcgttcgggttttatgttgtaattgcgttcggcggcgttcggcgttcgtatcggcgcgcgtttcgttcgtgtcgtgtatacgttttgtatcgttttattttgtatacgtatacgtatacgagtttttggggttttggagtatcgtgttcgtttcgcgtttttcggttcgtttttgcgtttagtcgttttttagggagcgtttagttgcgagtaaaataagtttcgttgcgaaatagtttttcggggagatagtttttttttcggagtatagatattatatttttatcgcgtaagttttcggttcgggtcgaattcgggcgtttcggcgtttacgtattttacgattttttttcggtgtttcgt

SEQ ID NO: 20048 - DNA, 979 bp, Artificial Sequence
  chemically treated genomic DNA (Homo sapiens) CpG-island No: 20048
acgaaacaccgaaaaaaaatcgtaaaatacgtaaacgccgaaacgcccgaattcgacccgaaccgaaaacttacgcgataaaaatataatatctatactccgaaaaaaaaactatctccccgaaaaactatttcgcaacgaaacttattttactcgcaactaaacgctccctaaaaaacgactaaacgcaaaaacgaaccgaaaaacgcgaaacgaacacgatactccaaaaccccaaaaactcgtatacgtatacgtatacaaaataaaacgatacaaaacgtatacacgacacgaacgaaacgcgcgccgatacgaacgccgaacgccgccgaacgcaattacaacataaaacccgaacgccgcgaaacgctaacccgaaaaacccaccgaacgcgcaaaaccgaatcgacacccctcccgccaacaccctaacgcgaaaccacaacgcccaaaaaccgaaaaacaaacgacgacgataaaaaacaccacgcaaatctccacgtaacccccccgaacaatacaaactcccaaaactaacgcgcgtcccgaccactcgaaacgcgcaccgctcgcaccccgacgcgctccccgcgcgatacaaaaaaccacaacgcgaacgaatattaaaaaaaaaaaaaaaaacgtaacctaaccgaaaaaccaataaaccgaaaaaaacgcgcgaaaaaaaaactcaaatacaaaataccgattaaccaattcgccctccgatatacaaatacgataaaaatcacgtactaaaaaccgaaacgacttcctattaaaaaccaacgcgaaacgaaaaaaaaaacgcgaacgccccgtctaactaaaacgaaaaaaaaaaaattcttatcaattaaaacaacaaaataaccgcgataacaactccccacctcaacgcgacgaccccgaaaaaccgtaaccgcccgccgaccgaacccgccgacgaaacaatcttaaacgccgccccgac

SEQ ID NO: 20049 - DNA, 720 bp, Artificial Sequence
  chemically treated genomic DNA (Homo sapiens) CpG-island No: 20049
tgatagggtagttttagcgttcgtcgcgttttcgtcgtcgttatcgtcgtagtagtcgcgggttcgttcgagtcggaggcggagggagcggagcggtttcgcgtttagtcgttcgtagttgttatcgtcgtcgtcgtcgtcgtttaggattcggatttcgtcggagtcgtatttcgtcgggcgtgaggaggaggacgcgtcgcggcgttgtcggggtcggatttggatttgtcgggacgcgtcgtcgtttattcgttcgcgtcgtcgtcgtagtcgtcgtcgtcgttcgcgtcgggatttgagttcgtggcgtcggcgttgagcgggttttcgtcgttcgcgtattttcgaggttttcgggcggttgttcgtgtcgtcgtcgtcgttaggttcgcgttatcggagtttcgcggagtcgtcgtcgtcgtcggggacggagtttaggtgagcgcggtagttcgttcgtttttcgtcgtagtcgtaattttgtcgggaggttcgcgggttttttgttcggtcgagtcgagtcggggcgggcgttggtttttagcgattcgcgtgcggcgttaggtttcgggtcggtcgggtttgaggggagcggcgggaagcggtcggggtcggggcgcgtgtgtgttagtgtgagacggggttgtgtagacgttcggtgtgtattataattaaacgggagtggaatggagggttgaagatggatgtgttttt

SEQ ID NO: 20050 - DNA, 720 bp, Artificial Sequence
  chemically treated genomic DNA (Homo sapiens) CpG-island No: 20050
aaaaacacatccatcttcaaccctccattccactcccgtttaattataatacacaccgaacgtctacacaaccccgtctcacactaacacacacgcgccccgaccccgaccgcttcccgccgctcccctcaaacccgaccgacccgaaacctaacgccgcacgcgaatcgctaaaaaccaacgcccgccccgactcgactcgaccgaacaaaaaacccgcgaacctcccgacaaaattacgactacgacgaaaaacgaacgaactaccgcgctcacctaaactccgtccccgacgacgacgacgactccgcgaaactccgataacgcgaacctaacgacgacgacgacacgaacaaccgcccgaaaacctcgaaaatacgcgaacgacgaaaacccgctcaacgccgacgccacgaactcaaatcccgacgcgaacgacgacgacgactacgacgacgacgcgaacgaataaacgacgacgcgtcccgacaaatccaaatccgaccccgacaacgccgcgacgcgtcctcctcctcacgcccgacgaaatacgactccgacgaaatccgaatcctaaacgacgacgacgacgacgataacaactacgaacgactaaacgcgaaaccgctccgctccctccgcctccgactcgaacgaacccgcgactactacgacgataacgacgacgaaaacgcgacgaacgctaaaactaccctatca

SEQ ID NO: 20051 - DNA, 720 bp, Artificial Sequence
  chemically treated genomic DNA (Homo sapiens) CpG-island No: 20051
gggggtatatttatttttagttttttattttattttcgtttgattgtgatgtatatcgggcgtttgtatagtttcgttttatattagtatatacgcgtttcggtttcggtcgtttttcgtcgttttttttaaattcggtcggttcggggtttggcgtcgtacgcgggtcgttaggggttagcgttcgtttcggttcggttcggtcgaataaagggttcgcgaatttttcggtaaagttgcggttgcggcgaggagcgggcggattgtcgcgtttatttgggtttcgttttcggcggcggcggcggtttcgcggggtttcggtggcgcgggtttggcggcggcggcggtacgaataatcgttcgagggtttcgggagtgcgcgggcggcgggggttcgtttagcgtcggcgttacggatttaggtttcggcgcgggcggcggcggcggttgcggcggcggcgcgggcgagtgggcggcggcgcgtttcggtaggtttaggttcggtttcggtaacgtcgcgacgcgtttttttttttacgttcggcgggatgcggtttcggcggggttcgggttttaggcggcggcggcggcggcggtggtagttgcggacggttgggcgcggggtcgtttcgtttttttcgttttcggttcgggcgggttcgcggttattgcgacggtgacggcggcgggagcgcggcgggcgttgggattgttttgtta

SEQ ID NO: 20052 - DNA, 720 bp, Artificial Sequence
  chemically treated genomic DNA (Homo sapiens) CpG-island No: 20052
taacaaaacaatcccaacgcccgccgcgctcccgccgccgtcaccgtcgcaataaccgcgaacccgcccgaaccgaaaacgaaaaaaacgaaacgaccccgcgcccaaccgtccgcaactaccaccgccgccgccgccgccgcctaaaacccgaaccccgccgaaaccgcatcccgccgaacgtaaaaaaaaaaacgcgtcgcgacgttaccgaaaccgaacctaaacctaccgaaacgcgccgccgcccactcgcccgcgccgccgccgcaaccgccgccgccgcccgcgccgaaacctaaatccgtaacgccgacgctaaacgaacccccgccgcccgcgcactcccgaaaccctcgaacgattattcgtaccgccgccgccgccaaacccgcgccaccgaaaccccgcgaaaccgccgccgccgccgaaaacgaaacccaaataaacgcgacaatccgcccgctcctcgccgcaaccgcaactttaccgaaaaattcgcgaaccctttattcgaccgaaccgaaccgaaacgaacgctaacccctaacgacccgcgtacgacgccaaaccccgaaccgaccgaatttaaaaaaaacgacgaaaaacgaccgaaaccgaaacgcgtatatactaatataaaacgaaactatacaaacgcccgatatacatcacaatcaaacgaaaataaaataaaaaactaaaaataaatataccccc

SEQ ID NO: 20053 - DNA, 786 bp, Artificial Sequence
  chemically treated genomic DNA (Homo sapiens) CpG-island No: 20053
tttttcgtttatttttttagtagcgttttttcgtcgttttttttttttttttttttttttttatcgttttttttcggtttattatcgttaatcgtttttttttttatttcgtatttttttttttttatgtttgttttagttttttttttattttttttttttttttttatcgttttttttttatttttttttttttttttaatcgtcgttttttttagttttttttttatttttttgtcgtttttatatttttattttttcgtagtagcgtttttttgtcgcgtttttttttttttttattatttttttttttttttttttatcgttttttttttacgtttttttttttttattgtttttttttcgcgttttttttataatcgttttgtttttcgtttttttttttttatatcgttttttttttatgtttttttatcgtttcgtagtagcgtttgttagtcgtaattttttttttattttttttttttttttttttatcgttttttttttttagttttttatttttcgttattttttttttttttttattttttcgtagtagcgattttttgtcgcgttttttttttttcgtatttttttttttttttttttattttttatcgttttcgttttcgatcgtttttttgtttatttttttttcgcgttttttaattgttttttatttagaagcgttttacgcgtgcgttcgtttgtgtttttgcgtttggtgtgtttgtgcgtttagttagttttatgagttgggtttttgagtttcgttttaatagt

SEQ ID NO: 20054 - DNA, 786 bp, Artificial Sequence
  chemically treated genomic DNA (Homo sapiens) CpG-island No: 20054
actattaaaacgaaactcaaaaacccaactcataaaactaactaaacgcacaaacacaccaaacgcaaaaacacaaacgaacgcacgcgtaaaacgcttctaaataaaaaacaattaaaaaacgcgaaaaaaaaataaacaaaaaaacgatcgaaaacgaaaacgataaaaaataaaaaaaaaaaaaaaaaaatacgaaaaaaaaaaaacgcgacaaaaaatcgctactacgaaaaaataaaaaaaaaaaaaaaataacgaaaaataaaaaactaaaaaaaaaaaacgataaaaaaaaaaaaaaaaaaaataaaaaaaaaattacgactaacaaacgctactacgaaacgataaaaaaacataaaaaaaaaacgatataaaaaaaaaaaaacgaaaaacaaaacgattataaaaaaaacgcgaaaaaaaaacaataaaaaaaaaaaaacgtaaaaaaaaaacgataaaaaaaaaaaaaaaaaaataataaaaaaaaaaaaaaacgcgacaaaaaaacgctactacgaaaaaataaaaatataaaaacgacaaaaaaataaaaaaaaaactaaaaaaaacgacgattaaaaaaaaaaaaaaaaataaaaaaaaaacgataaaaaaaaaaaaaaaaaataaaaaaaaaactaaaacaaacataaaaaaaaaaaaatacgaaataaaaaaaaaaacgattaacgataataaaccgaaaaaaaacgataaaaaaaaaaaaaaaaaaaaaaaaaacgacgaaaaaacgctactaaaaaaataaacgaaaaa

SEQ ID NO: 20055 - DNA, 786 bp, Artificial Sequence
  chemically treated genomic DNA (Homo sapiens) CpG-island No: 20055
gttgttggggcggagtttaggggtttagtttatggggttggttgggcgtatagatatattaggcgtagggatataggcgggcgtacgcgtggagcgtttttaggtgaaaggtagttggagagcgcgagaagggggtgggtaagaagacgatcgggggcgaagacggtggggagtggaagaggggagaagagggtgcggggagagaaaaacgcggtaggaagtcgttgttgcgagaaggtggggaggggaagaagatggcggagaataagaggttggggaaaaaagacgatgggagggggagagaagaaagtgggaagaagattgcgattgatagacgttgttgcgagacggtgggaggatatgggaagaaaacggtgtgaggggaagaaaacgggggataaaacggttgtggggaaggcgcggggagaagatagtgaggagaagagggcgtggggagaggacggtggggaagaggaagagaagatggtgaggggagagaaaagcgcggtaggaagacgttgttgcgagaaggtggggatatggaggcggtaagaaaatggagaagaggttgggaaagacgacgattgggagaggagaagagggtgggaagaaggcgatggggagaggagaagagggtgggaagaagattaaggtagatatgggaagaaaagggtgcggggtgaggaagaaaacggttggcggtaataggtcgggagaagacggtgaggagggggaggggagaagagggagcggcgggaagacgttgttgggggaataggcgggaag

SEQ ID NO: 20056 - DNA, 786 bp, Artificial Sequence
  chemically treated genomic DNA (Homo sapiens) CpG-island No: 20056
cttcccgcctattcccccaacaacgtcttcccgccgctccctcttctcccctccccctcctcaccgtcttctcccgacctattaccgccaaccgttttcttcctcaccccgcacccttttcttcccatatctaccttaatcttcttcccaccctcttctcctctccccatcgccttcttcccaccctcttctcctctcccaatcgtcgtctttcccaacctcttctccattttcttaccgcctccatatccccaccttctcgcaacaacgtcttcctaccgcgcttttctctcccctcaccatcttctcttcctcttccccaccgtcctctccccacgccctcttctcctcactatcttctccccgcgccttccccacaaccgttttatcccccgttttcttcccctcacaccgttttcttcccatatcctcccaccgtctcgcaacaacgtctatcaatcgcaatcttcttcccactttcttctctccccctcccatcgtcttttttccccaacctcttattctccgccatcttcttcccctccccaccttctcgcaacaacgacttcctaccgcgtttttctctccccgcaccctcttctcccctcttccactccccaccgtcttcgcccccgatcgtcttcttacccacccccttctcgcgctctccaactacctttcacctaaaaacgctccacgcgtacgcccgcctatatccctacgcctaatatatctatacgcccaaccaaccccataaactaaacccctaaactccgccccaacaac

SEQ ID NO: 20057 - DNA, 703 bp, Artificial Sequence
  chemically treated genomic DNA (Homo sapiens) CpG-island No: 20057
agtcgtttttttttttcgggcgcgttgtttgtttgcgtgcgtcgggacgcgcggggtcgagcgtttgaagcgcgttcgtacgcggagcggcgttttttaggagtttcgtttttaggtgcgttttgtaggaggcggggcgcgatttcggcgtcgttagttttgtttgcgttaggagcgcgcgggtgcgcgcggtcgcgttttcgtatagattttagttgggttattcgtattgagttaatagattgagcgcgtttaggtttgatagttttgcggttcgggttttgaggtgaggcgggcgtcgcgggcggcggcggcgtttgaggttagtttgggatagtcgtttttgggggagttgaggggacgaggaggggttggttagcgagggacggcggggagagaaggggagttcggcgtttgaggtgtggggtgaagcgggttcggaagcgggtagaggcggcgagttgagggaaatagattttttttagttttcgggaagcgcgggttgttagtttcggggatgcggtgggagcgtttaggatgcggacgtgagggggtcggggttttgcggcgggggtttcgcgaggtttttttgggatcgggttcggtcgtgggatttcgggatattgtttttgtttggacgttgtcgttttatttttagtaattttagggaaagaaggaaaataaatattgatgtaaattttcg

SEQ ID NO: 20058 - DNA, 703 bp, Artificial Sequence
  chemically treated genomic DNA (Homo sapiens) CpG-island No: 20058
cgaaaatttacatcaatatttattttccttctttccctaaaattactaaaaataaaacgacaacgtccaaacaaaaacaatatcccgaaatcccacgaccgaacccgatcccaaaaaaacctcgcgaaacccccgccgcaaaaccccgaccccctcacgtccgcatcctaaacgctcccaccgcatccccgaaactaacaacccgcgcttcccgaaaactaaaaaaaatctatttccctcaactcgccgcctctacccgcttccgaacccgcttcaccccacacctcaaacgccgaactccccttctctccccgccgtccctcgctaaccaacccctcctcgtcccctcaactcccccaaaaacgactatcccaaactaacctcaaacgccgccgccgcccgcgacgcccgcctcacctcaaaacccgaaccgcaaaactatcaaacctaaacgcgctcaatctattaactcaatacgaataacccaactaaaatctatacgaaaacgcgaccgcgcgcacccgcgcgctcctaacgcaaacaaaactaacgacgccgaaatcgcgccccgcctcctacaaaacgcacctaaaaacgaaactcctaaaaaacgccgctccgcgtacgaacgcgcttcaaacgctcgaccccgcgcgtcccgacgcacgcaaacaaacaacgcgcccgaaaaaaaaaaacgact

SEQ ID NO: 20059 - DNA, 703 bp, Artificial Sequence
  chemically treated genomic DNA (Homo sapiens) CpG-island No: 20059
cggaaatttatattaatatttgttttttttttttttttgaggttgttgagggtggaacgatagcgtttaggtaaaggtagtgtttcgaagttttacggtcggattcggttttaggggagtttcgcggagttttcgtcgtagggtttcgatttttttacgttcgtattttgggcgtttttatcgtattttcgaggttggtaattcgcgtttttcgggagttgagggaggtttgttttttttagttcgtcgtttttgttcgttttcgagttcgttttattttatattttagacgtcgaatttttttttttttttcgtcgtttttcgttggttagttttttttcgtttttttaatttttttagggacggttgttttaggttagttttaagcgtcgtcgtcgttcgcgacgttcgttttattttagggttcgagtcgtagagttgttaggtttggacgcgtttagtttgttgatttagtgcgggtgatttagttgggatttgtgcgagggcgcggtcgcgcgtattcgcgcgtttttggcgtaggtagagttggcggcgtcgaagtcgcgtttcgttttttgtagagcgtatttgagggcggggtttttagaaagcgtcgtttcgcgtacgggcgcgttttagacgttcggtttcgcgcgtttcggcgtacgtaggtaagtagcgcgttcggaagaggagagcggtt

SEQ ID NO: 20060 - DNA, 703 bp, Artificial Sequence
  chemically treated genomic DNA (Homo sapiens) CpG-island No: 20060
aaccgctctcctcttccgaacgcgctacttacctacgtacgccgaaacgcgcgaaaccgaacgtctaaaacgcgcccgtacgcgaaacgacgctttctaaaaaccccgccctcaaatacgctctacaaaaaacgaaacgcgacttcgacgccgccaactctacctacgccaaaaacgcgcgaatacgcgcgaccgcgccctcgcacaaatcccaactaaatcacccgcactaaatcaacaaactaaacgcgtccaaacctaacaactctacgactcgaaccctaaaataaaacgaacgtcgcgaacgacgacgacgcttaaaactaacctaaaacaaccgtccctaaaaaaattaaaaaaacgaaaaaaaactaaccaacgaaaaacgacgaaaaaaaaaaaaaaattcgacgtctaaaatataaaataaaacgaactcgaaaacgaacaaaaacgacgaactaaaaaaaacaaacctccctcaactcccgaaaaacgcgaattaccaacctcgaaaatacgataaaaacgcccaaaatacgaacgtaaaaaaatcgaaaccctacgacgaaaactccgcgaaactcccctaaaaccgaatccgaccgtaaaacttcgaaacactacctttacctaaacgctatcgttccaccctcaacaacctcaaaaaaaaaaaaaaaacaaatattaatataaatttccg

SEQ ID NO: 20061 - DNA, 1093 bp, Artificial Sequence
  chemically treated genomic DNA (Homo sapiens) CpG-island No: 20061
ggggcgcgaaaaagcgaggggcgacgttgttcgtggtttcgggtgttcggcgtttcgcggttttcgttatcgttatttacgtcgggttaggatcgattaggttaggtcgagggcggtttttgattacgcgttttttgttttttagttttcgggcggcggttttcgtaggttcggtatagttgtatagttcgcggtttttaggtatcggcgggtttttggaggggaagcgattgatatagttgtttgtattgcgttattcgttcggttgtttattttcgtggtatttgcgtttttcggttgggtcgggagttagaagtggttgtcgagatcgggagggttcggttagtcgttcgttttcgttttcgcgtttggttttcggttcgcgatttcgcggatttggattataattttcgtcgggtttcgcggtcgggttaatggcgggcgtcggagtatgcggggcgtagcgtttgcgcggcggtttgagtaagcggttgcgcgattggttgcggggtcgggcggtcgcgcggggattgtgggaagcggagtgacggagcgagcggttgttggaggaaggaggtgggggtcgggagcgtaaatggcgttgagatggtttagggttttgtttaaattttagtattgattatttatcggcggaagcggcggcgtaggaggcggcggcggtttagcgggggtatatagtaggttttgttattagttttagtagtggcggttagcgagagttaggtttgggttcggtcggcggcgttcgaggcggggagggaagttgcggggtcgtcgtttttgtttttttaatcgggttttttatttatcgaaagtagagtttttcgtttttttcggtttttatttgtcggttttgttttttcgcgcgagggtttcgcgttcgttcgcgggtcgtagggagcgggagaggcggaggcggttcgtggttaaagtattcgttaggtttcgagggtaagtgaggtgtcgggcggtcgtttaggtcgggagggagtcgggagggtgggggaggtagaggttgggagcgggcggtggaagttttattgtttcgtttatcgggtcgttgaggaagttg

SEQ ID NO: 20062 - DNA, 1093 bp, Artificial Sequence
  chemically treated genomic DNA (Homo sapiens) CpG-island No: 20062
caacttcctcaacgacccgataaacgaaacaataaaacttccaccgcccgctcccaacctctacctcccccaccctcccgactccctcccgacctaaacgaccgcccgacacctcacttaccctcgaaacctaacgaatactttaaccacgaaccgcctccgcctctcccgctccctacgacccgcgaacgaacgcgaaaccctcgcgcgaaaaaacaaaaccgacaaataaaaaccgaaaaaaacgaaaaactctactttcgataaataaaaaacccgattaaaaaaacaaaaacgacgaccccgcaacttccctccccgcctcgaacgccgccgaccgaacccaaacctaactctcgctaaccgccactactaaaactaataacaaaacctactatatacccccgctaaaccgccgccgcctcctacgccgccgcttccgccgataaataatcaatactaaaatttaaacaaaaccctaaaccatctcaacgccatttacgctcccgacccccacctccttcctccaacaaccgctcgctccgtcactccgcttcccacaatccccgcgcgaccgcccgaccccgcaaccaatcgcgcaaccgcttactcaaaccgccgcgcaaacgctacgccccgcatactccgacgcccgccattaacccgaccgcgaaacccgacgaaaattataatccaaatccgcgaaatcgcgaaccgaaaaccaaacgcgaaaacgaaaacgaacgactaaccgaaccctcccgatctcgacaaccacttctaactcccgacccaaccgaaaaacgcaaataccacgaaaataaacaaccgaacgaataacgcaatacaaacaactatatcaatcgcttcccctccaaaaacccgccgatacctaaaaaccgcgaactatacaactataccgaacctacgaaaaccgccgcccgaaaactaaaaaacaaaaaacgcgtaatcaaaaaccgccctcgacctaacctaatcgatcctaacccgacgtaaataacgataacgaaaaccgcgaaacgccgaacacccgaaaccacgaacaacgtcgcccctcgctttttcgcgcccc

SEQ ID NO: 20063 - DNA, 1093 bp, Artificial Sequence
  chemically treated genomic DNA (Homo sapiens) CpG-island No: 20063
taatttttttagcggttcggtgggcgaggtagtgagatttttatcgttcgtttttagtttttgttttttttattttttcggttttttttcggtttaggcggtcgttcgatattttatttattttcggagtttggcgggtgttttggttacgggtcgttttcgtttttttcgttttttacggttcgcgggcgggcgcggaattttcgcgcgggagagtagggtcggtaggtgagagtcgagagaggcgagggattttgttttcggtaaataggaagttcggttgggggggtaggagcggcggtttcgtaattttttttttcgtttcgagcgtcgtcggtcgggtttaggtttagttttcgttggtcgttattgttggagttggtaatagagtttgttgtgtgttttcgttgggtcgtcgtcgttttttgcgtcgtcgttttcgtcggtgaatggttagtgttggagtttgaatagggttttgaattattttaacgttatttgcgttttcggtttttattttttttttttaatagtcgttcgtttcgttatttcgttttttatagttttcgcgcggtcgttcgatttcgtagttaatcgcgtagtcgtttatttaaatcgtcgcgtaggcgttgcgtttcgtatgtttcggcgttcgttattggttcggtcgcggagttcgacgggagttgtagtttaggttcgcgaggtcgcgggtcgaggattaggcgcgggagcgggagcgggcgattggtcgggttttttcggtttcggtagttatttttagttttcggtttagtcgggagacgtaggtgttacggagatgggtagtcgggcgggtggcgtagtgtaggtagttgtattaatcgttttttttttagggattcgtcggtgtttggggatcgcgggttgtgtagttgtgtcgggtttgcggaggtcgtcgttcgggagttgggaggtagggggcgcgtggttaagagtcgttttcgatttggtttggtcggttttggttcggcgtaggtgacgatggcggggatcgcgaggcgtcggatattcgaggttacgagtagcgtcgtttttcgttttttcgcgtttt

SEQ ID NO: 20064 - DNA, 1093 bp, Artificial Sequence
  chemically treated genomic DNA (Homo sapiens) CpG-island No: 20064
aaaacgcgaaaaaacgaaaaacgacgctactcgtaacctcgaatatccgacgcctcgcgatccccgccatcgtcacctacgccgaaccaaaaccgaccaaaccaaatcgaaaacgactcttaaccacgcgccccctacctcccaactcccgaacgacgacctccgcaaacccgacacaactacacaacccgcgatccccaaacaccgacgaatccctaaaaaaaaaacgattaatacaactacctacactacgccacccgcccgactacccatctccgtaacacctacgtctcccgactaaaccgaaaactaaaaataactaccgaaaccgaaaaaacccgaccaatcgcccgctcccgctcccgcgcctaatcctcgacccgcgacctcgcgaacctaaactacaactcccgtcgaactccgcgaccgaaccaataacgaacgccgaaacatacgaaacgcaacgcctacgcgacgatttaaataaacgactacgcgattaactacgaaatcgaacgaccgcgcgaaaactataaaaaacgaaataacgaaacgaacgactattaaaaaaaaaaaataaaaaccgaaaacgcaaataacgttaaaataattcaaaaccctattcaaactccaacactaaccattcaccgacgaaaacgacgacgcaaaaaacgacgacgacccaacgaaaacacacaacaaactctattaccaactccaacaataacgaccaacgaaaactaaacctaaacccgaccgacgacgctcgaaacgaaaaaaaaaattacgaaaccgccgctcctacccccccaaccgaacttcctatttaccgaaaacaaaatccctcgcctctctcgactctcacctaccgaccctactctcccgcgcgaaaattccgcgcccgcccgcgaaccgtaaaaaacgaaaaaaacgaaaacgacccgtaaccaaaacacccgccaaactccgaaaataaataaaatatcgaacgaccgcctaaaccgaaaaaaaaccgaaaaaataaaaaaaacaaaaactaaaaacgaacgataaaaatctcactacctcgcccaccgaaccgctaaaaaaatta

SEQ ID NO: 20065 - DNA, 901 bp, Artificial Sequence
  chemically treated genomic DNA (Homo sapiens) CpG-island No: 20065
atattcggtttttattacgggtgggtgtttaattttcgagaattcgtacgttgggtattatatagggtgaaagtgggagtcgggagcggtgtacgtgtttttcgaaattaagacggataataagaataaattcgggttttaagggtcgttttattttttttttcgcgtttttaattagacggggcgttatcgtttcgaagttcgtagataaagcgttttcggggcggagaggagggattagtttaaagtatttggggttgtatataaaagagggaggggcgcgaggggcggcgcgaagcgagaggtcgcggtatttatttattgagttcgaggagtttttgcgtttgggcgcggtcggggtggaggggggcgcggcgggagtcggggttggcggggtttatacgggttttgtttgggggtttacgttggtcgggggaggagggggaggtcgggtcggaggttcgtcgtttttagggagtttggagggcgagattgcggtagtagatagcggggatggcgcgggtacggtcgacgatatcgggttcgggttttaagacggttgtcgtttcggggcgacggggggagcggtcggtaggggttttcggggcgtcggcggtacgaagttattttcgaagtttattaggggcgcgtcggcggtaggggcggtgggtattggggtcgcggatagttcggcggcgggttttttttttagtatttttagtttttttaggttttcgttttcgtttttttttttttttttttttttttttttttcgttttcgggtttttttacgaattggtatttgaacgcgggttgcggtcggggtgggttgttcgaggacgagattagaggagattggtttaggttttttatggttggagggtggagatgatgttgtag

SEQ ID NO: 20066 - DNA, 901 bp, Artificial Sequence
  chemically treated genomic DNA (Homo sapiens) CpG-island No: 20066
ctacaacatcatctccaccctccaaccataaaaaacctaaaccaatctcctctaatctcgtcctcgaacaacccaccccgaccgcaacccgcgttcaaataccaattcgtaaaaaaacccgaaaacgaaaaaaaaaaaaaaaaaaaaaaaaaaaaaaacgaaaacgaaaacctaaaaaaactaaaaatactaaaaaaaaaacccgccgccgaactatccgcgaccccaatacccaccgcccctaccgccgacgcgcccctaataaacttcgaaaataacttcgtaccgccgacgccccgaaaacccctaccgaccgctccccccgtcgccccgaaacgacaaccgtcttaaaacccgaacccgatatcgtcgaccgtacccgcgccatccccgctatctactaccgcaatctcgccctccaaactccctaaaaacgacgaacctccgacccgacctccccctcctcccccgaccaacgtaaacccccaaacaaaacccgtataaaccccgccaaccccgactcccgccgcgcccccctccaccccgaccgcgcccaaacgcaaaaactcctcgaactcaataaataaataccgcgacctctcgcttcgcgccgcccctcgcgcccctccctcttttatatacaaccccaaatactttaaactaatccctcctctccgccccgaaaacgctttatctacgaacttcgaaacgataacgccccgtctaattaaaaacgcgaaaaaaaaaataaaacgacccttaaaacccgaatttattcttattatccgtcttaatttcgaaaaacacgtacaccgctcccgactcccactttcaccctatataatacccaacgtacgaattctcgaaaattaaacacccacccgtaataaaaaccgaatat

SEQ ID NO: 20067 - DNA, 901 bp, Artificial Sequence
  chemically treated genomic DNA (Homo sapiens) CpG-island No: 20067
ttgtagtattatttttattttttagttatggaagatttggattagttttttttggtttcgttttcggatagtttatttcggtcgtagttcgcgtttaagtattagttcgtgagggagttcgaggacgaggaggaagaagaggaggaggaagaggaggacgaggacgaagatttggaggagttggaggtgttggagaggaagttcgtcgtcgggttgttcgcggttttagtgtttatcgtttttgtcgtcggcgcgtttttgatggatttcggaaatgatttcgtgtcgtcggcgtttcggggatttttgtcggtcgtttttttcgtcgtttcggagcggtagtcgttttgggattcgagttcggtgtcgtcgatcgtgttcgcgttattttcgttgtttgttgtcgtagtttcgttttttaagttttttgaggacgacgagttttcggttcggttttttttttttttttcggttagcgtgagtttttaggtagagttcgtgtggatttcgttagtttcggttttcgtcgcgtttttttttatttcggtcgcgtttaagcgtaggggtttttcgggtttagtgggtgagtgtcgcgatttttcgtttcgcgtcgtttttcgcgttttttttttttttgtgtgtagttttagatgttttgggttggtttttttttttcgtttcgagggcgttttgtttgcggatttcggggcgatggcgtttcgtttggttggaagcgcggggagaagggtggggcggtttttggagttcgggtttgtttttattgttcgttttggtttcggggaatacgtgtatcgttttcggtttttatttttattttgtgtgatgtttagcgtacggattttcggaagttaggtatttattcgtagtaggagtcgggtat

SEQ ID NO: 20068 - DNA, 901 bp, Artificial Sequence
  chemically treated genomic DNA (Homo sapiens) CpG-island No: 20068
atacccgactcctactacgaataaatacctaacttccgaaaatccgtacgctaaacatcacacaaaataaaaataaaaaccgaaaacgatacacgtattccccgaaaccaaaacgaacaataaaaacaaacccgaactccaaaaaccgccccacccttctccccgcgcttccaaccaaacgaaacgccatcgccccgaaatccgcaaacaaaacgccctcgaaacgaaaaaaaaaaaccaacccaaaacatctaaaactacacacaaaaaaaaaaaaaacgcgaaaaacgacgcgaaacgaaaaatcgcgacactcacccactaaacccgaaaaacccctacgcttaaacgcgaccgaaataaaaaaaaacgcgacgaaaaccgaaactaacgaaatccacacgaactctacctaaaaactcacgctaaccgaaaaaaaaaaaaaaaaccgaaccgaaaactcgtcgtcctcaaaaaacttaaaaaacgaaactacgacaacaaacaacgaaaataacgcgaacacgatcgacgacaccgaactcgaatcccaaaacgactaccgctccgaaacgacgaaaaaaacgaccgacaaaaatccccgaaacgccgacgacacgaaatcatttccgaaatccatcaaaaacgcgccgacgacaaaaacgataaacactaaaaccgcgaacaacccgacgacgaacttcctctccaacacctccaactcctccaaatcttcgtcctcgtcctcctcttcctcctcctcttcttcctcctcgtcctcgaactccctcacgaactaatacttaaacgcgaactacgaccgaaataaactatccgaaaacgaaaccaaaaaaaactaatccaaatcttccataactaaaaaataaaaataatactacaa

SEQ ID NO: 20069 - DNA, 605 bp, Artificial Sequence
  chemically treated genomic DNA (Homo sapiens) CpG-island No: 20069
tttcgttacggtttttaaatatatatcgtagtttttttatttatttaataggttttttcgttacggtttttaaatatatatcgtagtttttttatttatttaataggtttttttgttacggtttttaaatatatatcgtagtttttttatttaataggttttttcgttacggtttttaaatatatatcgtagtttttttatttatttaataggttttttcgttacggtttttaaatatatatcgtagtttttttatttatttaataggttttttcgttacggtttttaaatatatatcgtagtttttttatttatttaataggttttttcgttacggtttttaaatatatatcgtagtttttttatttatttaataggttttttcgttacggtttttaaatatatatcgtagtttttttatttatttaataggttttttcgttacggtttttaaatatatatcgtagtttttttatttatttaataggttttttcgttatagtttttaaatatatatcgtagtttttttatttatttaataggttttttcgttacggtttttaaaaaatttttttgtaaagtgttattttttcgagttgtagagt

SEQ ID NO: 20070 - DNA, 605 bp, Artificial Sequence
  chemically treated genomic DNA (Homo sapiens) CpG-island No: 20070
actctacaactcgaaaaaataacactttacaaaaaaattttttaaaaaccgtaacgaaaaaacctattaaataaataaaaaaactacgatatatatttaaaaactataacgaaaaaacctattaaataaataaaaaaactacgatatatatttaaaaaccgtaacgaaaaaacctattaaataaataaaaaaactacgatatatatttaaaaaccgtaacgaaaaaacctattaaataaataaaaaaactacgatatatatttaaaaaccgtaacgaaaaaacctattaaataaataaaaaaactacgatatatatttaaaaaccgtaacgaaaaaacctattaaataaataaaaaaactacgatatatatttaaaaaccgtaacgaaaaaacctattaaataaataaaaaaactacgatatatatttaaaaaccgtaacgaaaaaacctattaaataaaaaaactacgatatatatttaaaaaccgtaacaaaaaaacctattaaataaataaaaaaactacgatatatatttaaaaaccgtaacgaaaaaacctattaaataaataaaaaaactacgatatatatttaaaaaccgtaacgaaa

SEQ ID NO: 20071 - DNA, 605 bp, Artificial Sequence
  chemically treated genomic DNA (Homo sapiens) CpG-island No: 20071
gttttgtaattcgggagggtagtattttgtaagagagttttttagaggtcgtggcgagaggatttgttgggtggatggagggattgcggtgtgtgtttagaggttgtggcgggaggatttgttgggtggatggaggggttgcggtgtgtgtttggaggtcgtggcgggaggatttgttgggtggatggaggggttgcggtgtgtgtttagaggtcgtggcgggaggatttgttgggtggatggaggggttgcggtgtgtgtttggaggtcgtggcgggaggatttgttgggtggatggaggggttgcggtgtgtgtttggaggtcgtggcgggagggtttgttgggtggatggaggggttgcggtgtgtgtttggaggtcgtggcgggagggtttgttgggtggatggaggggttgcggtgtgtgtttggaggtcgtggcgggaggatttgttggatggagggattgcggtgtgtgtttagaggtcgtggtaagaggatttgttgggtggatggaggggttgcggtgtgtgtttggaggtcgtggcgggagggtttgttgggtggatggaggggttgcggtgtgtgtttggaggtcgtggcggga

SEQ ID NO: 20072 - DNA, 605 bp, Artificial Sequence
  chemically treated genomic DNA (Homo sapiens) CpG-island No: 20072
tcccgccacgacctccaaacacacaccgcaacccctccatccacccaacaaaccctcccgccacgacctccaaacacacaccgcaacccctccatccacccaacaaatcctcttaccacgacctctaaacacacaccgcaatccctccatccaacaaatcctcccgccacgacctccaaacacacaccgcaacccctccatccacccaacaaaccctcccgccacgacctccaaacacacaccgcaacccctccatccacccaacaaaccctcccgccacgacctccaaacacacaccgcaacccctccatccacccaacaaatcctcccgccacgacctccaaacacacaccgcaacccctccatccacccaacaaatcctcccgccacgacctctaaacacacaccgcaacccctccatccacccaacaaatcctcccgccacgacctccaaacacacaccgcaacccctccatccacccaacaaatcctcccgccacaacctctaaacacacaccgcaatccctccatccacccaacaaatcctctcgccacgacctctaaaaaactctcttacaaaatactaccctcccgaattacaaaac

SEQ ID NO: 20073 - DNA, 1354 bp, Artificial Sequence
  chemically treated genomic DNA (Homo sapiens) CpG-island No: 20073
ttgcggtggggtgagagtgagttgcggtgcggtgagagtgagttgtcgtgcggtgagtgtgagttgtcgtgcggtgagtgtgagttgtcgtgcggtgagagtgagttgtcgtgcggtaagagtgagttgcggtgcggtgagttagttgtcgtgcggtgagtgtgagttgtcgtgcggtgagagtgagttgtcgtgcggtgagtgtgagttgtcgtgcggtgagagtgagttgtcgtgcggggagagtgagttgtcgtgcggggagagtgagttgcggtgtggtgagagtgagttgtcgtgcggtgagagtgagatgtcgtgcggtgagtgtgagttgcggcgcggtgagagtgagttgtcgtgtggtgagtgttagttgttttgcggtgagagtgagttgtagtgcggtgagagtgagttgtcgtgcggtgagagtgatttgtcgtgcggtgagagtgagttgtcgtgtggtgagagtgagttgtcgtgtggtgtgagttgtcgtgtggtgagagtgagttgtcgtgtggtgtgagttgtcgtgtggtgagagtgagttgtcgtgtggtgagtgtgagttgtcgtgtggtgagtgtgagttgtcgtgcggtgtgagttgtcgtgcggtgagtgtgagttgcggtgtagagagagcgagttgtcgtgcggtgaatgagttgtcgtgcggtgagtgtgagttgtcgtgttgtgagagtgagttgtcgtgcggtgagagtgagttgcggtgcggtgagagtgagttgtcgtgcggtgagagtgagttgtcgtgcggtgagagtgagttgtcgtgcggtgagtgtgagttgtcgtgcggtgagagtgagttgtcgtgcggtgagagtgagttgtcgtgcggtgagtgtgagttgcggtgtagagagagtgagttgtcgtgtggtgagagtgagttgtcgtgtggtgaatgtgagttgtcgtgcggtgagtgtgagttgcggtgtagagagagtgagttgtcgtgtggtgagagtgagttgtcgtgtggtgaatgtgagttgtcgtgcggtgagtgtgagttgcggtgtagagagagtgagttgtcgtgtggtgagagtgagttgtcgtgtggtgagtgtgagttgtcgtgtggtgagagtgagttgtcgtgtggtgagtgtgagttgtcgtgcggtgagtgtgagttgcggcgtggtgagagtgagttgtcgtgcggtgagtgtgagttgcggtgtggtgagagttgtcgtgtggtgagagtgagttgtcgtgcggtgagagtgagttgtcgtgtggtgtgagttgtcgtgtggtgagagtgagttgtcgtgtggtgagagtgagttgtggtgtggtg

SEQ ID NO: 20074 - DNA, 1354 bp, Artificial Sequence
  chemically treated genomic DNA (Homo sapiens) CpG-island No: 20074
caccacaccacaactcactctcaccacacgacaactcactctcaccacacgacaactcacaccacacgacaactcactctcaccgcacgacaactcactctcaccacacgacaactctcaccacaccgcaactcacactcaccgcacgacaactcactctcaccacgccgcaactcacactcaccgcacgacaactcacactcaccacacgacaactcactctcaccacacgacaactcacactcaccacacgacaactcactctcaccacacgacaactcactctctctacaccgcaactcacactcaccgcacgacaactcacattcaccacacgacaactcactctcaccacacgacaactcactctctctacaccgcaactcacactcaccgcacgacaactcacattcaccacacgacaactcactctcaccacacgacaactcactctctctacaccgcaactcacactcaccgcacgacaactcactctcaccgcacgacaactcactctcaccgcacgacaactcacactcaccgcacgacaactcactctcaccgcacgacaactcactctcaccgcacgacaactcactctcaccgcaccgcaactcactctcaccgcacgacaactcactctcacaacacgacaactcacactcaccgcacgacaactcattcaccgcacgacaactcgctctctctacaccgcaactcacactcaccgcacgacaactcacaccgcacgacaactcacactcaccacacgacaactcacactcaccacacgacaactcactctcaccacacgacaactcacaccacacgacaactcactctcaccacacgacaactcacaccacacgacaactcactctcaccacacgacaactcactctcaccgcacgacaaatcactctcaccgcacgacaactcactctcaccgcactacaactcactctcaccgcaaaacaactaacactcaccacacgacaactcactctcaccgcgccgcaactcacactcaccgcacgacatctcactctcaccgcacgacaactcactctcaccacaccgcaactcactctccccgcacgacaactcactctccccgcacgacaactcactctcaccgcacgacaactcacactcaccgcacgacaactcactctcaccgcacgacaactcacactcaccgcacgacaactaactcaccgcaccgcaactcactcttaccgcacgacaactcactctcaccgcacgacaactcacactcaccgcacgacaactcacactcaccgcacgacaactcactctcaccgcaccgcaactcactctcaccccaccgcaa

SEQ ID NO: 20075 - DNA, 1354 bp, Artificial Sequence
  chemically treated genomic DNA (Homo sapiens) CpG-island No: 20075
tattatattatagtttatttttattatacggtagtttatttttattatacggtagtttatattatacggtagtttatttttatcgtacggtagtttatttttattatacggtagtttttattatatcgtagtttatatttatcgtacggtagtttatttttattacgtcgtagtttatatttatcgtacggtagtttatatttattatacggtagtttatttttattatacggtagtttatatttattatacggtagtttatttttattatacggtagtttattttttttgtatcgtagtttatatttatcgtacggtagtttatatttattatacggtaatttatttttattatacggtagtttattttttttgtatcgtagtttatatttatcgtacggtagtttatatttattatacggtaatttatttttattatacggtagtttattttttttgtatcgtagtttatatttatcgtacggtagtttatttttatcgtacggtagtttatttttatcgtacggtagtttatatttatcgtacggtagtttatttttatcgtacggtagtttatttttatcgtacggtagtttatttttatcgtatcgtagtttatttttatcgtacggtagtttatttttatagtacggtagtttatatttatcgtacggtagtttatttatcgtacggtagttcgttttttttgtatcgtagtttatatttatcgtacggtagtttatatcgtacggtagtttatatttattatacggtagtttatatttattatacggtagtttatttttattatacggtagtttatattatacggtagtttatttttattatacggtagtttatattatacggtagtttatttttattatacggtagtttatttttatcgtacggtagattatttttatcgtacggtagtttatttttatcgtattgtagtttatttttatcgtagggtagttgatatttattatacggtagtttatttttatcgcgtcgtagtttatatttatcgtacggtattttatttttatcgtacggtagtttatttttattatatcgtagtttatttttttcgtacggtagtttatttttttcgtacggtagtttatttttatcgtacggtagtttatatttatcgtacggtagtttatttttatcgtacggtagtttatatttatcgtacggtagttgatttatcgtatcgtagtttatttttatcgtacggtagtttatttttatcgtacggtagtttatatttatcgtacggtagtttatatttatcgtacggtagtttatttttatcgtatcgtagtttatttttattttatcgtag

SEQ ID NO: 20076 - DNA, 1354 bp, Artificial Sequence
  chemically treated genomic DNA (Homo sapiens) CpG-island No: 20076
ctacgataaaataaaaataaactacgatacgataaaaataaactaccgtacgataaatataaactaccgtacgataaatataaactaccgtacgataaaaataaactaccgtacgataaaaataaactacgatacgataaatcaactaccgtacgataaatataaactaccgtacgataaaaataaactaccgtacgataaatataaactaccgtacgataaaaataaactaccgtacgaaaaaaataaactaccgtacgaaaaaaataaactacgatataataaaaataaactaccgtacgataaaaataaaataccgtacgataaatataaactacgacgcgataaaaataaactaccgtataataaatatcaactaccctacgataaaaataaactacaatacgataaaaataaactaccgtacgataaaaataatctaccgtacgataaaaataaactaccgtataataaaaataaactaccgtataatataaactaccgtataataaaaataaactaccgtataatataaactaccgtataataaaaataaactaccgtataataaatataaactaccgtataataaatataaactaccgtacgatataaactaccgtacgataaatataaactacgatacaaaaaaaacgaactaccgtacgataaataaactaccgtacgataaatataaactaccgtactataaaaataaactaccgtacgataaaaataaactacgatacgataaaaataaactaccgtacgataaaaataaactaccgtacgataaaaataaactaccgtacgataaatataaactaccgtacgataaaaataaactaccgtacgataaaaataaactaccgtacgataaatataaactacgatacaaaaaaaataaactaccgtataataaaaataaattaccgtataataaatataaactaccgtacgataaatataaactacgatacaaaaaaaataaactaccgtataataaaaataaattaccgtataataaatataaactaccgtacgataaatataaactacgatacaaaaaaaataaactaccgtataataaaaataaactaccgtataataaatataaactaccgtataataaaaataaactaccgtataataaatataaactaccgtacgataaatataaactacgacgtaataaaaataaactaccgtacgataaatataaactacgatataataaaaactaccgtataataaaaataaactaccgtacgataaaaataaactaccgtataatataaactaccgtataataaaaataaactaccgtataataaaaataaactataatataata

SEQ ID NO: 20077 - DNA, 1037 bp, Artificial Sequence
  chemically treated genomic DNA (Homo sapiens) CpG-island No: 20077
  unsure (857)
agttcggtcgttgcggggcgtagtcgttttttgttttcgggaggcgtcgtcggttcgcgtcgttaggtttcgttttttgtttaggtagcggttgcgggatcgttcgggaatcgggcgcgcgggagtcgaggagcgtttggttcggtaaaagtttcgtatttgtagttgtcggggtcgcgagtttatagttttaggagtcgcgcgaggtttaggacgtttcgcgaggcgttcggattttcgtttcggtagtcgtttttttagcggcgcgcggttttaacgttttagagtagcgcgggtttcgcgttttatagtcgcgtcggttttaggttagtgaacggcgatagggattcgggaacgcggttggtcgcggtttatacgtaggttatcggtaggagtcgatttggttcggtagggttcggtggttcgagtagtcgtagcggttaggtaggggggtttcgtatggcgttgcgtgcgattcgtacgttttagttcgtcggttaggcgcgcgtaaagttcgaggattttttcggttcggtttcgagtaaagggcgtggacgcggtggcgttcgttttttttcgttggttgttattcgttttatcgtgtttgtattttcgggttgcgttcgttttcgttttattttcgttcgcgcggtgtcgcgttttttcgttttatttcggggattgtagttattcggattttgtaagttattttttcgagcgtttttaattcgttcgggtgttttttttgtagcgtttttaattgttcgttggcggaggagcgtcgggcgcgttagttgggacgaggttcgggaagtttaggagtacggttgcgtttgcgtattgggcgtagggaattntttcgcgtttcgtcgttttttttggtttgaattggggaacgatacgagtttttttttacgtcggtagatcgggcggagcgcgtaaacgcgattatacgaaggtcggtataaagatggggtcggaggatatcgtgttggatacggcgtgggtcgggtttttcggttcggagattttgttgg

SEQ ID NO: 20078 - DNA, 1037 bp, Artificial Sequence
  chemically treated genomic DNA (Homo sapiens) CpG-island No: 20078
  unsure (181)
ccaacaaaatctccgaaccgaaaaacccgacccacgccgtatccaacacgatatcctccgaccccatctttataccgaccttcgtataatcgcgtttacgcgctccgcccgatctaccgacgtaaaaaaaaactcgtatcgttccccaattcaaaccaaaaaaaacgacgaaacgcgaaanaattccctacgcccaatacgcaaacgcaaccgtactcctaaacttcccgaacctcgtcccaactaacgcgcccgacgctcctccgccaacgaacaattaaaaacgctacaaaaaaaacacccgaacgaattaaaaacgctcgaaaaaataacttacaaaatccgaataactacaatccccgaaataaaacgaaaaaacgcgacaccgcgcgaacgaaaataaaacgaaaacgaacgcaacccgaaaatacaaacacgataaaacgaataacaaccaacgaaaaaaaacgaacgccaccgcgtccacgccctttactcgaaaccgaaccgaaaaaatcctcgaactttacgcgcgcctaaccgacgaactaaaacgtacgaatcgcacgcaacgccatacgaaacccccctacctaaccgctacgactactcgaaccaccgaaccctaccgaaccaaatcgactcctaccgataacctacgtataaaccgcgaccaaccgcgttcccgaatccctatcgccgttcactaacctaaaaccgacgcgactataaaacgcgaaacccgcgctactctaaaacgttaaaaccgcgcgccgctaaaaaaacgactaccgaaacgaaaatccgaacgcctcgcgaaacgtcctaaacctcgcgcgactcctaaaactataaactcgcgaccccgacaactacaaatacgaaacttttaccgaaccaaacgctcctcgactcccgcgcgcccgattcccgaacgatcccgcaaccgctacctaaacaaaaaacgaaacctaacgacgcgaaccgacgacgcctcccgaaaacaaaaaacgactacgccccgcaacgaccgaact

SEQ ID NO: 20079 - DNA, 1037 bp, Artificial Sequence
  chemically treated genomic DNA (Homo sapiens) CpG-island No: 20079
  unsure (181)
ttagtagggttttcgggtcggggaattcggtttacgtcgtatttagtacggtgtttttcggttttatttttgtgtcggttttcgtgtggtcgcgtttgcgcgtttcgttcggtttgtcggcgtgagaaagagttcgtgtcgttttttagtttagattagaggggacggcgaagcgcgaaanagttttttgcgtttagtacgtaggcgtagtcgtgtttttgggtttttcgggtttcgttttagttggcgcgttcggcgttttttcgttagcgggtagttgggggcgttgtagggagggtattcgagcgggttgggggcgttcggaagggtggtttgtaaggttcgggtagttgtagttttcggagtggggcggagaggcgcggtatcgcgcggacgaggatggggcgggggcgggcgtagttcgagggtgtaggtacgataaggcgggtgatagttagcggggaggggcgggcgttatcgcgtttacgttttttgttcggggtcgggtcgggagggttttcgggttttgcgcgcgtttggtcggcgggttgaggcgtacgggtcgtacgtagcgttatgcgaggtttttttgtttggtcgttgcggttgttcgagttatcgagttttgtcgagttaggtcggtttttgtcggtagtttgcgtgtgggtcgcggttagtcgcgttttcgggtttttatcgtcgtttattggtttgaggtcggcgcggttatggggcgcggggttcgcgttgttttggggcgttggagtcgcgcgtcgttggaggagcggttgtcggggcgggggttcgggcgtttcgcggggcgttttgggtttcgcgcggtttttggggttgtgggttcgcggtttcggtagttgtaggtgcggggtttttgtcgggttaggcgtttttcggttttcgcgcgttcggttttcgggcggtttcgtagtcgttgtttgggtaggggacgaggtttggcggcgcgggtcggcggcgtttttcggggataaggggcggttgcgtttcgtagcggtcggatt

SEQ ID NO: 20080 - DNA, 1037 bp, Artificial Sequence
  chemically treated genomic DNA (Homo sapiens) CpG-island No: 20080
  unsure (857)
aatccgaccgctacgaaacgcaaccgccccttatccccgaaaaacgccgccgacccgcgccgccaaacctcgtcccctacccaaacaacgactacgaaaccgcccgaaaaccgaacgcgcgaaaaccgaaaaacgcctaacccgacaaaaaccccgcacctacaactaccgaaaccgcgaacccacaaccccaaaaaccgcgcgaaacccaaaacgccccgcgaaacgcccgaacccccgccccgacaaccgctcctccaacgacgcgcgactccaacgccccaaaacaacgcgaaccccgcgccccataaccgcgccgacctcaaaccaataaacgacgataaaaacccgaaaacgcgactaaccgcgacccacacgcaaactaccgacaaaaaccgacctaactcgacaaaactcgataactcgaacaaccgcaacgaccaaacaaaaaaacctcgcataacgctacgtacgacccgtacgcctcaacccgccgaccaaacgcgcgcaaaacccgaaaaccctcccgacccgaccccgaacaaaaaacgtaaacgcgataacgcccgcccctccccgctaactatcacccgccttatcgtacctacaccctcgaactacgcccgcccccgccccatcctcgtccgcgcgataccgcgcctctccgccccactccgaaaactacaactacccgaaccttacaaaccacccttccgaacgcccccaacccgctcgaataccctccctacaacgcccccaactacccgctaacgaaaaaacgccgaacgcgccaactaaaacgaaacccgaaaaacccaaaaacacgactacgcctacgtactaaacgcaaaaaactntttcgcgcttcgccgtcccctctaatctaaactaaaaaacgacacgaactctttctcacgccgacaaaccgaacgaaacgcgcaaacgcgaccacacgaaaaccgacacaaaaataaaaccgaaaaacaccgtactaaatacgacgtaaaccgaattccccgacccgaaaaccctactaa

SEQ ID NO: 20081 - DNA, 726 bp, Artificial Sequence
  chemically treated genomic DNA (Homo sapiens) CpG-island No: 20081
gcggggtttcgtcggggagcgcgtacggagcggcgtttcggtcgttttgttttttggagttgtgtttttttgattttagtggtagtttttgttattgtatcgttcgtttttttttcggttcgtcgcgttttcgtttttttttttcgttttttcgttcgttttttttttagatcgaggttgttcgggtttttttttttttcgtttttttttagcgtcgcgttttttggtttttagttttagtttgcggcgggattttcggggtcgaaggttttggttcgttcgcgtttttcgtcgttttcgcgcgtttttagcgtttttttagtcggttcgggtcgttcggttatggatcgtttgttcgtcgggcgttgaaggtattttcgggattcggagcgtagttcgggaaaggtaattcgtttcgggaagggaggcggagggcgggggagggggaggaggcggtcgggagttcggtgtcgagtacgagaggaagggaaaaaaatgtatatataaagcggagttcgggtgagaggtgttttgttagaggcgcgtgcgaggggttcggaggttgcggattcgggttgtttcggtgtttttgatattcgtacgagcgggcgtttttcgggtaattcggcgttcggggagggttgatttttaatttttgagcgaaagtaaatttttttttaggaggtgtttttttttcgattttttattttgcgttttttttttttt

SEQ ID NO: 20082 - DNA, 726 bp, Artificial Sequence
  chemically treated genomic DNA (Homo sapiens) CpG-island No: 20082
aaaaaaaaaaaaacgcaaaataaaaaatcgaaaaaaaaacacctcctaaaaaaaaatttactttcgctcaaaaattaaaaatcaaccctccccgaacgccgaattacccgaaaaacgcccgctcgtacgaatatcaaaaacaccgaaacaacccgaatccgcaacctccgaacccctcgcacgcgcctctaacaaaacacctctcacccgaactccgctttatatatacatttttttcccttcctctcgtactcgacaccgaactcccgaccgcctcctccccctcccccgccctccgcctcccttcccgaaacgaattacctttcccgaactacgctccgaatcccgaaaataccttcaacgcccgacgaacaaacgatccataaccgaacgacccgaaccgactaaaaaaacgctaaaaacgcgcgaaaacgacgaaaaacgcgaacgaaccaaaaccttcgaccccgaaaatcccgccgcaaactaaaactaaaaaccaaaaaacgcgacgctaaaaaaaaacgaaaaaaaaaaaaacccgaacaacctcgatctaaaaaaaaaacgaacgaaaaaacgaaaaaaaaaaacgaaaacgcgacgaaccgaaaaaaaaacgaacgatacaataacaaaaactaccactaaaatcaaaaaaacacaactccaaaaaacaaaacgaccgaaacgccgctccgtacgcgctccccgacgaaaccccgc

SEQ ID NO: 20083 - DNA, 726 bp, Artificial Sequence
  chemically treated genomic DNA (Homo sapiens) CpG-island No: 20083
agaagagaagaggcgtaggatggggagtcggagggaagatattttttaaaaaagaatttgttttcgtttaggggttgaaaattagtttttttcgagcgtcgaattgttcgggaggcgttcgttcgtgcggatgttaggggtatcggggtagttcgggttcgtagttttcgagtttttcgtacgcgtttttgataaggtattttttattcgggtttcgttttgtgtgtgtatttttttttttttttttcgtgttcggtatcgggttttcggtcgttttttttttttttttcgtttttcgttttttttttcggggcggattatttttttcgggttgcgtttcggatttcggggatgtttttagcgttcggcgagtaggcgatttatagtcgagcggttcgagtcggttggaggagcgttgggggcgcgcgggggcggcgaggggcgcgagcgggttagaattttcgatttcggaggtttcgtcgtaggttggggttgggggttagggggcgcggcgttagagggaggcggggggagaaaggattcgagtagtttcgatttggggagagagcgagcgagggggcgaggagagggagcgagggcgcggcgagtcggagggagagcgagcggtgtagtgatagggattgttattggggttaaaggagtatagttttaggaagtagggcggtcgaggcgtcgtttcgtgcgcgtttttcggcgggatttcgt

SEQ ID NO: 20084 - DNA, 726 bp, Artificial Sequence
  chemically treated genomic DNA (Homo sapiens) CpG-island No: 20084
acgaaatcccgccgaaaaacgcgcacgaaacgacgcctcgaccgccctacttcctaaaactatactcctttaaccccaataacaatccctatcactacaccgctcgctctccctccgactcgccgcgccctcgctccctctcctcgccccctcgctcgctctctccccaaatcgaaactactcgaatcctttctccccccgcctccctctaacgccgcgccccctaacccccaaccccaacctacgacgaaacctccgaaatcgaaaattctaacccgctcgcgcccctcgccgcccccgcgcgcccccaacgctcctccaaccgactcgaaccgctcgactataaatcgcctactcgccgaacgctaaaaacatccccgaaatccgaaacgcaacccgaaaaaaataatccgccccgaaaaaaaaaacgaaaaacgaaaaaaaaaaaaaaaacgaccgaaaacccgataccgaacacgaaaaaaaaaaaaaaaaatacacacacaaaacgaaacccgaataaaaaataccttatcaaaaacgcgtacgaaaaactcgaaaactacgaacccgaactaccccgatacccctaacatccgcacgaacgaacgcctcccgaacaattcgacgctcgaaaaaaactaattttcaacccctaaacgaaaacaaattcttttttaaaaaatatcttccctccgactccccatcctacgcctcttctcttct

SEQ ID NO: 20085 - DNA, 531 bp, Artificial Sequence
  chemically treated genomic DNA (Homo sapiens) CpG-island No: 20085
tttttttgcgtcgttcgtatttgcgtttttttttatcgtaataggttaggggagggcggaggtgacgagggcgttcgattcgggattagaggacggaagggtttggaaggtgagcgtagttttgcgttatttagggttgggggtcgattcgttcggttttcgacgtcgtcgtcgcggatttttcggaagtcgaggtttttttcgtttttttgtcggttttttagtacgttgatttaagtcgttggcgtttttattttttcggtgggagttttcggggagaacgggttagggtttagagtttttatcgttttatttgcgatttcgcggtaggtagcgcgtagaaaaataggggacggggatatgggaagagatttatgttttttttttacgcgtagtttttaagttagacgtttgtttgtgtatttcgcgttttgcggagagttgtttcgttgttgggatttgttatttgagttgcgtaatgagttttagaagtttttcggggggagggggcggggaaaagtggggtttttt

SEQ ID NO: 20086 - DNA, 531 bp, Artificial Sequence
  chemically treated genomic DNA (Homo sapiens) CpG-island No: 20086
aaaaaaccccacttttccccgccccctccccccgaaaaacttctaaaactcattacgcaactcaaataacaaatcccaacaacgaaacaactctccgcaaaacgcgaaatacacaaacaaacgtctaacttaaaaactacgcgtaaaaaaaaaacataaatctcttcccatatccccgtcccctatttttctacgcgctacctaccgcgaaatcgcaaataaaacgataaaaactctaaaccctaacccgttctccccgaaaactcccaccgaaaaaataaaaacgccaacgacttaaatcaacgtactaaaaaaccgacaaaaaaacgaaaaaaacctcgacttccgaaaaatccgcgacgacgacgtcgaaaaccgaacgaatcgacccccaaccctaaataacgcaaaactacgctcaccttccaaacccttccgtcctctaatcccgaatcgaacgccctcgtcacctccgccctcccctaacctattacgataaaaaaaaacgcaaatacgaacgacgcaaaaaaa

SEQ ID NO: 20087 - DNA, 531 bp, Artificial Sequence
  chemically treated genomic DNA (Homo sapiens) CpG-island No: 20087
gaagaattttattttttttcgtttttttttttcgagaaatttttgggatttattacgtaatttaagtagtaggttttaataacgggatagtttttcgtaaaacgcggggtgtataggtaaacgtttgatttgggggttgcgcgtgagggaggagtatgggtttttttttatgttttcgttttttgtttttttacgcgttatttgtcgcgggatcgtaagtagggcggtgagagttttgagttttagttcgtttttttcgagggtttttatcggaaaagtgggaacgttagcgatttgagttagcgtgttgggaagtcggtagagaggcggggagagtttcggttttcgagaagttcgcggcggcggcgtcgggggtcgggcggatcgatttttagttttgggtggcgtagggttgcgtttattttttagattttttcgttttttagtttcgggtcgggcgttttcgttattttcgtttttttttgatttgttgcggtgggaaagggcgtaagtgcggacgacgtaagggga

SEQ ID NO: 20088 - DNA, 531 bp, Artificial Sequence
  chemically treated genomic DNA (Homo sapiens) CpG-island No: 20088
tccccttacgtcgtccgcacttacgccctttcccaccgcaacaaatcaaaaaaaaacgaaaataacgaaaacgcccgacccgaaactaaaaaacgaaaaaatctaaaaaataaacgcaaccctacgccacccaaaactaaaaatcgatccgcccgacccccgacgccgccgccgcgaacttctcgaaaaccgaaactctccccgcctctctaccgacttcccaacacgctaactcaaatcgctaacgttcccacttttccgataaaaaccctcgaaaaaaacgaactaaaactcaaaactctcaccgccctacttacgatcccgcgacaaataacgcgtaaaaaaacaaaaaacgaaaacataaaaaaaaacccatactcctccctcacgcgcaacccccaaatcaaacgtttacctatacaccccgcgttttacgaaaaactatcccgttattaaaacctactacttaaattacgtaataaatcccaaaaatttctcgaaaaaaaaaaacgaaaaaaaataaaattcttc

SEQ ID NO: 20089 - DNA, 704 bp, Artificial Sequence
  chemically treated genomic DNA (Homo sapiens) CpG-island No: 20089
tcgttacgaacgcgtttgaaaagttttttcggtgtacggtttattttgattgggttgttataatttagtttatagagttaggggtttttcgtttatgagcgtttttatttcgcgggttttgttgttagcgtcgcgtttattatttggcggagtcgggcggggacgcgtttcggcgcggcgtttcgatgttacgggattatttgttttcgagtttcgggcgttttcggcgtagtttcgggttcggttcgtattggttcgcgttaattttgatggatattcgggtattggggtttttgcggcgatttgtattttagacgagttcggggagcgtcgcgttcgaattcggggtaagcgagcgttttcggcgtagtttttgagaagggaaagttagcgggtttttacgttcgaagatcgtcggcgtttaacgtttgtttagtaatagtataacgcgggttatagttagaaaggaaaagaaattgtttttgggtttatttgaagttgttcgagttcgtcgggatattttttgttaagaaagttgcggtggtacggttcgtttatttaaatgggtagggcgttcggcggttttagttaaaggtaggcggtaagcggtaggtagggtcgggtagggggtagagtttgggcgtcgataagttttgttggttttcggtcgagtttcgtttgcgggtttttcgagagtgtttttt

SEQ ID NO: 20090 - DNA, 704 bp, Artificial Sequence
  chemically treated genomic DNA (Homo sapiens) CpG-island No: 20090
aaaaaacactctcgaaaaacccgcaaacgaaactcgaccgaaaaccaacaaaacttatcgacgcccaaactctaccccctacccgaccctacctaccgcttaccgcctacctttaactaaaaccgccgaacgccctacccatttaaataaacgaaccgtaccaccgcaactttcttaacaaaaaatatcccgacgaactcgaacaacttcaaataaacccaaaaacaatttcttttcctttctaactataacccgcgttatactattactaaacaaacgttaaacgccgacgatcttcgaacgtaaaaacccgctaactttcccttctcaaaaactacgccgaaaacgctcgcttaccccgaattcgaacgcgacgctccccgaactcgtctaaaatacaaatcgccgcaaaaaccccaatacccgaatatccatcaaaattaacgcgaaccaatacgaaccgaacccgaaactacgccgaaaacgcccgaaactcgaaaacaaataatcccgtaacatcgaaacgccgcgccgaaacgcgtccccgcccgactccgccaaataataaacgcgacgctaacaacaaaacccgcgaaataaaaacgctcataaacgaaaaacccctaactctataaactaaattataacaacccaatcaaaataaaccgtacaccgaaaaaacttttcaaacgcgttcgtaacga

SEQ ID NO: 20091 - DNA, 704 bp, Artificial Sequence
  chemically treated genomic DNA (Homo sapiens) CpG-island No: 20091
agagagtattttcgaggagttcgtaggcggggttcggtcggggattagtagggtttgtcggcgtttaggttttgttttttattcgattttgtttgtcgtttgtcgtttgtttttggttagggtcgtcgagcgttttgtttatttaagtaggcgggtcgtattatcgtaatttttttgatagggggtatttcggcggattcggataattttaagtgagtttagaggtaatttttttttttttttaattgtggttcgcgttgtgttgttgttgggtaggcgttgggcgtcggcggttttcgagcgtgggggttcgttggttttttttttttagaaattgcgtcgggggcgttcgtttgtttcggattcggacgcggcgtttttcgggttcgtttgaagtgtagatcgtcgtagaggttttagtgttcggatgtttattaggattagcgcgagttaatacgggtcgagttcggggttgcgtcgaggacgttcggggttcgagagtaggtagtttcgtaatatcggggcgtcgcgtcgggacgcgttttcgttcggtttcgttaaatggtgagcgcggcgttggtagtagggttcgcggggtgaaggcgtttatggacggaagatttttggttttataagttgaattatggtagtttagttaaggtaagtcgtgtatcggagaaattttttaaacgcgttcgtggcga

SEQ ID NO: 20092 - DNA, 704 bp, Artificial Sequence
  chemically treated genomic DNA (Homo sapiens) CpG-island No: 20092
tcgccacgaacgcgtttaaaaaatttctccgatacacgacttaccttaactaaactaccataattcaacttataaaaccaaaaatcttccgtccataaacgccttcaccccgcgaaccctactaccaacgccgcgctcaccatttaacgaaaccgaacgaaaacgcgtcccgacgcgacgccccgatattacgaaactacctactctcgaaccccgaacgtcctcgacgcaaccccgaactcgacccgtattaactcgcgctaatcctaataaacatccgaacactaaaacctctacgacgatctacacttcaaacgaacccgaaaaacgccgcgtccgaatccgaaacaaacgaacgcccccgacgcaatttctaaaaaaaaaaaaccaacgaacccccacgctcgaaaaccgccgacgcccaacgcctacccaacaacaacacaacgcgaaccacaattaaaaaaaaaaaaaaattacctctaaactcacttaaaattatccgaatccgccgaaataccccctatcaaaaaaattacgataatacgacccgcctacttaaataaacaaaacgctcgacgaccctaaccaaaaacaaacgacaaacgacaaacaaaatcgaataaaaaacaaaacctaaacgccgacaaaccctactaatccccgaccgaaccccgcctacgaactcctcgaaaatactctct

SEQ ID NO: 20093 - DNA, 713 bp, Artificial Sequence
  chemically treated genomic DNA (Homo sapiens) CpG-island No: 20093
agaggtttcggtgttttttattcgtttcgacgtgcgtttcggtattatttcgggattcgtttttttcgttggcggggggagaaagggtaggaggttttcgtttcggttataaagggtttcggattcgcgcggtttcgtttcggtttgtttcgatacgtttaggcgtttttcgttcgttttagtcgtcgcgttttagttagagttttagcgttcgtttaggttttaatcggatttttcgggtttcggttatttggattgcggcggaatatggcggtttcgatgattttcgcggttcggttcgaggattacgaggcggcgtttaatgtcgttttggttgacgtgttcgaattggttagatttttggagatcgattcgtatttgaagttttacgtcgtggatttttagcgtaggtatcgtcggaattttattatttttatttagataggtagttcgttttttaggagtcgtttcgggatacgggtcgtttttcggttttcgcgcgttaatttcgttttaggcggggaggaatttgagtgggcggggttcggggtgattcgggtaatcgggttttgtggttttcgtagtggtaggtttgatagcgttggtgttcggagcgggcgttgaagaaatttttttttttatttttttttttttttgttttaattagcggttttgcgttatagggtacgtgttgtggttttaatatttatttt

SEQ ID NO: 20094 - DNA, 713 bp, Artificial Sequence
  chemically treated genomic DNA (Homo sapiens) CpG-island No: 20094
aaaataaatattaaaaccacaacacgtaccctataacgcaaaaccgctaattaaaacaaaaaaaaaaaaaaataaaaaaaaaaatttcttcaacgcccgctccgaacaccaacgctatcaaacctaccactacgaaaaccacaaaacccgattacccgaatcaccccgaaccccgcccactcaaattcctccccgcctaaaacgaaattaacgcgcgaaaaccgaaaaacgacccgtatcccgaaacgactcctaaaaaacgaactacctatctaaataaaaataataaaattccgacgatacctacgctaaaaatccacgacgtaaaacttcaaatacgaatcgatctccaaaaatctaaccaattcgaacacgtcaaccaaaacgacattaaacgccgcctcgtaatcctcgaaccgaaccgcgaaaatcatcgaaaccgccatattccgccgcaatccaaataaccgaaacccgaaaaatccgattaaaacctaaacgaacgctaaaactctaactaaaacgcgacgactaaaacgaacgaaaaacgcctaaacgtatcgaaacaaaccgaaacgaaaccgcgcgaatccgaaaccctttataaccgaaacgaaaacctcctaccctttctccccccgccaacgaaaaaaacgaatcccgaaataataccgaaacgcacgtcgaaacgaataaaaaacaccgaaacctct

SEQ ID NO: 20095 - DNA, 713 bp, Artificial Sequence
  chemically treated genomic DNA (Homo sapiens) CpG-island No: 20095
ggaataagtgttggagttatagtacgtattttatggcgtaagatcgttgattagaatagaggggaaaggggatgaggaaagaagtttttttagcgttcgtttcgggtattagcgttgttaaatttgttattacggaagttatagaattcggttattcgagttatttcgagtttcgtttatttaggttttttttcgtttggggcggggttggcgcgcgagggtcgaggggcggttcgtgtttcgagacggtttttgggaggcgggttgtttgtttaagtgggggtggtgggatttcggcggtatttgcgttggaagtttacggcgtagggttttaagtacgggtcgatttttaggagtttggttagttcgggtacgttagttagggcggtattgagcgtcgtttcgtagttttcgggtcgagtcgcgggagttatcggagtcgttatatttcgtcgtagtttaagtagtcgaggttcgagaggttcgattggggtttgagcgggcgttggagttttagttgggacgcggcggttagggcggacggagggcgtttaggcgtgtcgaggtaagtcgaggcgaagtcgcgcgggttcggggttttttatagtcgggacgaaggttttttgtttttttttttttcgttagcgggaggagcggatttcggggtgatgtcgggacgtacgtcggagcgggtaggaggtatcgaggttttt

SEQ ID NO: 20096 - DNA, 713 bp, Artificial Sequence
  chemically treated genomic DNA (Homo sapiens) CpG-island No: 20096
aaaaacctcgatacctcctacccgctccgacgtacgtcccgacatcaccccgaaatccgctcctcccgctaacgaaaaaaaaaaaaacaaaaaaccttcgtcccgactataaaaaaccccgaacccgcgcgacttcgcctcgacttacctcgacacgcctaaacgccctccgtccgccctaaccgccgcgtcccaactaaaactccaacgcccgctcaaaccccaatcgaacctctcgaacctcgactacttaaactacgacgaaatataacgactccgataactcccgcgactcgacccgaaaactacgaaacgacgctcaataccgccctaactaacgtacccgaactaaccaaactcctaaaaatcgacccgtacttaaaaccctacgccgtaaacttccaacgcaaataccgccgaaatcccaccacccccacttaaacaaacaacccgcctcccaaaaaccgtctcgaaacacgaaccgcccctcgaccctcgcgcgccaaccccgccccaaacgaaaaaaaacctaaataaacgaaactcgaaataactcgaataaccgaattctataacttccgtaataacaaatttaacaacgctaatacccgaaacgaacgctaaaaaaacttctttcctcatcccctttcccctctattctaatcaacgatcttacgccataaaatacgtactataactccaacacttattcc

SEQ ID NO: 20097 - DNA, 1428 bp, Artificial Sequence
  chemically treated genomic DNA (Homo sapiens) CpG-island No: 20097
tagaaacgtttgagtacgtggagtttcgggggacgggtgtttcgggaattacgtatatcggtttttttagttcgtcgtagggttgtagaggcgtcgagggttgggggggttgtcggggttgtcgggttttcgtgtaggttttttttcgtagtttcgcggtcgggtttggagatcgcgtgttcggacgtcgtcgttagtttcgtgggtcgtaaaggggcgggggcggtttttggcggcgggaggattcgttcgttcgagggatttcgggttaggtttcggggtcgtttcggttgggtttttgcggttttatagttttgggcggggatgggggcgtcggcgtttacgcgcgaggttaatcgggggaaatcgaggtagtgaatggtttaggtttcgttcggttatttcggagttaggtcgggagcgtttagtgtttcgcgatcgtagtcgtcgtagtttgaattcgtttttttttagtaggatgcggagcgcggtttttttattttgtttttgttatcgttgtttttttacgtcgggtcgtcgtcgggatgggtagacggcgcggtcggtattcgaggtttgcgagcgcgaggttcgcggggcgttgcggagtcgggagcgcggagtcggggcgggggatagataaaggcggggacggcggcgaggggaagataaagcgcggaggggggtcggcggcggcgtcggggtttcgaaggcggtttcgggcgcggcggagttaatgggcgggcgcggggcgggggtcggcgggggcggtgtagcgataaggcggtggcggcggcggtggttcggggattattggtagcggtagtagttcgcgttcgcgtttttttcgtattcgtgcgttttcggagatcgatttcgtttcgcggtttaggtcgggtttggtgagagtcgcggggggaggggtcgcgttcggtttcggaatcgggagaggcgtcgaggggtgtggggtgagggtcgttcgtggggtttcggcgagtttgcgagtcgttttcgttcggggcgtataggttcgagttttcgttttagggtcggttttcggttgggcggagtcgagattcgttggcggggttcgcggcgtcggggtttggggttcggttttcgcggggttaggtcgggggtcgaggggcggggtcgggcggggatttcgggcgttgtttaggggttgcgtagtttaggtttggacgttcgggcgcggcgtagggtagcgagggtcggggttaggtcggggtagcggttttttatcgcggtttcgtcggtttcgatttttttttattttaagcggttttagttcgcgggacgtatacggcggttgcgcgggagttttcggttttttcgttttcgttaattttgttttttcgagggacggtgttattcgggatttcggtttttggggagtaggggtggggg

SEQ ID NO: 20098 - DNA, 1428 bp, Artificial Sequence
  chemically treated genomic DNA (Homo sapiens) CpG-island No: 20098
cccccacccctactccccaaaaaccgaaatcccgaataacaccgtccctcgaaaaaacaaaattaacgaaaacgaaaaaaccgaaaactcccgcgcaaccgccgtatacgtcccgcgaactaaaaccgcttaaaataaaaaaaaatcgaaaccgacgaaaccgcgataaaaaaccgctaccccgacctaaccccgaccctcgctaccctacgccgcgcccgaacgtccaaacctaaactacgcaacccctaaacaacgcccgaaatccccgcccgaccccgcccctcgacccccgacctaaccccgcgaaaaccgaaccccaaaccccgacgccgcgaaccccgccaacgaatctcgactccgcccaaccgaaaaccgaccctaaaacgaaaactcgaacctatacgccccgaacgaaaacgactcgcaaactcgccgaaaccccacgaacgaccctcaccccacacccctcgacgcctctcccgattccgaaaccgaacgcgacccctccccccgcgactctcaccaaacccgacctaaaccgcgaaacgaaatcgatctccgaaaacgcacgaatacgaaaaaaacgcgaacgcgaactactaccgctaccaataatccccgaaccaccgccgccgccaccgccttatcgctacaccgcccccgccgacccccgccccgcgcccgcccattaactccgccgcgcccgaaaccgccttcgaaaccccgacgccgccgccgacccccctccgcgctttatcttcccctcgccgccgtccccgcctttatctatcccccgccccgactccgcgctcccgactccgcaacgccccgcgaacctcgcgctcgcaaacctcgaataccgaccgcgccgtctacccatcccgacgacgacccgacgtaaaaaaacaacgataacaaaaacaaaataaaaaaaccgcgctccgcatcctactaaaaaaaaacgaattcaaactacgacgactacgatcgcgaaacactaaacgctcccgacctaactccgaaataaccgaacgaaacctaaaccattcactacctcgatttcccccgattaacctcgcgcgtaaacgccgacgcccccatccccgcccaaaactataaaaccgcaaaaacccaaccgaaacgaccccgaaacctaacccgaaatccctcgaacgaacgaatcctcccgccgccaaaaaccgcccccgcccctttacgacccacgaaactaacgacgacgtccgaacacgcgatctccaaacccgaccgcgaaactacgaaaaaaaacctacacgaaaacccgacaaccccgacaacccccccaaccctcgacgcctctacaaccctacgacgaactaaaaaaaccgatatacgtaattcccgaaacacccgtcccccgaaactccacgtactcaaacgtttcta

SEQ ID NO: 20099 - DNA, 1428 bp, Artificial Sequence
  chemically treated genomic DNA (Homo sapiens) CpG-island No: 20099
tttttatttttgttttttaggggtcggggtttcgagtggtatcgtttttcggaagaataaagttagcgggagcggaggggtcgggggttttcgcgtagtcgtcgtgtgcgtttcgcgggttgggatcgtttggggtgaggggaggtcggggtcggcggggtcgcgatgagaagtcgttgtttcgatttgatttcggttttcgttgttttgcgtcgcgttcgggcgtttaggtttaggttgcgtagtttttggatagcgttcgaggttttcgttcggtttcgtttttcggttttcgatttggtttcgcgaggatcggattttagatttcgacgtcgcgagtttcgttagcgggtttcggtttcgtttagtcgggggtcggttttgaaacgaggattcgagtttgtgcgtttcgggcgagagcggttcgtagattcgtcgggattttacgggcggtttttattttatatttttcggcgtttttttcggtttcggagtcggacgcggttttttttttcgcggtttttattaggttcggtttgggtcgcggggcgggatcggttttcgggggcgtacgggtacgaggagggcgcgggcgcgagttgttgtcgttattagtggttttcgagttatcgtcgtcgttatcgttttatcgttgtatcgttttcgtcggttttcgtttcgcgttcgtttattggtttcgtcgcgttcggagtcgttttcggggtttcggcgtcgtcgtcgattttttttcgcgttttgtttttttttcgtcgtcgttttcgtttttgtttgtttttcgtttcggtttcgcgttttcggtttcgtagcgtttcgcgggtttcgcgttcgtaggtttcgggtatcggtcgcgtcgtttgtttatttcgacggcggttcggcgtggggaagtaacggtggtagggataggatggaagggtcgcgtttcgtattttattgggaggggacgagtttaggttgcggcggttgcggtcgcgggatattgggcgttttcggtttggtttcgggataatcgggcggggtttgggttatttattgtttcggtttttttcggttggtttcgcgcgtaggcgtcggcgtttttattttcgtttagagttgtggggtcgtagagatttagtcggggcgatttcggagtttggttcggggtttttcgggcgggcgagttttttcgtcgttaggggtcgttttcgtttttttgcggtttacgaggttggcggcggcgttcgggtacgcggtttttaggttcggtcgcgaggttgcggggaggagtttgtacgagggttcggtagtttcggtagtttttttagttttcggcgtttttgtaattttgcgacgggttggggaggtcggtatgcgtggttttcggagtattcgtttttcgaggttttacgtatttaagcgtttttg

SEQ ID NO: 20100 - DNA, 1428 bp, Artificial Sequence
  chemically treated genomic DNA (Homo sapiens) CpG-island No: 20100
caaaaacgcttaaatacgtaaaacctcgaaaaacgaatactccgaaaaccacgcataccgacctccccaacccgtcgcaaaattacaaaaacgccgaaaactaaaaaaactaccgaaactaccgaaccctcgtacaaactcctccccgcaacctcgcgaccgaacctaaaaaccgcgtacccgaacgccgccgccaacctcgtaaaccgcaaaaaaacgaaaacgacccctaacgacgaaaaaactcgcccgcccgaaaaaccccgaaccaaactccgaaatcgccccgactaaatctctacgaccccacaactctaaacgaaaataaaaacgccgacgcctacgcgcgaaaccaaccgaaaaaaaccgaaacaataaataacccaaaccccgcccgattatcccgaaaccaaaccgaaaacgcccaatatcccgcgaccgcaaccgccgcaacctaaactcgtcccctcccaataaaatacgaaacgcgacccttccatcctatccctaccaccgttacttccccacgccgaaccgccgtcgaaataaacaaacgacgcgaccgatacccgaaacctacgaacgcgaaacccgcgaaacgctacgaaaccgaaaacgcgaaaccgaaacgaaaaacaaacaaaaacgaaaacgacgacgaaaaaaaaacaaaacgcgaaaaaaaatcgacgacgacgccgaaaccccgaaaacgactccgaacgcgacgaaaccaataaacgaacgcgaaacgaaaaccgacgaaaacgatacaacgataaaacgataacgacgacgataactcgaaaaccactaataacgacaacaactcgcgcccgcgccctcctcgtacccgtacgcccccgaaaaccgatcccgccccgcgacccaaaccgaacctaataaaaaccgcgaaaaaaaaaaccgcgtccgactccgaaaccgaaaaaaacgccgaaaaatataaaataaaaaccgcccgtaaaatcccgacgaatctacgaaccgctctcgcccgaaacgcacaaactcgaatcctcgtttcaaaaccgacccccgactaaacgaaaccgaaacccgctaacgaaactcgcgacgtcgaaatctaaaatccgatcctcgcgaaaccaaatcgaaaaccgaaaaacgaaaccgaacgaaaacctcgaacgctatccaaaaactacgcaacctaaacctaaacgcccgaacgcgacgcaaaacaacgaaaaccgaaatcaaatcgaaacaacgacttctcatcgcgaccccgccgaccccgacctcccctcaccccaaacgatcccaacccgcgaaacgcacacgacgactacgcgaaaacccccgacccctccgctcccgctaactttattcttccgaaaaacgataccactcgaaaccccgacccctaaaaaacaaaaataaaaa

SEQ ID NO: 20101 - DNA, 525 bp, Artificial Sequence
  chemically treated genomic DNA (Homo sapiens) CpG-island No: 20101
agtggcgtaatagtcgtagttcggttttcgtattagtttttcgtagtttacgggggggcggtagcgcgttagttttttttcggagtagggcgggtagtggatggtttcgtcgtttaggttcggttcgggttcggcggttagtagtagggcggttacgaggtagaggggtagtatgatcgttcgaggattgggcgcgggcgcggggcgttgggcgtaggcggggagcgcgggcgcgcgggcgagcggcggagggtatacggcggtagcgtttggcgtttttggaggattcgattcggagggcgcggggagacggggcggttcggcgggcgaacggggacgtagcgggggaagttagtaggcgtgtcggaggggagtaagtttggtcgtcgaggcgttgcgtcgtattttcggttcggtttaggtaggcggcgggcggcgaggggtagggggttgagcggttgttcgggatcggttttttcggattttatatcggtttttggttatatttttagcgtttttttagag

SEQ ID NO: 20102 - DNA, 525 bp, Artificial Sequence
  chemically treated genomic DNA (Homo sapiens) CpG-island No: 20102
ctctaaaaaaacgctaaaaatataaccaaaaaccgatataaaatccgaaaaaaccgatcccgaacaaccgctcaaccccctacccctcgccgcccgccgcctacctaaaccgaaccgaaaatacgacgcaacgcctcgacgaccaaacttactcccctccgacacgcctactaacttcccccgctacgtccccgttcgcccgccgaaccgccccgtctccccgcgccctccgaatcgaatcctccaaaaacgccaaacgctaccgccgtataccctccgccgctcgcccgcgcgcccgcgctccccgcctacgcccaacgccccgcgcccgcgcccaatcctcgaacgatcatactacccctctacctcgtaaccgccctactactaaccgccgaacccgaaccgaacctaaacgacgaaaccatccactacccgccctactccgaaaaaaaactaacgcgctaccgcccccccgtaaactacgaaaaactaatacgaaaaccgaactacgactattacgccact

SEQ ID NO: 20103 - DNA, 525 bp, Artificial Sequence
  chemically treated genomic DNA (Homo sapiens) CpG-island No: 20103
ttttgggaaggcgttgggggtgtggttagggatcggtataaagttcgggggagtcggtttcgggtagtcgtttagttttttgtttttcgtcgttcgtcgtttgtttgggtcgggtcgaggatgcggcgtagcgtttcggcggttaggtttgttttttttcggtacgtttgttaatttttttcgttacgttttcgttcgttcgtcgggtcgtttcgttttttcgcgtttttcgggtcgggttttttaggagcgttaggcgttgtcgtcgtgtgtttttcgtcgttcgttcgcgcgttcgcgtttttcgtttgcgtttagcgtttcgcgttcgcgtttagttttcgggcggttatgttgtttttttgtttcgtggtcgttttgttgttggtcgtcgggttcgggtcgagtttgggcgacgaagttatttattgttcgttttgtttcgaggagaagttggcgcgttgtcgttttttcgtgggttgcgaggagttggtgcgagagtcgggttgcggttgttgcgttatt

SEQ ID NO: 20104 - DNA, 525 bp, Artificial Sequence
  chemically treated genomic DNA (Homo sapiens) CpG-island No: 20104
aataacgcaacaaccgcaacccgactctcgcaccaactcctcgcaacccacgaaaaaacgacaacgcgccaacttctcctcgaaacaaaacgaacaataaataacttcgtcgcccaaactcgacccgaacccgacgaccaacaacaaaacgaccacgaaacaaaaaaacaacataaccgcccgaaaactaaacgcgaacgcgaaacgctaaacgcaaacgaaaaacgcgaacgcgcgaacgaacgacgaaaaacacacgacgacaacgcctaacgctcctaaaaaacccgacccgaaaaacgcgaaaaaacgaaacgacccgacgaacgaacgaaaacgtaacgaaaaaaattaacaaacgtaccgaaaaaaaacaaacctaaccgccgaaacgctacgccgcatcctcgacccgacccaaacaaacgacgaacgacgaaaaacaaaaaactaaacgactacccgaaaccgactcccccgaactttataccgatccctaaccacacccccaacgccttcccaaaa

SEQ ID NO: 20105 - DNA, 583 bp, Artificial Sequence
  chemically treated genomic DNA (Homo sapiens) CpG-island No: 20105
acgcgcgatttaataacgtcgtattcgggtcgttgtaatatggatttattacgggattaacggatttttgtttttagaaatagggtaataacgtacgatattttggaagtcgggttatattttattattagtattagaaggggttttcgtttttttacgattatttcggaatcgggaatggagaatatgggtttttaagtcggtcgtcggtttgatcgtagttttagagttttattcgttacgggcggttagagagatgttcgggtcgcgcggaggttttatcgttagtttttttcgcgagtcgtatttgtaatggtgatatttttatggtgacggtcgtgaaggggtttaagaattttgaaagcgattaaataggtaggattttacgagattattttcgattaagtcgtttttttatagacgcgcgtcggttaggagagttttatttgaatttttttttagttcgttcgaagtagattagttaatttttgattcgtttttatcgttttcgtttagaagaattaatcgtagtttgttttttatatttatttatgaacggttgagttggtcggggtttgtttga

SEQ ID NO: 20106 - DNA, 583 bp, Artificial Sequence
  chemically treated genomic DNA (Homo sapiens) CpG-island No: 20106
tcaaacaaaccccgaccaactcaaccgttcataaataaatataaaaaacaaactacgattaattcttctaaacgaaaacgataaaaacgaatcaaaaattaactaatctacttcgaacgaactaaaaaaaaattcaaataaaactctcctaaccgacgcgcgtctataaaaaaacgacttaatcgaaaataatctcgtaaaatcctacctatttaatcgctttcaaaattcttaaaccccttcacgaccgtcaccataaaaatatcaccattacaaatacgactcgcgaaaaaaactaacgataaaacctccgcgcgacccgaacatctctctaaccgcccgtaacgaataaaactctaaaactacgatcaaaccgacgaccgacttaaaaacccatattctccattcccgattccgaaataatcgtaaaaaaacgaaaaccccttctaatactaataataaaatataacccgacttccaaaatatcgtacgttattaccctatttctaaaaacaaaaatccgttaatcccgtaataaatccatattacaacgacccgaatacgacgttattaaatcgcgcgt

SEQ ID NO: 20107 - DNA, 583 bp, Artificial Sequence
  chemically treated genomic DNA (Homo sapiens) CpG-island No: 20107
ttaaataaatttcggttaatttagtcgtttataggtggatataaaaggtaagttacgattggtttttttggacggagacggtgagagcgagttagggattggttggtttgtttcgggcgggttaaaggaaggtttaagtggagtttttttaatcgacgcgcgtttgtggagaagcggtttggtcgggggtggtttcgtggggttttgtttgtttagtcgtttttagggtttttgagtttttttacgatcgttattatggaagtgttattattgtaggtacggttcgcgggggggattggcggtggagttttcgcgcggttcgggtatttttttggtcgttcgtgacgggtgaagttttggggttgcggttaggtcggcgatcggtttgggagtttatattttttattttcggtttcggggtgatcgtggagaggcggaagttttttttggtgttagtagtgaagtatgattcggtttttagggtgtcgtgcgttgttgttttgtttttaggggtaggagttcgttggtttcgtagtggatttatgttatagcggttcgggtgcgacgttattgagtcgcgcgt

SEQ ID NO: 20108 - DNA, 583 bp, Artificial Sequence
  chemically treated genomic DNA (Homo sapiens) CpG-island No: 20108
acgcgcgactcaataacgtcgcacccgaaccgctataacataaatccactacgaaaccaacgaactcctacccctaaaaacaaaacaacaacgcacgacaccctaaaaaccgaatcatacttcactactaacaccaaaaaaaacttccgcctctccacgatcaccccgaaaccgaaaataaaaaatataaactcccaaaccgatcgccgacctaaccgcaaccccaaaacttcacccgtcacgaacgaccaaaaaaatacccgaaccgcgcgaaaactccaccgccaatcccccccgcgaaccgtacctacaataataacacttccataataacgatcgtaaaaaaactcaaaaaccctaaaaacgactaaacaaacaaaaccccacgaaaccacccccgaccaaaccgcttctccacaaacgcgcgtcgattaaaaaaactccacttaaaccttcctttaacccgcccgaaacaaaccaaccaatccctaactcgctctcaccgtctccgtccaaaaaaaccaatcgtaacttaccttttatatccacctataaacgactaaattaaccgaaatttatttaa

SEQ ID NO: 20109 - DNA, 1079 bp, Artificial Sequence
  chemically treated genomic DNA (Homo sapiens) CpG-island No: 20109
gttgtagtcgtcgttcgtgggtcgtttttggttggtggttatgttgatttttcgtattttggtgttggttacggtgggcggcgtcgtgttcgaggacgagtaagaggagttcgtgtgtaatacgttgtagtcgggttgtcgttagatttgttacgatcgcgttttttcggttttttattatcgtttttggtttttttatattttgttgttttcggcgttttcggtgttgttcgtcgtttattttatgtatcgggtaggtaaggaggcgggcggcgttgaggcggcggcgtagtgcgttttcggattgttcgaggtttagtgcgcgtcgtgcgttttgcgcgttcgtcgcgcgcgtcgttgttatttgttgagcgtggcgttgcgtttgttggtcgagttgatttttttgggcggttaggcgttgttttacggttttcgcgtggtttcgtatttcgcgtgcgtcggttcgttttgttcgtatacggtcgattgtttcgtgagtcggtttatcgagaagatcgttttcgtgtttttttatttcgcggtggggttgttgtcggcgttgtttagcgtagtcgagttgggttatttgttttggaagggtcgttcgcgcgtcggggagcgtgataatcgttgtaatcgtgtatacgaagaggcgtagaagttgttttcgtcgtcgtcgtcgttattttcgttatcggttttgttttttcggcgtttcggtttcgagttttgcgtttcgtcggtttatgcgtattcggcgtcggttagttttcgcgagtgcggtagcggtcgcggtaaggcgttatcggttatcggtcgtcgagatttggttatttaggggcgggtatcgtttcgcgcggattggacggcgagggtcggatttcgttattttcgttcgtatcgtagaagtcggaagttgtttttattagagttgtcgcgggatttgtttcggtaggagacgcgttgtggggacggttcgcgggcggtatcgtatttgtttcgtattgttttttagtggttgtcggcggtatttggggtaggtcgggttgggggcggagaatgaatttaggtaggtt

SEQ ID NO: 20110 - DNA, 1079 bp, Artificial Sequence
  chemically treated genomic DNA (Homo sapiens) CpG-island No: 20110
aacctacctaaattcattctccgcccccaacccgacctaccccaaataccgccgacaaccactaaaaaacaatacgaaacaaatacgataccgcccgcgaaccgtccccacaacgcgtctcctaccgaaacaaatcccgcgacaactctaataaaaacaacttccgacttctacgatacgaacgaaaataacgaaatccgaccctcgccgtccaatccgcgcgaaacgatacccgcccctaaataaccaaatctcgacgaccgataaccgataacgccttaccgcgaccgctaccgcactcgcgaaaactaaccgacgccgaatacgcataaaccgacgaaacgcaaaactcgaaaccgaaacgccgaaaaaacaaaaccgataacgaaaataacgacgacgacgacgaaaacaacttctacgcctcttcgtatacacgattacaacgattatcacgctccccgacgcgcgaacgacccttccaaaacaaataacccaactcgactacgctaaacaacgccgacaacaaccccaccgcgaaataaaaaaacacgaaaacgatcttctcgataaaccgactcacgaaacaatcgaccgtatacgaacaaaacgaaccgacgcacgcgaaatacgaaaccacgcgaaaaccgtaaaacaacgcctaaccgcccaaaaaaatcaactcgaccaacaaacgcaacgccacgctcaacaaataacaacgacgcgcgcgacgaacgcgcaaaacgcacgacgcgcactaaacctcgaacaatccgaaaacgcactacgccgccgcctcaacgccgcccgcctccttacctacccgatacataaaataaacgacgaacaacaccgaaaacgccgaaaacaacaaaatataaaaaaaccaaaaacgataataaaaaaccgaaaaaacgcgatcgtaacaaatctaacgacaacccgactacaacgtattacacacgaactcctcttactcgtcctcgaacacgacgccgcccaccgtaaccaacaccaaaatacgaaaaatcaacataaccaccaaccaaaaacgacccacgaacgacgactacaac

SEQ ID NO: 20111 - DNA, 1079 bp, Artificial Sequence
  chemically treated genomic DNA (Homo sapiens) CpG-island No: 20111
gatttgtttgagtttatttttcgtttttagttcggtttgttttaggtgtcgtcggtagttattgggaggtagtacgaggtaagtgcgatgtcgttcgcgggtcgtttttataacgcgttttttgtcggggtaggtttcgcgatagttttggtggaagtagttttcggtttttgcggtgcgggcggaggtggcggggttcggttttcgtcgtttagttcgcgcgaggcggtgttcgtttttagatggttagatttcggcggtcggtggtcggtgacgttttgtcgcggtcgttgtcgtattcgcggaggttggtcggcgtcgggtgcgtataggtcggcggggcgtagggttcggggtcggggcgtcgggagggtagggtcggtggcggaggtggcggcggcggcggcgggagtagtttttgcgttttttcgtgtgtacggttgtagcggttgttacgtttttcggcgcgcgggcggtttttttagagtaggtggtttagttcggttacgttgagtagcgtcgatagtagttttatcgcgaaatagaagagtacgaagacggttttttcggtgggtcggtttacgaagtagtcgatcgtgtgcgggtagggcggatcggcgtacgcgaagtgcggggttacgcggaagtcgtagagtagcgtttggtcgtttaggaaggttagttcggttagtaggcgtagcgttacgtttagtaggtagtagcggcgcgcgcggcgggcgcgtagggcgtacggcgcgtattgggtttcgggtagttcgggggcgtattgcgtcgtcgttttagcgtcgttcgtttttttgtttgttcggtgtatggagtagacgacgaatagtatcgggggcgtcgagagtagtaggatgtggaagagttagaagcggtagtgggagatcgggaaggcgcggtcgtagtaggtttggcgatagttcggttgtagcgtgttgtatacgaattttttttgttcgttttcgaatacggcgtcgtttatcgtggttagtattaggatgcggaagattagtatgattattagttagaggcggtttacgagcggcgattgtagt

SEQ ID NO: 20112 - DNA, 1079 bp, Artificial Sequence
  chemically treated genomic DNA (Homo sapiens) CpG-island No: 20112
actacaatcgccgctcgtaaaccgcctctaactaataatcatactaatcttccgcatcctaatactaaccacgataaacgacgccgtattcgaaaacgaacaaaaaaaattcgtatacaacacgctacaaccgaactatcgccaaacctactacgaccgcgccttcccgatctcccactaccgcttctaactcttccacatcctactactctcgacgcccccgatactattcgtcgtctactccatacaccgaacaaacaaaaaaacgaacgacgctaaaacgacgacgcaatacgcccccgaactacccgaaacccaatacgcgccgtacgccctacgcgcccgccgcgcgcgccgctactacctactaaacgtaacgctacgcctactaaccgaactaaccttcctaaacgaccaaacgctactctacgacttccgcgtaaccccgcacttcgcgtacgccgatccgccctacccgcacacgatcgactacttcgtaaaccgacccaccgaaaaaaccgtcttcgtactcttctatttcgcgataaaactactatcgacgctactcaacgtaaccgaactaaaccacctactctaaaaaaaccgcccgcgcgccgaaaaacgtaacaaccgctacaaccgtacacacgaaaaaacgcaaaaactactcccgccgccgccgccgccacctccgccaccgaccctaccctcccgacgccccgaccccgaaccctacgccccgccgacctatacgcacccgacgccgaccaacctccgcgaatacgacaacgaccgcgacaaaacgtcaccgaccaccgaccgccgaaatctaaccatctaaaaacgaacaccgcctcgcgcgaactaaacgacgaaaaccgaaccccgccacctccgcccgcaccgcaaaaaccgaaaactacttccaccaaaactatcgcgaaacctaccccgacaaaaaacgcgttataaaaacgacccgcgaacgacatcgcacttacctcgtactacctcccaataactaccgacgacacctaaaacaaaccgaactaaaaacgaaaaataaactcaaacaaatc

SEQ ID NO: 20113 - DNA, 612 bp, Artificial Sequence
  chemically treated genomic DNA (Homo sapiens) CpG-island No: 20113
tcgtttcgtttatgtgtaataggtcgttggattcgcgttttaatacgttgttattgtgggtgtttcgcgcggtagcgtatatacggttcgaggttcggtttggggtacggtttagtaggttcgcgtagatcgtgcggaagtttttgcggaagtgtttggagattagcgcgtaaacgatggggttgacgtaggagttggcgtaggagattaggtgcgagaggatgcgaagcgtataagtggcgcgcgtgagcgggaattggtcgaattatacgtagaggatgagcgcgtggtggggtatttagtagaggtagaagagcgcggttacgatgaggattatgcgtgttattttgcgtttggcgcgtcgggtattcgagttcgcggttatcgggtcgacggcgcgttagaggtagcgtaaggtgcgcgcgtaggttaggtcgagaattagtataggaagtaggtagttgaagacgaaggtgtagatgtttatggcgcggcggcgaggggcgttttacgcgggatggtatacggttaggttggttagttgcgattggcggtagtagtttaggtagggttcggagaagagtagcgatagtttttagatgagttcgatgg

SEQ ID NO: 20114 - DNA, 612 bp, Artificial Sequence
  chemically treated genomic DNA (Homo sapiens) CpG-island No: 20114
ccatcgaactcatctaaaaactatcgctactcttctccgaaccctacctaaactactaccgccaatcgcaactaaccaacctaaccgtataccatcccgcgtaaaacgcccctcgccgccgcgccataaacatctacaccttcgtcttcaactacctacttcctatactaattctcgacctaacctacgcgcgcaccttacgctacctctaacgcgccgtcgacccgataaccgcgaactcgaatacccgacgcgccaaacgcaaaataacacgcataatcctcatcgtaaccgcgctcttctacctctactaaataccccaccacgcgctcatcctctacgtataattcgaccaattcccgctcacgcgcgccacttatacgcttcgcatcctctcgcacctaatctcctacgccaactcctacgtcaaccccatcgtttacgcgctaatctccaaacacttccgcaaaaacttccgcacgatctacgcgaacctactaaaccgtaccccaaaccgaacctcgaaccgtatatacgctaccgcgcgaaacacccacaataacaacgtattaaaacgcgaatccaacgacctattacacataaacgaaacga

SEQ ID NO: 20115 - DNA, 612 bp, Artificial Sequence
  chemically treated genomic DNA (Homo sapiens) CpG-island No: 20115
ttatcgggtttatttgggggttgtcgttgttttttttcgggttttatttgagttattatcgttagtcgtagttggttaatttgatcgtgtgttatttcgcgtggagcgtttttcgtcgtcgcgttatggatatttgtattttcgtttttagttatttgttttttgtgttggttttcggtttgatttacgcgcgtattttgcgttatttttggcgcgtcgtcgattcggtggtcgcgggttcgggtgttcggcgcgttaagcgtaaggtgatacgtatgatttttatcgtggtcgcgtttttttgtttttgttggatgttttattacgcgtttattttttgcgtgtggttcggttagttttcgtttacgcgcgttatttatgcgtttcgtattttttcgtatttggttttttacgttaatttttgcgttaattttatcgtttacgcgttggtttttaagtattttcgtaaaggttttcgtacgatttgcgcgggtttgttgggtcgtgttttaggtcgagtttcgggtcgtgtgtgcgttgtcgcgcggggtatttatagtggtagcgtgttggagcgcgagtttagcgatttgttgtatatgagcgaggcgg

SEQ ID NO: 20116 - DNA, 612 bp, Artificial Sequence
  chemically treated genomic DNA (Homo sapiens) CpG-island No: 20116
ccgcctcgctcatatacaacaaatcgctaaactcgcgctccaacacgctaccactataaataccccgcgcgacaacgcacacacgacccgaaactcgacctaaaacacgacccaacaaacccgcgcaaatcgtacgaaaacctttacgaaaatacttaaaaaccaacgcgtaaacgataaaattaacgcaaaaattaacgtaaaaaaccaaatacgaaaaaatacgaaacgcataaataacgcgcgtaaacgaaaactaaccgaaccacacgcaaaaaataaacgcgtaataaaacatccaacaaaaacaaaaaaacgcgaccacgataaaaatcatacgtatcaccttacgcttaacgcgccgaacacccgaacccgcgaccaccgaatcgacgacgcgccaaaaataacgcaaaatacgcgcgtaaatcaaaccgaaaaccaacacaaaaaacaaataactaaaaacgaaaatacaaatatccataacgcgacgacgaaaaacgctccacgcgaaataacacacgatcaaattaaccaactacgactaacgataataactcaaataaaacccgaaaaaaaacaacgacaacccccaaataaacccgataa

SEQ ID NO: 20117 - DNA, 1415 bp, Artificial Sequence
  chemically treated genomic DNA (Homo sapiens) CpG-island No: 20117
ttttcgcgcgacgtcgtaggcgaagtagttttaggtaggattttaaaaagcgatttgtagagttcgagtttttgatcgttcgtttgtcgttttcggtttcgtcgtgtatacgtttttcgtttttttcggttcgtttttcgttatagttgttggattcgcgtttcgttagtggcgtttttcgcgttgtattaggtagcgtcgcgcggagttcggttttggtcggaagtttaagagaggcgtagattttcggcggcgcgttgggttcgggaggtttttgggcgtatttgttcgggcggagcggagcggggcggggcgggcgtagggcgcgggttcggacgttggagggggttgtggttttttcgcgttttcgttgttcgggttgcgcggcgttcgttttttttcgtcgaggggtcggtttagattcggggaggggcggtggttattgtatttttcgttcgtcggttttagaggcggcgggttcggcgcgggcgtagcggtgcgggcgttcggttggggcgcggggcggggacgcggtcgttgttcgttttgcgtcgtttttttttgcgcgagtagcgttggtttcggcgtcgaggcggttatggcgattcggagttcgttttttatttatttcgtttgtttcgttttttttttcgtttcgcgttatttttgatggttcggattttagtcggttatcgttagttttgttcgcgcgttcgcgtcgtcgtcgttcgcgggtattaatagtcggcgtcgtcgcgttttcggtcgtcgggggtttgggagtcgtcgatttcggagttcgagtcgggagagggagtcgtcgtagtcgtcggcgttgtggaggtaggaggcgcgcggtgaataatgatcgcggcgggagggcgggggtcggcggggttcgggtcgcgggcggtaatttgtgcgagtttaggttttcgtagcgtacggtcgcggttgcgggcgaaggtgggcgcgtggttttcgaggttttgttttgcgtagtcgggcggcgggtcgggttcgggtagtttcggttattatcgtaggagttcgggggtttcggggtttcgggttgttttttgcgtttttttttttttattttcgtcgacgtcgggttgcggggtttcgcgtcggttttcgttcgtttttttcgatttcggcgtttttttttcgttttttttcgttttattcgttcgttgatagcgttggacgtcgttttcggatttcgggtcgtaatttcggtttttgaggtcggttgcgggtcggggaggtggtcgttggcgcggatgtcgtcgggtgttcgtcgttcgtttacgcgcggcgcgagggttttcggcgggtgataaagaggaatatattttttgtttaagttagatttgtgtttttttttattgtttgtttttatgtagggtaaa

SEQ ID NO: 20118 - DNA, 1415 bp, Artificial Sequence
  chemically treated genomic DNA (Homo sapiens) CpG-island No: 20118
tttaccctacataaaaacaaacaataaaaaaaaacacaaatctaacttaaacaaaaaatatattcctctttatcacccgccgaaaaccctcgcgccgcgcgtaaacgaacgacgaacacccgacgacatccgcgccaacgaccacctccccgacccgcaaccgacctcaaaaaccgaaattacgacccgaaatccgaaaacgacgtccaacgctatcaacgaacgaataaaacgaaaaaaaacgaaaaaaaaacgccgaaatcgaaaaaaacgaacgaaaaccgacgcgaaaccccgcaacccgacgtcgacgaaaataaaaaaaaaaaaacgcaaaaaacaacccgaaaccccgaaacccccgaactcctacgataataaccgaaactacccgaacccgacccgccgcccgactacgcaaaacaaaacctcgaaaaccacgcgcccaccttcgcccgcaaccgcgaccgtacgctacgaaaacctaaactcgcacaaattaccgcccgcgacccgaaccccgccgacccccgccctcccgccgcgatcattattcaccgcgcgcctcctacctccacaacgccgacgactacgacgactccctctcccgactcgaactccgaaatcgacgactcccaaacccccgacgaccgaaaacgcgacgacgccgactattaatacccgcgaacgacgacgacgcgaacgcgcgaacaaaactaacgataaccgactaaaatccgaaccatcaaaaataacgcgaaacgaaaaaaaaaacgaaacaaacgaaataaataaaaaacgaactccgaatcgccataaccgcctcgacgccgaaaccaacgctactcgcgcaaaaaaaaacgacgcaaaacgaacaacgaccgcgtccccgccccgcgccccaaccgaacgcccgcaccgctacgcccgcgccgaacccgccgcctctaaaaccgacgaacgaaaaatacaataaccaccgcccctccccgaatctaaaccgacccctcgacgaaaaaaaacgaacgccgcgcaacccgaacaacgaaaacgcgaaaaaaccacaaccccctccaacgtccgaacccgcgccctacgcccgccccgccccgctccgctccgcccgaacaaatacgcccaaaaacctcccgaacccaacgcgccgccgaaaatctacgcctctcttaaacttccgaccaaaaccgaactccgcgcgacgctacctaatacaacgcgaaaaacgccactaacgaaacgcgaatccaacaactataacgaaaaacgaaccgaaaaaaacgaaaaacgtatacacgacgaaaccgaaaacgacaaacgaacgatcaaaaactcgaactctacaaatcgctttttaaaatcctacctaaaactacttcgcctacgacgtcgcgcgaaaa

SEQ ID NO: 20119 - DNA, 1415 bp, Artificial Sequence
  chemically treated genomic DNA (Homo sapiens) CpG-island No: 20119
tttgttttgtataaaggtagatagtaaagagagatataaatttaatttgggtagagggtgtgtttttttttgttattcgtcgggaattttcgcgtcgcgcgtgggcgagcggcgggtattcggcggtattcgcgttagcggttattttttcggttcgtaatcggttttaggggtcgagattgcggttcgaggttcggaagcggcgtttagcgttgttagcgggcgggtaggacggaaggaaacgggggaagggcgtcggggtcgggggaggcgagcggggatcggcgcggagtttcgtagttcgacgtcggcggaggtgaggggagaggggcgtagggggtagttcggagtttcgaggttttcgagtttttgcgatggtggtcggggttgttcgggttcgattcgtcgttcgattgcgtagggtaggatttcggggattacgcgtttattttcgttcgtagtcgcggtcgtgcgttgcgggagtttggattcgtataagttgtcgttcgcggttcggatttcgtcggttttcgttttttcgtcgcggttattgtttatcgcgcgttttttatttttatagcgtcggcggttgcggcggttttttttttcggttcgggtttcgggatcggcggtttttaagttttcggcggtcgagggcgcggcggcgtcggttattaatattcgcggacggcggcggcgcgggcgcgcgagtagggttggcggtggtcggttgaggttcgagttattaaaggtggcgcggggcggaggggagggcggagtaggcggggtgggtggggagcgggtttcgggtcgttatggtcgtttcgacgtcggggttagcgttattcgcgtagggaggagcggcgtaaagcgggtagcggtcgcgttttcgtttcgcgttttagtcgagcgttcgtatcgttgcgttcgcgtcggattcgtcgtttttgaggtcggcgagcgggaagtgtagtggttatcgttttttttcgggtttgggtcggtttttcggcggggggaggcgggcgtcgcgtagttcgagtagcggggacgcgggagagttatagttttttttagcgttcgggttcgcgttttgcgttcgtttcgtttcgtttcgtttcgttcgggtaggtgcgtttaggggtttttcgagtttagcgcgtcgtcggggatttgcgttttttttgggttttcggttagggtcgggtttcgcgcggcgttatttaatgtagcgcggggagcgttattggcgagacgcgaatttagtagttgtggcgaaaaacgaatcggggagagcgggagacgtgtgtacggcgaagtcgggagcggtaggcgggcggttaggggttcggattttgtaggtcgttttttgaggttttgtttggggttgtttcgtttgcgacgtcgcgcgggga

SEQ ID NO: 20120 - DNA, 1415 bp, Artificial Sequence
  chemically treated genomic DNA (Homo sapiens) CpG-island No: 20120
tccccgcgcgacgtcgcaaacgaaacaaccccaaacaaaacctcaaaaaacgacctacaaaatccgaacccctaaccgcccgcctaccgctcccgacttcgccgtacacacgtctcccgctctccccgattcgtttttcgccacaactactaaattcgcgtctcgccaataacgctccccgcgctacattaaataacgccgcgcgaaacccgaccctaaccgaaaacccaaaaaaaacgcaaatccccgacgacgcgctaaactcgaaaaacccctaaacgcacctacccgaacgaaacgaaacgaaacgaaacgaacgcaaaacgcgaacccgaacgctaaaaaaaactataactctcccgcgtccccgctactcgaactacgcgacgcccgcctccccccgccgaaaaaccgacccaaacccgaaaaaaaacgataaccactacacttcccgctcgccgacctcaaaaacgacgaatccgacgcgaacgcaacgatacgaacgctcgactaaaacgcgaaacgaaaacgcgaccgctacccgctttacgccgctcctccctacgcgaataacgctaaccccgacgtcgaaacgaccataacgacccgaaacccgctccccacccaccccgcctactccgccctcccctccgccccgcgccacctttaataactcgaacctcaaccgaccaccgccaaccctactcgcgcgcccgcgccgccgccgtccgcgaatattaataaccgacgccgccgcgccctcgaccgccgaaaacttaaaaaccgccgatcccgaaacccgaaccgaaaaaaaaaaccgccgcaaccgccgacgctataaaaataaaaaacgcgcgataaacaataaccgcgacgaaaaaacgaaaaccgacgaaatccgaaccgcgaacgacaacttatacgaatccaaactcccgcaacgcacgaccgcgactacgaacgaaaataaacgcgtaatccccgaaatcctaccctacgcaatcgaacgacgaatcgaacccgaacaaccccgaccaccatcgcaaaaactcgaaaacctcgaaactccgaactaccccctacgcccctctcccctcacctccgccgacgtcgaactacgaaactccgcgccgatccccgctcgcctcccccgaccccgacgcccttcccccgtttccttccgtcctacccgcccgctaacaacgctaaacgccgcttccgaacctcgaaccgcaatctcgacccctaaaaccgattacgaaccgaaaaaataaccgctaacgcgaataccgccgaatacccgccgctcgcccacgcgcgacgcgaaaattcccgacgaataacaaaaaaaaacacaccctctacccaaattaaatttatatctctctttactatctacctttatacaaaacaaa

SEQ ID NO: 20121 - DNA, 543 bp, Artificial Sequence
  chemically treated genomic DNA (Homo sapiens) CpG-island No: 20121
ttttttgtcggtttcgttcggttcggtttatttcgtttttatttcggcgtttatttattgttttttcgcgtagttatcgagcgtagatttcgcgttttcgattggaacgtttttttattatttagttatatttaggggttggacgttttattttcgttttcgagttataaaaggtttaggatcgtttttttcgagttagtaggtaaagtcgcggcggcgggagggaggtcgggaggggtcgcgcgtttcggtcggtttagtcggggaaggggagcggcgggcggggcggggggtagcgtattatatataatttttttttgtcgtgcgatcgcgttttgttttcgtttcggggttttcgtttcgtaagttttgattataatgtcggagtcgtcgagttatttttgttattttgttcggggacggttttggggtagttattatcgcgaagtacggagggtggggcgggtcgggtttcggggaggggtggggggatgtgaaaggtttcggatgttgttgaacgggagttttttttagagggagtga

SEQ ID NO: 20122 - DNA, 543 bp, Artificial Sequence
  chemically treated genomic DNA (Homo sapiens) CpG-island No: 20122
tcactccctctaaaaaaaactcccgttcaacaacatccgaaacctttcacatccccccacccctccccgaaacccgacccgccccaccctccgtacttcgcgataataactaccccaaaaccgtccccgaacaaaataacaaaaataactcgacgactccgacattataatcaaaacttacgaaacgaaaaccccgaaacgaaaacaaaacgcgatcgcacgacaaaaaaaaattatatataatacgctaccccccgccccgcccgccgctccccttccccgactaaaccgaccgaaacgcgcgacccctcccgacctccctcccgccgccgcgactttacctactaactcgaaaaaaacgatcctaaaccttttataactcgaaaacgaaaataaaacgtccaacccctaaatataactaaataataaaaaaacgttccaatcgaaaacgcgaaatctacgctcgataactacgcgaaaaaacaataaataaacgccgaaataaaaacgaaataaaccgaaccgaacgaaaccgacaaaaaa

SEQ ID NO: 20123 - DNA, 543 bp, Artificial Sequence
  chemically treated genomic DNA (Homo sapiens) CpG-island No: 20123
ttattttttttggaaggggttttcgtttagtaatattcgggattttttatatttttttattttttttcgaggttcggttcgttttatttttcgtgtttcgcggtagtaattgttttagggtcgttttcgggtaggatgataagggtggttcggcggtttcggtattgtgattaggatttgcggggcgggggtttcggggcgggggtagggcgcggtcgtacggtaagggagggttgtgtgtggtgcgttgtttttcgtttcgttcgtcgtttttttttttcggttgggtcgatcggggcgcgcggtttttttcggtttttttttcgtcgtcgcggttttatttgttggttcgggggaagcggttttagattttttatggttcggaaacgggagtgaggcgtttagtttttgagtgtggttgagtgatggggaggcgttttaatcgagagcgcgggatttgcgttcggtgattgcgcgaggggataatgggtgggcgtcgaggtgggggcgaggtgggtcgggtcgggcggagtcggtaggagg

SEQ ID NO: 20124 - DNA, 543 bp, Artificial Sequence
  chemically treated genomic DNA (Homo sapiens) CpG-island No: 20124
cctcctaccgactccgcccgacccgacccacctcgcccccacctcgacgcccacccattatcccctcgcgcaatcaccgaacgcaaatcccgcgctctcgattaaaacgcctccccatcactcaaccacactcaaaaactaaacgcctcactcccgtttccgaaccataaaaaatctaaaaccgcttcccccgaaccaacaaataaaaccgcgacgacgaaaaaaaaaccgaaaaaaaccgcgcgccccgatcgacccaaccgaaaaaaaaaaacgacgaacgaaacgaaaaacaacgcaccacacacaaccctcccttaccgtacgaccgcgccctacccccgccccgaaacccccgccccgcaaatcctaatcacaataccgaaaccgccgaaccacccttatcatcctacccgaaaacgaccctaaaacaattactaccgcgaaacacgaaaaataaaacgaaccgaacctcgaaaaaaaataaaaaaatataaaaaatcccgaatattactaaacgaaaaccccttccaaaaaaaataa

SEQ ID NO: 20125 - DNA, 890 bp, Artificial Sequence
  chemically treated genomic DNA (Homo sapiens) CpG-island No: 20125
cgtcgttgttgtcgtcgtcgtcgtttagagattgttgagttcgttcgttcgtcgttattatttatttcggatataggtgaggaattcggtcgtcgtcgcgtttcgttttttgttttaggttagtttttcgaacgcgtgggagtcgttttcgtttcgtttttttatttttattcgtttcgcggtggcggcgtcgggttgaggcggagtttttttagcggatacgggcggcggtttttttttcgttgggttcgggagggcggttagcggtcgttttcggttttttgttttcgtatcgacgtttcggcgtcgatcggtgttcgttttttcgttttgttttcgggggtgggtagggcgtttatacgcgagatttttggggatttttttgtcgtcggttttcgaaggtggacgaggtatggtcggggcgtcgtcggtcgcgatttatttttatttttgtttttgcgggtttttattttttttttcgtcgtttttttcgttttcgttcgagataatgattcggcggcggcggcggcgggtatcgtagtggcgtaggtgaggtcgtttttttttttttttttcggtcgtttttttttttttttttttttcgcgtagttttcgcgttgggcgttgcggcggcgggattcggtttttttttatttcgggaggcggtggcgcggcggggaggggtcgggggtttcggggatttaagcgcgagggaaaggtttggtcgagagcgggtcggagtttaggtttggcgcggcggcgttcgttaggtagatcggggcgaggttgcgcgtcggcgggaggggagtttattgcggggtgaggttttggggtggggttcgtttgggatttagagttgaattttttgggtttcgcggtgggaggaagga

SEQ ID NO: 20126 - DNA, 890 bp, Artificial Sequence
  chemically treated genomic DNA (Homo sapiens) CpG-island No: 20126
tccttcctcccaccgcgaaacccaaaaaattcaactctaaatcccaaacgaaccccaccccaaaacctcaccccgcaataaactcccctcccgccgacgcgcaacctcgccccgatctacctaacgaacgccgccgcgccaaacctaaactccgacccgctctcgaccaaacctttccctcgcgcttaaatccccgaaacccccgacccctccccgccgcgccaccgcctcccgaaataaaaaaaaaccgaatcccgccgccgcaacgcccaacgcgaaaactacgcgaaaaaaaaaaaaaaaaaaaaacgaccgaaaaaaaaaaaaaaaaacgacctcacctacgccactacgatacccgccgccgccgccgccgaatcattatctcgaacgaaaacgaaaaaaacgacgaaaaaaaaaataaaaacccgcaaaaacaaaaataaaaataaatcgcgaccgacgacgccccgaccatacctcgtccaccttcgaaaaccgacgacaaaaaaatccccaaaaatctcgcgtataaacgccctacccacccccgaaaacaaaacgaaaaaacgaacaccgatcgacgccgaaacgtcgatacgaaaacaaaaaaccgaaaacgaccgctaaccgccctcccgaacccaacgaaaaaaaaaccgccgcccgtatccgctaaaaaaactccgcctcaacccgacgccgccaccgcgaaacgaataaaaataaaaaaacgaaacgaaaacgactcccacgcgttcgaaaaactaacctaaaacaaaaaacgaaacgcgacgacgaccgaattcctcacctatatccgaaataaataataacgacgaacgaacgaactcaacaatctctaaacgacgacgacgacaacaacgacg

SEQ ID NO: 20127 - DNA, 890 bp, Artificial Sequence
  chemically treated genomic DNA (Homo sapiens) CpG-island No: 20127
tttttttttttatcgcggagtttaggaaatttagttttaggttttaggcgagttttattttaaaattttatttcgtagtggatttttttttcgtcggcgcgtagtttcgtttcggtttatttggcgggcgtcgtcgcgttaggtttgggtttcggttcgttttcggttaggtttttttttcgcgtttgggttttcgaggttttcggttttttttcgtcgcgttatcgtttttcggggtgggggagggtcgggtttcgtcgtcgtagcgtttagcgcggaggttgcgcgagggggagggaaaggagggggcggtcgagggagaggggagggggcggttttatttgcgttattgcgatgttcgtcgtcgtcgtcgtcgagttattatttcgggcggaagcgagaagggcggcgagggagggggtggaagttcgtagagataagggtggggatggatcgcggtcggcggcgtttcggttatgtttcgtttattttcgggagtcggcgatagggagatttttagggatttcgcgtgtgggcgttttatttattttcgggggtaggacgggggagcgagtatcgatcggcgtcggggcgtcgatgcggaagtaaggagtcggaggcggtcgttagtcgttttttcgagtttagcggaagaggagtcgtcgttcgtgttcgttgaggagatttcgttttagttcggcgtcgttatcgcggggcgagtggggatgaggggacggagcgaggacggtttttacgcgttcggaaggttggtttgggataggaagcgaggcgcggcggcggtcgggttttttatttgtgttcggagtgggtggtggcggcggacggacgggtttagtagtttttgggcggcggcggcggtagtagcggcg

SEQ ID NO: 20128 - DNA, 890 bp, Artificial Sequence
  chemically treated genomic DNA (Homo sapiens) CpG-island No: 20128
cgccgctactaccgccgccgccgcccaaaaactactaaacccgtccgtccgccgccaccacccactccgaacacaaataaaaaacccgaccgccgccgcgcctcgcttcctatcccaaaccaaccttccgaacgcgtaaaaaccgtcctcgctccgtcccctcatccccactcgccccgcgataacgacgccgaactaaaacgaaatctcctcaacgaacacgaacgacgactcctcttccgctaaactcgaaaaaacgactaacgaccgcctccgactccttacttccgcatcgacgccccgacgccgatcgatactcgctcccccgtcctacccccgaaaataaataaaacgcccacacgcgaaatccctaaaaatctccctatcgccgactcccgaaaataaacgaaacataaccgaaacgccgccgaccgcgatccatccccacccttatctctacgaacttccaccccctccctcgccgcccttctcgcttccgcccgaaataataactcgacgacgacgacgacgaacatcgcaataacgcaaataaaaccgccccctcccctctccctcgaccgccccctcctttccctccccctcgcgcaacctccgcgctaaacgctacgacgacgaaacccgaccctcccccaccccgaaaaacgataacgcgacgaaaaaaaaccgaaaacctcgaaaacccaaacgcgaaaaaaaaacctaaccgaaaacgaaccgaaacccaaacctaacgcgacgacgcccgccaaataaaccgaaacgaaactacgcgccgacgaaaaaaaaatccactacgaaataaaattttaaaataaaactcgcctaaaacctaaaactaaatttcctaaactccgcgataaaaaaaaaaa

SEQ ID NO: 20129 - DNA, 819 bp, Artificial Sequence
  chemically treated genomic DNA (Homo sapiens) CpG-island No: 20129
cgcgtatagcggtaattcgggcgtgcgggggcgcgcgcggttagggaggggtttgcggaggcgcgaggttttcggaagcgtttttttcggaaggtagggaggtagcgtcggttttcggaggcggtttgggcgatggcggcggagttttgtttataacgtgggtaatcgcgtagttggaggatggttttattcgggtttgtcgtagttggggagtaggcgtcgggggttgaggcggagtcgggtttcgcggggtcgtcgtcgtcgtttttatcgttttttttggggtttttgttttttttgtagcgggaatttttttataattggtaggcgattaaggcgtcgttgaaggagcgtttcgtttttttttttaattcggagttgttgagcgatgtgcgtttcgtattgggtaagggtcgcggcgtcgtcgtcgttgggggttcgtagcgtattttcgtttatcgtttcgtgttggcggtcggtagcgtcgtttttgacgttatgtttaacggcggtatggttattacgtcggtcgagatcgagttgtcggacgtggagttcgtagtttttttggcgttgttgaggtgagcggtagcgcgggtcgggtcgggtcgggtcgggtcgggtcgggttgggagattttcggggttcggtttattcggattttcggatgattttgggttgggtttttttgattcgttcggggttttagttttttttcgagtcgttgatgtttcggagggtcgaaatcgaaatttgtgaattaggacggtttagtcgttaattaaacgttagtgtttttattaggtaagcgtgcgtttt

SEQ ID NO: 20130 - DNA, 819 bp, Artificial Sequence
  chemically treated genomic DNA (Homo sapiens) CpG-island No: 20130
aaaacgcacgcttacctaataaaaacactaacgtttaattaacgactaaaccgtcctaattcacaaatttcgatttcgaccctccgaaacatcaacgactcgaaaaaaaactaaaaccccgaacgaatcaaaaaaacccaacccaaaatcatccgaaaatccgaataaaccgaaccccgaaaatctcccaacccgacccgacccgacccgacccgacccgacccgcgctaccgctcacctcaacaacgccaaaaaaactacgaactccacgtccgacaactcgatctcgaccgacgtaataaccataccgccgttaaacataacgtcaaaaacgacgctaccgaccgccaacacgaaacgataaacgaaaatacgctacgaacccccaacgacgacgacgccgcgacccttacccaatacgaaacgcacatcgctcaacaactccgaattaaaaaaaaaaacgaaacgctccttcaacgacgccttaatcgcctaccaattataaaaaaattcccgctacaaaaaaaacaaaaaccccaaaaaaaacgataaaaacgacgacgacgaccccgcgaaacccgactccgcctcaacccccgacgcctactccccaactacgacaaacccgaataaaaccatcctccaactacgcgattacccacgttataaacaaaactccgccgccatcgcccaaaccgcctccgaaaaccgacgctacctccctaccttccgaaaaaaacgcttccgaaaacctcgcgcctccgcaaacccctccctaaccgcgcgcgcccccgcacgcccgaattaccgctatacgcg

SEQ ID NO: 20131 - DNA, 819 bp, Artificial Sequence
  chemically treated genomic DNA (Homo sapiens) CpG-island No: 20131
aaaacgtacgtttgtttaatgaagatattaacgtttagttggcgattgagtcgttttggtttatagatttcgatttcgatttttcggagtattaacggttcgggaggaaattgaggtttcgggcgggttagaagagtttagtttaaggttattcgggagttcgggtaggtcgggtttcggggattttttagttcggttcggttcggttcggttcggttcggttcgcgttgtcgtttattttagtagcgttaggaaggttgcgggttttacgttcggtagttcgatttcggtcgacgtggtggttatgtcgtcgttgaatatggcgttaaagacggcgttgtcggtcgttagtacgaagcggtgggcggggatgcgttgcgggtttttagcggcggcggcgtcgcgatttttgtttagtacgaagcgtatatcgtttagtagtttcgagttgaagaggaaggcgaagcgtttttttagcgacgttttggtcgtttgttagttgtagagaggttttcgttgtagggggagtaggggttttagagaggacggtgagggcggcggcggcggtttcgcggggttcggtttcgttttagttttcgacgtttgttttttagttgcggtaggttcgagtgaggttattttttagttgcgcggttgtttacgttatggataaaatttcgtcgttatcgtttaggtcgttttcggaggtcggcgttgtttttttgtttttcgggaaaggcgttttcgggggtttcgcgttttcgtaggtttttttttgatcgcgcgcgttttcgtacgttcgggttgtcgttgtgcgcg

SEQ ID NO: 20132 - DNA, 819 bp, Artificial Sequence
  chemically treated genomic DNA (Homo sapiens) CpG-island No: 20132
cgcgcacaacgacaacccgaacgtacgaaaacgcgcgcgatcaaaaaaaaacctacgaaaacgcgaaacccccgaaaacgcctttcccgaaaaacaaaaaaacaacgccgacctccgaaaacgacctaaacgataacgacgaaattttatccataacgtaaacaaccgcgcaactaaaaaataacctcactcgaacctaccgcaactaaaaaacaaacgtcgaaaactaaaacgaaaccgaaccccgcgaaaccgccgccgccgccctcaccgtcctctctaaaacccctactccccctacaacgaaaacctctctacaactaacaaacgaccaaaacgtcgctaaaaaaacgcttcgccttcctcttcaactcgaaactactaaacgatatacgcttcgtactaaacaaaaatcgcgacgccgccgccgctaaaaacccgcaacgcatccccgcccaccgcttcgtactaacgaccgacaacgccgtctttaacgccatattcaacgacgacataaccaccacgtcgaccgaaatcgaactaccgaacgtaaaacccgcaaccttcctaacgctactaaaataaacgacaacgcgaaccgaaccgaaccgaaccgaaccgaaccgaactaaaaaatccccgaaacccgacctacccgaactcccgaataaccttaaactaaactcttctaacccgcccgaaacctcaatttcctcccgaaccgttaatactccgaaaaatcgaaatcgaaatctataaaccaaaacgactcaatcgccaactaaacgttaatatcttcattaaacaaacgtacgtttt

SEQ ID NO: 20133 - DNA, 735 bp, Artificial Sequence
  chemically treated genomic DNA (Homo sapiens) CpG-island No: 20133
atttttgtttcgcggcggacggttttagttttttcggaaaagttgcgaggttttcgtcgcggcgagttaattttcgtcgtttttcggcgcgattttcgtcgcgtcggtttatttatttatgttgggtcgttaggtggttgaagatataggtgatcgggatggtcgagagggatagtacgaagatttcggtggtcgtagaggtatttatcgtagtcgtcgcgtcgttcgttttttatcgtatttcgttgggcgtttcgttttagttttcggcggcgttcgcgtttttttggcgtttgtttttcgaggcgttttagtcgcgtttttcgcgtggcgtttttagcggcgtttttttagcggtgtttttttcgcgcgtttttttagttcgtagtcgtttttcgcgtttggtttcgtcgttttaagtgcgtagggtcgcggtgtagtttcgggaggcgtttttgtagtgtttttgttaggggcgttacggtttagcggtaagcgttcggcggcgtcgaggggcggcgatattttcgcgtagggataggtgtttttggcggcgcgcgtttcgagggagggttcggggtacggtcgggaatcggttatcgaagagttggagaggcgcggggttgagttgcggttcgggaaaggtggaattagattcgagggtgttagaggaggaagggttcgcgggatcgtttatgggggagtttacggtttagaagtgggaaaggataaaat

SEQ ID NO: 20134 - DNA, 735 bp, Artificial Sequence
  chemically treated genomic DNA (Homo sapiens) CpG-island No: 20134
attttatcctttcccacttctaaaccgtaaactcccccataaacgatcccgcgaacccttcctcctctaacaccctcgaatctaattccacctttcccgaaccgcaactcaaccccgcgcctctccaactcttcgataaccgattcccgaccgtaccccgaaccctccctcgaaacgcgcgccgccaaaaacacctatccctacgcgaaaatatcgccgcccctcgacgccgccgaacgcttaccgctaaaccgtaacgcccctaacaaaaacactacaaaaacgcctcccgaaactacaccgcgaccctacgcacttaaaacgacgaaaccaaacgcgaaaaacgactacgaactaaaaaaacgcgcgaaaaaaacaccgctaaaaaaacgccgctaaaaacgccacgcgaaaaacgcgactaaaacgcctcgaaaaacaaacgccaaaaaaacgcgaacgccgccgaaaactaaaacgaaacgcccaacgaaatacgataaaaaacgaacgacgcgacgactacgataaatacctctacgaccaccgaaatcttcgtactatccctctcgaccatcccgatcacctatatcttcaaccacctaacgacccaacataaataaataaaccgacgcgacgaaaatcgcgccgaaaaacgacgaaaattaactcgccgcgacgaaaacctcgcaacttttccgaaaaaactaaaaccgtccgccgcgaaacaaaaat

SEQ ID NO: 20135 - DNA, 735 bp, Artificial Sequence
  chemically treated genomic DNA (Homo sapiens) CpG-island No: 20135
attttgtttttttttatttttgggtcgtgggtttttttatagacgatttcgcgggtttttttttttttgatattttcggatttggttttatttttttcggatcgtagtttagtttcgcgtttttttagtttttcgatgatcggttttcggtcgtgtttcgggttttttttcggagcgcgcgtcgttaggggtatttgtttttgcgcgggggtgtcgtcgtttttcggcgtcgtcgggcgtttgtcgttgagtcgtggcgtttttggtaggagtattgtaaggacgtttttcgggattgtatcgcggttttgcgtatttggggcgacggggttaggcgcgggggacggttgcgggttgggagggcgcgcggaggagatatcgttgaggggacgtcgttgagggcgttacgcggggggcgcggttgaggcgtttcgaagggtaagcgttaagggggcgcgggcgtcgtcggaagttggggcggggcgtttagcgggatgcggtgaagggcgagcggcgcggcggttgcgatgagtgtttttgcggttatcggggttttcgtgttgtttttttcggttatttcggttatttatgtttttaattatttggcggtttagtatgagtgagtgagtcggcgcggcgggggtcgcgtcgaggggcggcgggagttggttcgtcgcgacgggagtttcgtaattttttcgagggggttgggatcgttcgtcgcgggatagaggt

SEQ ID NO: 20136 - DNA, 735 bp, Artificial Sequence
  chemically treated genomic DNA (Homo sapiens) CpG-island No: 20136
acctctatcccgcgacgaacgatcccaaccccctcgaaaaaattacgaaactcccgtcgcgacgaaccaactcccgccgcccctcgacgcgacccccgccgcgccgactcactcactcatactaaaccgccaaataattaaaaacataaataaccgaaataaccgaaaaaaacaacacgaaaaccccgataaccgcaaaaacactcatcgcaaccgccgcgccgctcgcccttcaccgcatcccgctaaacgccccgccccaacttccgacgacgcccgcgcccccttaacgcttacccttcgaaacgcctcaaccgcgccccccgcgtaacgccctcaacgacgtcccctcaacgatatctcctccgcgcgccctcccaacccgcaaccgtcccccgcgcctaaccccgtcgccccaaatacgcaaaaccgcgatacaatcccgaaaaacgtccttacaatactcctaccaaaaacgccacgactcaacgacaaacgcccgacgacgccgaaaaacgacgacacccccgcgcaaaaacaaatacccctaacgacgcgcgctccgaaaaaaaacccgaaacacgaccgaaaaccgatcatcgaaaaactaaaaaaacgcgaaactaaactacgatccgaaaaaaataaaaccaaatccgaaaatatcaaaaaaaaaaaaacccgcgaaatcgtctataaaaaaacccacgacccaaaaataaaaaaaaacaaaat

SEQ ID NO: 20137 - DNA, 1191 bp, Artificial Sequence
  chemically treated genomic DNA (Homo sapiens) CpG-island No: 20137
ggggttcggttagttcgtttttagtttcgttagcgagatttttttttttcgttcgggtggcgagatttttttggttcgtacgtttggttttcggggttgggaggcgtgtgtgtcgttttaaaagttttttttcggcgcggcgggtcggttttttttttgatagcgtcgaggtaagcggagttaagcgagtcgggcggtttttaagggagttagcgttcgttcgggcggttagttcggcggggggcggcggggcgggtcgggggcggtcggggcgcgggcggcgcggcgtcgcggcgtttggggagcgggtttaggtttcgggagttcggcggggtagggtagggcgaggcggtgaagggaggtttagtttcgattcggcgttttgtttgttttatcggcggcgattcggcgttcgggggttgttgaggcggggagtcgagagcgaacggacgggaggtagcggagtcgagcggaggttgcgagtttagtgcgtttcggttcggttcggttcgtcgttcgtttttttttttttttttttttcgtcgcgtttttttttttcgttttttttcgtttttttttttttttttcgttcggcgttgttttcgtttgcgttcgggtcgtcgaatttagttcggtcggggttttcggtttcgcgcgttttcggttgggttcggcggggatcgggttttcgcggttgatatcgttttttttcggggattcggtggatttcggatttttcggaacgtgaattgagtcgtgggagcggtttcgtttagggtcgatcgcggggttgggttgagtagattttcgcggtcgtttcggacgtcgcgggtgtcggggtacggacgttttgggttcgggttgagcgcgtttcgggcgttcggcggtgttagtttatttcgggcggggtggggtagggtagattttagcggaatacggattcggtcgatttggattgggtagagcgaatttcggacggtgtagagttcggggaatgtcgggcgtgggttgaggggatttcggcgtttttttagtttttcgattttggtttacgcgttgggatttgttcggcgttttttttgttttttcgcgtttcggttatttgtggtttcggagttttaaatttgtcggattttcgtttattttcgatttcgagtttggagaggtttgagaaagattttttttgttttt

SEQ ID NO: 20138 - DNA, 1191 bp, Artificial Sequence
  chemically treated genomic DNA (Homo sapiens) CpG-island No: 20138
aaaaacaaaaaaaatctttctcaaacctctccaaactcgaaatcgaaaataaacgaaaatccgacaaatttaaaactccgaaaccacaaataaccgaaacgcgaaaaaacaaaaaaaacgccgaacaaatcccaacgcgtaaaccaaaatcgaaaaactaaaaaaacgccgaaatcccctcaacccacgcccgacattccccgaactctacaccgtccgaaattcgctctacccaatccaaatcgaccgaatccgtattccgctaaaatctaccctaccccaccccgcccgaaataaactaacaccgccgaacgcccgaaacgcgctcaacccgaacccaaaacgtccgtaccccgacacccgcgacgtccgaaacgaccgcgaaaatctactcaacccaaccccgcgatcgaccctaaacgaaaccgctcccacgactcaattcacgttccgaaaaatccgaaatccaccgaatccccgaaaaaaaacgatatcaaccgcgaaaacccgatccccgccgaacccaaccgaaaacgcgcgaaaccgaaaaccccgaccgaactaaattcgacgacccgaacgcaaacgaaaacaacgccgaacgaaaaaaaaaaaaaaaaacgaaaaaaaacgaaaaaaaaaaacgcgacgaaaaaaaaaaaaaaaaaaaaacgaacgacgaaccgaaccgaaccgaaacgcactaaactcgcaacctccgctcgactccgctacctcccgtccgttcgctctcgactccccgcctcaacaacccccgaacgccgaatcgccgccgataaaacaaacaaaacgccgaatcgaaactaaacctcccttcaccgcctcgccctaccctaccccgccgaactcccgaaacctaaacccgctccccaaacgccgcgacgccgcgccgcccgcgccccgaccgcccccgacccgccccgccgccccccgccgaactaaccgcccgaacgaacgctaactcccttaaaaaccgcccgactcgcttaactccgcttacctcgacgctatcaaaaaaaaaaccgacccgccgcgccgaaaaaaaacttttaaaacgacacacacgcctcccaaccccgaaaaccaaacgtacgaaccaaaaaaatctcgccacccgaacgaaaaaaaaaaatctcgctaacgaaactaaaaacgaactaaccgaacccc

SEQ ID NO: 20139 - DNA, 1191 bp, Artificial Sequence
  chemically treated genomic DNA (Homo sapiens) CpG-island No: 20139
gggggtaggaaaaattttttttaagtttttttaggttcggggtcgggaatgagcgagggttcggtagatttggggtttcgaggttataggtgatcggggcgcggggaggtagaggagacgtcgggtaggttttagcgcgtgagttaaagtcggagggttgggagggcgtcgggatttttttagtttacgttcggtatttttcgggttttgtatcgttcgggattcgttttgtttagtttagatcggtcgggttcgtgtttcgttggggtttgttttgttttatttcgttcggagtgagttggtatcgtcgggcgttcgggacgcgtttagttcggatttagaacgttcgtgtttcggtattcgcggcgttcggagcggtcgcgagggtttgtttagtttagtttcgcggtcggttttgggcgagatcgtttttacggtttagtttacgtttcgaaaggttcggaatttatcgggttttcgaggaggggcgatgttagtcgcggggattcggttttcgtcgggtttagtcgagagcgcgcgaagtcgggggtttcggtcgggttgggttcggcggttcgggcgtaggcgggagtagcgtcgggcggaggagaggagaggaggcgagaagaggcgaggggaggaggcgcggcgagggaaagagaggggagggggcgagcggcgggtcgggtcgggtcggggcgtattaggttcgtagttttcgttcggtttcgttatttttcgttcgttcgttttcggtttttcgttttagtagttttcgggcgtcgggtcgtcgtcggtggggtaaatagagcgtcgggtcggggttgggtttttttttatcgtttcgttttgttttgtttcgtcgggttttcggggtttgggttcgttttttaagcgtcgcggcgtcgcgtcgttcgcgtttcggtcgttttcggttcgtttcgtcgtttttcgtcggattggtcgttcgggcgggcgttggtttttttaaaggtcgttcggttcgtttggtttcgtttgtttcggcgttgttagggaaggggtcggttcgtcgcgtcgggagggagtttttaaagcgatatatacgttttttaatttcgagggttaagcgtgcgagttaggggggtttcgttattcgggcgagggggaagggtttcgttggcggggttggaggcggattgatcggatttt

SEQ ID NO: 20140 - DNA, 1191 bp, Artificial Sequence
  chemically treated genomic DNA (Homo sapiens) CpG-island No: 20140
aaaatccgatcaatccgcctccaaccccgccaacgaaacccttccccctcgcccgaataacgaaacccccctaactcgcacgcttaaccctcgaaattaaaaaacgtatatatcgctttaaaaactccctcccgacgcgacgaaccgaccccttccctaacaacgccgaaacaaacgaaaccaaacgaaccgaacgacctttaaaaaaaccaacgcccgcccgaacgaccaatccgacgaaaaacgacgaaacgaaccgaaaacgaccgaaacgcgaacgacgcgacgccgcgacgcttaaaaaacgaacccaaaccccgaaaacccgacgaaacaaaacaaaacgaaacgataaaaaaaaacccaaccccgacccgacgctctatttaccccaccgacgacgacccgacgcccgaaaactactaaaacgaaaaaccgaaaacgaacgaacgaaaaataacgaaaccgaacgaaaactacgaacctaatacgccccgacccgacccgacccgccgctcgccccctcccctctctttccctcgccgcgcctcctcccctcgcctcttctcgcctcctctcctctcctccgcccgacgctactcccgcctacgcccgaaccgccgaacccaacccgaccgaaacccccgacttcgcgcgctctcgactaaacccgacgaaaaccgaatccccgcgactaacatcgcccctcctcgaaaacccgataaattccgaacctttcgaaacgtaaactaaaccgtaaaaacgatctcgcccaaaaccgaccgcgaaactaaactaaacaaaccctcgcgaccgctccgaacgccgcgaataccgaaacacgaacgttctaaatccgaactaaacgcgtcccgaacgcccgacgataccaactcactccgaacgaaataaaacaaaacaaaccccaacgaaacacgaacccgaccgatctaaactaaacaaaacgaatcccgaacgatacaaaacccgaaaaataccgaacgtaaactaaaaaaatcccgacgccctcccaaccctccgactttaactcacgcgctaaaacctacccgacgtctcctctacctccccgcgccccgatcacctataacctcgaaaccccaaatctaccgaaccctcgctcattcccgaccccgaacctaaaaaaacttaaaaaaaatttttcctaccccc

SEQ ID NO: 20141 - DNA, 771 bp, Artificial Sequence
  chemically treated genomic DNA (Homo sapiens) CpG-island No: 20141
cgtttacggagattatagcgggatgtagggcggggtcgggttgagggggcggagttaggggcggggtacggtgattttggtttcgttttttttcggtcgtttagggcggtgtcgttggggcggtgtcgttggggcggggtttgcggggtggggttgacggtacggggcggggtttcggggatttcggtaagttcgcgtatttggtaggagttgtagttatcgtcgttcgcgtttttaaggttttacggtttttttagtagagattcgggttcgttcgttatgttcgtcgtagacgaggttgacgggttgggcgtggttcggtcgtattatggttgtgagtgcggggtttcgcggcgcgggggtttcgggttgggttaattgtagacgaggcgcgatttttttgggggttcggtcgggcgggtggggtagggcggttgtcggtagttcggattcggaagagtcgtttcggtggggcggcgggcggcgggcggggaggtttttggttcgcgttttttcggggttcgaggcggcggagaggattttcgaggtttttcgttttagttggggtcgcggtagggggagttttatttagcgtttttcgtcgtttaggttcggtcgagattggggaagacggtttagagtgaggtggtaggatgatcgcgtagggcgtgtttcggggattgggggtttgggtacgcgggttttgttcgtttcgtggaaaggcgttgttttagtgttgtttgcggggtagatttaagggatagattaggg

SEQ ID NO: 20142 - DNA, 771 bp, Artificial Sequence
  chemically treated genomic DNA (Homo sapiens) CpG-island No: 20142
ccctaatctatcccttaaatctaccccgcaaacaacactaaaacaacgcctttccacgaaacgaacaaaacccgcgtacccaaacccccaatccccgaaacacgccctacgcgatcatcctaccacctcactctaaaccgtcttccccaatctcgaccgaacctaaacgacgaaaaacgctaaataaaactccccctaccgcgaccccaactaaaacgaaaaacctcgaaaatcctctccgccgcctcgaaccccgaaaaaacgcgaaccaaaaacctccccgcccgccgcccgccgccccaccgaaacgactcttccgaatccgaactaccgacaaccgccctaccccacccgcccgaccgaacccccaaaaaaatcgcgcctcgtctacaattaacccaacccgaaacccccgcgccgcgaaaccccgcactcacaaccataatacgaccgaaccacgcccaacccgtcaacctcgtctacgacgaacataacgaacgaacccgaatctctactaaaaaaaccgtaaaaccttaaaaacgcgaacgacgataactacaactcctaccaaatacgcgaacttaccgaaatccccgaaaccccgccccgtaccgtcaaccccaccccgcaaaccccgccccaacgacaccgccccaacgacaccgccctaaacgaccgaaaaaaaacgaaaccaaaatcaccgtaccccgcccctaactccgccccctcaacccgaccccgccctacatcccgctataatctccgtaaacg

SEQ ID NO: 20143 - DNA, 771 bp, Artificial Sequence
  chemically treated genomic DNA (Homo sapiens) CpG-island No: 20143
ttttggtttattttttgggtttatttcgtaggtaatattagggtagcgtttttttacgaaacgggtagagttcgcgtatttagatttttaattttcgggatacgttttgcgcggttattttgttattttattttaggtcgttttttttaatttcggtcgagtttgggcggcgagaggcgttgggtggggttttttttatcgcggttttagttaaggcgggaggtttcgggggtttttttcgtcgtttcggatttcgagggggcgcgaattaggggttttttcgttcgtcgttcgtcgttttatcgggacggttttttcgggttcgagttgtcggtagtcgttttgttttattcgttcggtcgagtttttaggaaaatcgcgtttcgtttgtaattagtttagttcgaagttttcgcgtcgcggagtttcgtatttatagttatagtgcggtcgggttacgtttagttcgttaatttcgtttgcggcggatatggcggacgagttcgagtttttgttgaggaagtcgtgaaattttggaggcgcggacggcggtagttatagtttttgttaagtgcgcgggtttgtcggggttttcgaggtttcgtttcgtgtcgttagttttatttcgtaggtttcgttttagcggtatcgttttagcgatatcgttttgagcggtcggaaagaggcggggttagagttatcgtgtttcgtttttaatttcgtttttttagttcggtttcgttttgtatttcgttatggttttcgtaggcg

SEQ ID NO: 20144 - DNA, 771 bp, Artificial Sequence
  chemically treated genomic DNA (Homo sapiens) CpG-island No: 20144
cgcctacgaaaaccataacgaaatacaaaacgaaaccgaactaaaaaaacgaaattaaaaacgaaacacgataactctaaccccgcctctttccgaccgctcaaaacgatatcgctaaaacgataccgctaaaacgaaacctacgaaataaaactaacgacacgaaacgaaacctcgaaaaccccgacaaacccgcgcacttaacaaaaactataactaccgccgtccgcgcctccaaaatttcacgacttcctcaacaaaaactcgaactcgtccgccatatccgccgcaaacgaaattaacgaactaaacgtaacccgaccgcactataactataaatacgaaactccgcgacgcgaaaacttcgaactaaactaattacaaacgaaacgcgattttcctaaaaactcgaccgaacgaataaaacaaaacgactaccgacaactcgaacccgaaaaaaccgtcccgataaaacgacgaacgacgaacgaaaaaacccctaattcgcgccccctcgaaatccgaaacgacgaaaaaaacccccgaaacctcccgccttaactaaaaccgcgataaaaaaaaccccacccaacgcctctcgccgcccaaactcgaccgaaattaaaaaaaacgacctaaaataaaataacaaaataaccgcgcaaaacgtatcccgaaaattaaaaatctaaatacgcgaactctacccgtttcgtaaaaaaacgctaccctaatattacctacgaaataaacccaaaaaataaaccaaaa

SEQ ID NO: 20145 - DNA, 634 bp, Artificial Sequence
  chemically treated genomic DNA (Homo sapiens) CpG-island No: 20145
gtcgtgataggttcgggttcggtcgcgcggagtcgcgggagaattgtttttcgtagtcggaagggggtcgcggggagcgtttttggtcggtggcggcgggggcgggggaggtcgcgagtcgaggcgttttagtttcggcgatgtcgtttcgtttttttcgtcgcggttgatgcggtacgtgtacgtcgtcgttcgtattaggatttgggtcgggtcgtacggtttggttttcggttatcgtttcggtttaggtgagtgtgtgcggcggtcgttttcggttcgttgggttgtaggcgcgcgggcggggttcgttcggcgcggtaggtgcggattcggcggcgttgttgttcgagttaggatttcgggagaggaggggaggggagggacgatttcgttcggcgcggtttttttcgtcgttttttgttttttgggggtcgcggtttttgggggtttaaggttgggtggcggggtgggcgacggtttgcggttgcggaacgtaataggatagggttttttttattttcgattattcggagcggcggcgcggtggtttaggttgttttttcggagagttttttacgtttaagggggattttaggcggttttggggatgttttcggaggttttttttgga

SEQ ID NO: 20146 - DNA, 634 bp, Artificial Sequence
  chemically treated genomic DNA (Homo sapiens) CpG-island No: 20146
tccaaaaaaaacctccgaaaacatccccaaaaccgcctaaaatcccccttaaacgtaaaaaactctccgaaaaaacaacctaaaccaccgcgccgccgctccgaataatcgaaaataaaaaaaaccctatcctattacgttccgcaaccgcaaaccgtcgcccaccccgccacccaaccttaaacccccaaaaaccgcgacccccaaaaaacaaaaaacgacgaaaaaaaccgcgccgaacgaaatcgtccctcccctcccctcctctcccgaaatcctaactcgaacaacaacgccgccgaatccgcacctaccgcgccgaacgaaccccgcccgcgcgcctacaacccaacgaaccgaaaacgaccgccgcacacactcacctaaaccgaaacgataaccgaaaaccaaaccgtacgacccgacccaaatcctaatacgaacgacgacgtacacgtaccgcatcaaccgcgacgaaaaaaacgaaacgacatcgccgaaactaaaacgcctcgactcgcgacctcccccgcccccgccgccaccgaccaaaaacgctccccgcgacccccttccgactacgaaaaacaattctcccgcgactccgcgcgaccgaacccgaacctatcacgac

SEQ ID NO: 20147 - DNA, 634 bp, Artificial Sequence
  chemically treated genomic DNA (Homo sapiens) CpG-island No: 20147
tttaaagagggttttcggggatatttttagagtcgtttgaaattttttttgggcgtgaagggtttttcgagaggataatttgggttatcgcgtcgtcgtttcgggtaatcggggatggaggagattttgttttgttacgtttcgtagtcgtagatcgtcgtttatttcgttatttaattttgagtttttagaagtcgcggtttttagggggtagggagcggcgggaggggtcgcgtcgagcgaggtcgttttttttttttttttttttttcggagttttggttcgggtagtagcgtcgtcgagttcgtatttgtcgcgtcgagcgagtttcgttcgcgcgtttatagtttagcgggtcgagggcggtcgtcgtatatatttatttaggtcgaagcggtggtcgggggttaagtcgtgcgattcggtttaggttttggtgcgggcggcggcgtgtacgtgtcgtattaatcgcggcggggagggcgaggcggtatcgtcggagttggagcgtttcggttcgcggtttttttcgttttcgtcgttatcggttaggagcgtttttcgcggttttttttcggttgcggagggtagttttttcgcggtttcgcgcggtcgggttcggatttgttacggt

SEQ ID NO: 20148 - DNA, 634 bp, Artificial Sequence
  chemically treated genomic DNA (Homo sapiens) CpG-island No: 20148
accgtaacaaatccgaacccgaccgcgcgaaaccgcgaaaaaactaccctccgcaaccgaaaaaaaaccgcgaaaaacgctcctaaccgataacgacgaaaacgaaaaaaaccgcgaaccgaaacgctccaactccgacgataccgcctcgccctccccgccgcgattaatacgacacgtacacgccgccgcccgcaccaaaacctaaaccgaatcgcacgacttaacccccgaccaccgcttcgacctaaataaatatatacgacgaccgccctcgacccgctaaactataaacgcgcgaacgaaactcgctcgacgcgacaaatacgaactcgacgacgctactacccgaaccaaaactccgaaaaaaaaaaaaaaaaaaaaaacgacctcgctcgacgcgacccctcccgccgctccctaccccctaaaaaccgcgacttctaaaaactcaaaattaaataacgaaataaacgacgatctacgactacgaaacgtaacaaaacaaaatctcctccatccccgattacccgaaacgacgacgcgataacccaaattatcctctcgaaaaacccttcacgcccaaaaaaaatttcaaacgactctaaaaatatccccgaaaaccctctttaaa

SEQ ID NO: 20149 - DNA, 566 bp, Artificial Sequence
  chemically treated genomic DNA (Homo sapiens) CpG-island No: 20149
cggcgtcggttatgaaataggtttttatggggagcggaagtagttattaaagtttagcgagtcggggtaggttagggaacgttgagagttcggacgcggagcgttttttatcgtttttacggtttcggtcgtggcgttttttcgtttggttatacgggggcgcgtttttttttcgcgtttcgattgttttacgttcgcgagtttcgttcgcgagtttagttcgcgcgtttttcgggtcgtttattatgtttcgtttcgcgttattttttcgtttttatcgcgtatttttcgcgtttttttttatgttttttttgggttcgtttagcgtttcggttgcgttttttcggcgttttttttgtcgggttttttgttcgtattttgttcgtattcgcggcggagagaaggaagatatagttcgtgtagcgttttagtttgagcgggttttttcgatgcgttttttaggttagtagggtgtgcggatgtcgttcggttgagtcgcggggaacgacggtagtttacgtattaagcgtttttttcgcgttgggtttcgagggtgcggcggcggg

SEQ ID NO: 20150 - DNA, 566 bp, Artificial Sequence
  chemically treated genomic DNA (Homo sapiens) CpG-island No: 20150
cccgccgccgcaccctcgaaacccaacgcgaaaaaaacgcttaatacgtaaactaccgtcgttccccgcgactcaaccgaacgacatccgcacaccctactaacctaaaaaacgcatcgaaaaaacccgctcaaactaaaacgctacacgaactatatcttccttctctccgccgcgaatacgaacaaaatacgaacaaaaaacccgacaaaaaaaacgccgaaaaaacgcaaccgaaacgctaaacgaacccaaaaaaaacataaaaaaaaacgcgaaaaatacgcgataaaaacgaaaaaataacgcgaaacgaaacataataaacgacccgaaaaacgcgcgaactaaactcgcgaacgaaactcgcgaacgtaaaacaatcgaaacgcgaaaaaaaaacgcgcccccgtataaccaaacgaaaaaacgccacgaccgaaaccgtaaaaacgataaaaaacgctccgcgtccgaactctcaacgttccctaacctaccccgactcgctaaactttaataactacttccgctccccataaaaacctatttcataaccgacgccg

SEQ ID NO: 20151 - DNA, 566 bp, Artificial Sequence
  chemically treated genomic DNA (Homo sapiens) CpG-island No: 20151
ttcgtcgtcgtattttcggagtttagcgcggagagggcgtttagtgcgtgagttatcgtcgtttttcgcgatttagtcgagcggtattcgtatattttgttagtttaggaagcgtatcgagggagttcgtttaagttgaagcgttgtacgagttgtgtttttttttttttcgtcgcgaatgcgggtaggatgcgagtaaaagattcggtaaagagggcgtcgagggggcgtagtcggggcgttgggcggatttagaggggatatggagaggaacgcggaaggtacgcggtagagacggggaggtggcgcgaggcgggatatggtgagcgattcgaggggcgcgcggattgggttcgcggacggggttcgcggacgtagagtagtcgaggcgcggagggggagcgcgttttcgtgtggttaggcggggaggcgttacggtcggggtcgtgggggcggtgggaagcgtttcgcgttcgggtttttagcgttttttggtttgtttcggttcgttaggttttgatggttgttttcgttttttataaaggtttgttttatggtcgacgtcg

SEQ ID NO: 20152 - DNA, 566 bp, Artificial Sequence
  chemically treated genomic DNA (Homo sapiens) CpG-island No: 20152
cgacgtcgaccataaaacaaacctttataaaaaacgaaaacaaccatcaaaacctaacgaaccgaaacaaaccaaaaaacgctaaaaacccgaacgcgaaacgcttcccaccgcccccacgaccccgaccgtaacgcctccccgcctaaccacacgaaaacgcgctccccctccgcgcctcgactactctacgtccgcgaaccccgtccgcgaacccaatccgcgcgcccctcgaatcgctcaccatatcccgcctcgcgccacctccccgtctctaccgcgtaccttccgcgttcctctccatatcccctctaaatccgcccaacgccccgactacgccccctcgacgccctctttaccgaatcttttactcgcatcctacccgcattcgcgacgaaaaaaaaaaaaacacaactcgtacaacgcttcaacttaaacgaactccctcgatacgcttcctaaactaacaaaatatacgaataccgctcgactaaatcgcgaaaaacgacgataactcacgcactaaacgccctctccgcgctaaactccgaaaatacgacgacgaa

SEQ ID NO: 20153 - DNA, 527 bp, Artificial Sequence
  chemically treated genomic DNA (Homo sapiens) CpG-island No: 20153
ttttttgaagtcggcggtgaaggagacgagggtgtcgtcgggtttgcgtagttcgaggttgatgttgttcgcgtcgttgttcgtttgtaggtttttttcggttatttggtcgttcggtagtcgtacgcggattcgtagttcggtcggcgtattcgtttttagtagcggcgcgagtagcggtagtagtagtagtagcgtagggcgcgttaggggtatttcgggaaggcgtattttcgggggtcgttgtcgttcgcggtttcggcgcgtcgcgtgggggcggggagaggcgtaggtaaatttcgtttaaagttgggggttagttcggggcgttcgggagtcgtttcgtcgggggttttggtcgcggggtcgttcgcgaggtggcgcggacgtacgtgggtagcgtttagtagggcgttttcggcggtttcgaggcggagacggcgttgtttcggttcggtttcgcggtttcgggttttagcgttgcgagtttgtgttttgtattttttatttaattttatttttcgtta

SEQ ID NO: 20154 - DNA, 527 bp, Artificial Sequence
  chemically treated genomic DNA (Homo sapiens) CpG-island No: 20154
taacgaaaaataaaattaaataaaaaatacaaaacacaaactcgcaacgctaaaacccgaaaccgcgaaaccgaaccgaaacaacgccgtctccgcctcgaaaccgccgaaaacgccctactaaacgctacccacgtacgtccgcgccacctcgcgaacgaccccgcgaccaaaacccccgacgaaacgactcccgaacgccccgaactaacccccaactttaaacgaaatttacctacgcctctccccgcccccacgcgacgcgccgaaaccgcgaacgacaacgacccccgaaaatacgccttcccgaaatacccctaacgcgccctacgctactactactactaccgctactcgcgccgctactaaaaacgaatacgccgaccgaactacgaatccgcgtacgactaccgaacgaccaaataaccgaaaaaaacctacaaacgaacaacgacgcgaacaacatcaacctcgaactacgcaaacccgacgacaccctcgtctccttcaccgccgacttcaaaaaa

SEQ ID NO: 20155 - DNA, 527 bp, Artificial Sequence
  chemically treated genomic DNA (Homo sapiens) CpG-island No: 20155
tgacggggggtgggattgaatgaaaagtgtaaaatataggttcgtagcgttggagttcggggtcgcggagtcgggtcggggtagcgtcgttttcgtttcggggtcgtcgggggcgttttgttgagcgttatttacgtgcgttcgcgttatttcgcgggcgatttcgcggttaaggttttcggcggagcggttttcgggcgtttcgaattagtttttaattttgggcgaagtttgtttgcgttttttttcgtttttacgcggcgcgtcggggtcgcggacggtagcggttttcggggatgcgttttttcggggtatttttggcgcgttttgcgttgttgttgttgttgtcgttgttcgcgtcgttgttgggaacgggtgcgtcggtcgagttgcgggttcgcgtgcggttgtcggacggttaggtgatcgaggagagtttgtaggcggatagcgacgcggatagtattagtttcgagttgcgtaagttcgacggtattttcgttttttttatcgtcgattttaagaag

SEQ ID NO: 20156 - DNA, 527 bp, Artificial Sequence
  chemically treated genomic DNA (Homo sapiens) CpG-island No: 20156
cttcttaaaatcgacgataaaaaaaacgaaaataccgtcgaacttacgcaactcgaaactaatactatccgcgtcgctatccgcctacaaactctcctcgatcacctaaccgtccgacaaccgcacgcgaacccgcaactcgaccgacgcacccgttcccaacaacgacgcgaacaacgacaacaacaacaacaacgcaaaacgcgccaaaaataccccgaaaaaacgcatccccgaaaaccgctaccgtccgcgaccccgacgcgccgcgtaaaaacgaaaaaaaacgcaaacaaacttcgcccaaaattaaaaactaattcgaaacgcccgaaaaccgctccgccgaaaaccttaaccgcgaaatcgcccgcgaaataacgcgaacgcacgtaaataacgctcaacaaaacgcccccgacgaccccgaaacgaaaacgacgctaccccgacccgactccgcgaccccgaactccaacgctacgaacctatattttacacttttcattcaatcccaccccccgtca

SEQ ID NO: 20157 - DNA, 1482 bp, Artificial Sequence
  chemically treated genomic DNA (Homo sapiens) CpG-island No: 20157
gtatgttttcggacgtttttttcggcgttttttcgttgagttcggtttggttagttcgttatttcgttcgttgttattcgattgttcgtatcgattatttgcggtcgttaaggtgcggtagggggcgttgtgcggtcgtagaggtcgcgtcgggtcgcgttttgattggttggaggtcgcggttttcgtttaggtcgttcgtttagtttgttcgtttcgttcgttaagtgtttgggttttttcgttcgcgttttagtttgcgggttttcggggtagcggcgaggtcggagcgtcgcggcggagaggacgagatcgggataagattagggtaggagggagtcggttagtcgcgagaatttcgtacgttcggtaagatgttgttttggcggttgtagacgggtttcgagaaggtcgagttttaggagtttaacgttcggttttatgattacgtgtgtcgggtgcgggagttggagcgcgaaaatttatttttggaggaggagttgcgcggtcggcgcgggcgagagggtttgtgggtcgaggggtaggttcgttgcgtcgaggaggcgcgtagtttgcggtagtagttggacgagttgagttgggttattgcgttggcggagggcgagcgggacgttttgcggcgcgagttgcgggagttgtagcgtttggatgcggaggagcgcgtcgttcgcggtcgtttggacgtcgagttgggtgcgtagtagcgcgagttgtaggaggcgttgggcgcgcgcgtcgttttcgaggcgttgttgggtcgattgtaggtcgagcgtcgaggtttcgacgcggtttacgaacgcgacgtgcgggagttgcgcgcgcgcgtcgttagttttattatgtattttcgcgttcgcgttatcggtttcgtcgcgtcgtcgttacgtttgcgggaggtgtacgatagttacgtattgttggtggtcgagtcgtggcgggagacggtgtagttgtacgaggacgaggtgcgcgagttggaggaggcgttgcggcgcggttaggagagtagattttaggcggaggaagagacgcggttgtgcgcgtaggaggtagaggcgttgcggcgcgaggcgttcgggttggagtagttgcgcgcgcggttggaggacgcgttgttgcggatgcgcgaggagtacgggatataggtcgaggagcggtaggttcgtgcgcggggatggcgcgttgattttatattcgttgtcgtcgttttagtattttgtttttgacggcgtggggtagcggtttttttattaggggcgcggcgtcgcggatcggtagggttcgtttagagggtgttcgaatggtatggggattcggattcggttcgttggtttatcgatttagcgggcgagcgcggggcggtaggttttagcggatagtttcgttttcgttatggggttaggtggtagttgttttaatttttgataagcgtgattgggcgtattttgataggttatt
